United States Patent Application Publication US 2026/0226133 A1 - sequence listing, part 3

SEQ ID NO: 3910 - DNA, 1524 bp, synthetic construct
  source 1..1524: mol_type = other DNA
atggccttaccagtgaccgccttgctcctgccgctggccttgctgctccacgccgccaggccggatattgtgatgacacagagccccgacagcctggccgtgtctcttggagaaagagccaccatcaactgcaagagcagccagagcctgctgtactccagcaacagcaagaactacctggcctggtatcagcagaagcccggccagcctcctaagctgctgatctactgggccagcaccagagaaagcggcgtgcccgatagattttctggctctggcagcggcaccgacttcaccctgacaatttctagcctgcaagccgaggacgtggccgtgtattactgccagcagccttacagctaccctctgagctttggagccggcaccaagctggaactgaaaggcggaggcggaagtggaggcggaggatctggcggcggaggctctcaggttcagctggttcagtctggggccgaagtgaagaaacctggggcctctgtgaaggtgtcctgcaaggcttccggctacacctttaccgaccacgccatccactgggtccgacaggctccaggacaacggcttgagtggatgggctacttcagccccggcaacgacgacttcaagtacagccagaaattccagggcagagtgaccatcaccgccgatacaagcgccagcaccgcctacatggaactgagcagtctgagaagcgaggataccgccgtgtacttctgcacacggtccctgaacatggcctattggggccagggaaccctggtcacagtgtctagcggaagcacatctacgcgtggaatgaggactgaggatcttcccaaagctgtcgtctttctcgaaccccaatggtatcgggtgctcgaaaaagactctgtgacactgaaatgccaaggggcctactctcccgaggacaactccacacagtggtttcataatgagtccctcatcagctctcaggccagctcttatttcattgatgccgctacagtggacgactccggcgagtatcggtgtcagaccaatctgtctacactgtctgaccccgtgcagcttgaggtccacattggatggttgctcttgcaagccccacgctgggttttcaaagaggaagatccaatccatctgcggtgccacagctggaaaaacaccgctctccacaaagtcacatacctgcaaaatggcaaaggacgcaaatacttccatcacaattccgatttttacattccgaaggctaccctgaaagacagcggcagctatttctgccggggactcgtcggctccaagaatgtgtcctccgaaaccgtgaatatcacgattacccaaggactggctgtgcctacaatctctagcttctttccgcctggataccaagtctccttctgtcttgtgatggtcctcctgtttgctgtggacacaggactgtacttttccgtgaaaacgaacatccgcagctccacacgcgattggaaagatcacaagtttaaatggcgcaaagatccccaggacaag

SEQ ID NO: 3911 - DNA, 2373 bp, synthetic construct
  source 1..2373: mol_type = other DNA
atggccttaccagtgaccgccttgctcctgccgctggccttgctgctccacgccgccaggccggatattgtgatgacacagagccccgacagcctggccgtgtctcttggagaaagagccaccatcaactgcaagagcagccagagcctgctgtactccagcaacagcaagaactacctggcctggtatcagcagaagcccggccagcctcctaagctgctgatctactgggccagcaccagagaaagcggcgtgcccgatagattttctggctctggcagcggcaccgacttcaccctgacaatttctagcctgcaagccgaggacgtggccgtgtattactgccagcagccttacagctaccctctgagctttggagccggcaccaagctggaactgaaaggcggaggcggaagtggaggcggaggatctggcggcggaggctctcaggttcagctggttcagtctggggccgaagtgaagaaacctggggcctctgtgaaggtgtcctgcaaggcttccggctacacctttaccgaccacgccatccactgggtccgacaggctccaggacaacggcttgagtggatgggctacttcagccccggcaacgacgacttcaagtacagccagaaattccagggcagagtgaccatcaccgccgatacaagcgccagcaccgcctacatggaactgagcagtctgagaagcgaggataccgccgtgtacttctgcacacggtccctgaacatggcctattggggccagggaaccctggtcacagtgtctagcggaagcacatctacgcgtggaggctctggacaacaacagaccctgcctaaaccattcatctgggctgaaccccactttatggttccgaaagagaaacaagtcacgatttgttgccaagggaattacggggccgtcgagtatcagctccactttgagggctccctgtttgctgtggatcggcccaagccacctgaaagaatcaacaaagtccaattctatattcctgatatgaactcccgcatggcaggccagtattcatgtatctaccgcgtgggagaactttggagtgaaccctctaacctgctggacctcgtcgtgacagagatgtatgatacacccacactgtctgtgcaccctgggccagaagttatcagcggagaaaaagttaccttttattgccgcctcgataccgctacctctatgttcctcttgctgaaagagggccgcagctctcacgtgcagcgaggctacggaaaggtccaagctgagtttcctctcggccccgtgaccaccgctcacaggggcacatatagatgttttggctcttataacaatcatgcctggtcattcccatccgagcctgtgaaactgctggtcacaggcgatattgagaatacctctctggccccagaagatcctacattccccgccgacacatggggaacatatctgctgacaaccgaaaccgggctgcaaaaggaccatgctctgtgggatcataccgctcagaatctgcttcggatggggcttgcattcctggtcctggtggctcttgtctggtttctggtcgaggactggctgtcccggaagagaaccagagaaagagcttccagggccagcacctgggaaggcagacgcagactgaatactcagaccctgcgcgccaagagaagcggatctggcgtgaagcagaccctgaatttcgacctgctgaagctggctggcgacgtggaatccaacccaggcccttctagaggccatatgaccgagtacaagcccacggtgcgcctcgccacccgcgacgacgtccccagggccgtacgcaccctcgccgccgcgttcgccgactaccccgccacgcgccacaccgtcgatccggaccgccacatcgagcgggtcaccgagctgcaagaactcttcctcacgcgcgtcgggctcgacatcggcaaggtgtgggtcgcggacgacggcgccgcggtggcggtctggaccacgccggagagcgtcgaagcgggggcggtgttcgccgagatcggcccgcgcatggccgagttgagcggttcccggctggccgcgcagcaacagatggaaggcctcctggcgccgcaccggcccaaggagcccgcgtggttcctggccaccgtcggcgtctcgcccgaccaccagggcaagggtctgggcagcgccgtcgtgctccccggagtggaggcggccgagcgcgccggggtgcccgccttcctggagacctccgcgccccgcaacctccccttctacgagcggctcggcttcaccgtcaccgccgacgtcgaggtgcccgaaggaccgcgcacctggtgcatgacccgcaagcccggtgcctga

SEQ ID NO: 3912 - DNA, 1872 bp, synthetic construct
  source 1..1872: mol_type = other DNA
atggccttaccagtgaccgccttgctcctgccgctggccttgctgctccacgccgccaggccggatattgtgatgacacagagccccgacagcctggccgtgtctcttggagaaagagccaccatcaactgcaagagcagccagagcctgctgtactccagcaacagcaagaactacctggcctggtatcagcagaagcccggccagcctcctaagctgctgatctactgggccagcaccagagaaagcggcgtgcccgatagattttctggctctggcagcggcaccgacttcaccctgacaatttctagcctgcaagccgaggacgtggccgtgtattactgccagcagccttacagctaccctctgagctttggagccggcaccaagctggaactgaaaggcggaggcggaagtggaggcggaggatctggcggcggaggctctcaggttcagctggttcagtctggggccgaagtgaagaaacctggggcctctgtgaaggtgtcctgcaaggcttccggctacacctttaccgaccacgccatccactgggtccgacaggctccaggacaacggcttgagtggatgggctacttcagccccggcaacgacgacttcaagtacagccagaaattccagggcagagtgaccatcaccgccgatacaagcgccagcaccgcctacatggaactgagcagtctgagaagcgaggataccgccgtgtacttctgcacacggtccctgaacatggcctattggggccagggaaccctggtcacagtgtctagcggaagcacatctacgcgtaaaattgaagttatgtatcctcctccttacctagacaatgagaagagcaatggaaccattatccatgtgaaaggggcgcgtggcgatattgagaatacctctctggccccagaagatcctacattccccgccgacacatggggaacatatctgctgacaaccgaaaccgggctgcaaaaggaccatgctctgtgggatcataccgctcagaatctgcttcggatggggcttgcattcctggtcctggtggctcttgtctggtttctggtcgaggactggctgtcccggaagagaaccagagaaagagcttccagggccagcacctgggaaggcagacgcagactgaatactcagaccctgcgcgccaagagaagcggatctggcgtgaagcagaccctgaatttcgacctgctgaagctggctggcgacgtggaatccaacccaggcccttctagaggccatatgaccgagtacaagcccacggtgcgcctcgccacccgcgacgacgtccccagggccgtacgcaccctcgccgccgcgttcgccgactaccccgccacgcgccacaccgtcgatccggaccgccacatcgagcgggtcaccgagctgcaagaactcttcctcacgcgcgtcgggctcgacatcggcaaggtgtgggtcgcggacgacggcgccgcggtggcggtctggaccacgccggagagcgtcgaagcgggggcggtgttcgccgagatcggcccgcgcatggccgagttgagcggttcccggctggccgcgcagcaacagatggaaggcctcctggcgccgcaccggcccaaggagcccgcgtggttcctggccaccgtcggcgtctcgcccgaccaccagggcaagggtctgggcagcgccgtcgtgctccccggagtggaggcggccgagcgcgccggggtgcccgccttcctggagacctccgcgccccgcaacctccccttctacgagcggctcggcttcaccgtcaccgccgacgtcgaggtgcccgaaggaccgcgcacctggtgcatgacccgcaagcccggtgcctga

SEQ ID NO: 3913 - DNA, 2133 bp, synthetic construct
  source 1..2133: mol_type = other DNA
atggccttaccagtgaccgccttgctcctgccgctggccttgctgctccacgccgccaggccggatattgtgatgacacagagccccgacagcctggccgtgtctcttggagaaagagccaccatcaactgcaagagcagccagagcctgctgtactccagcaacagcaagaactacctggcctggtatcagcagaagcccggccagcctcctaagctgctgatctactgggccagcaccagagaaagcggcgtgcccgatagattttctggctctggcagcggcaccgacttcaccctgacaatttctagcctgcaagccgaggacgtggccgtgtattactgccagcagccttacagctaccctctgagctttggagccggcaccaagctggaactgaaaggcggaggcggaagtggaggcggaggatctggcggcggaggctctcaggttcagctggttcagtctggggccgaagtgaagaaacctggggcctctgtgaaggtgtcctgcaaggcttccggctacacctttaccgaccacgccatccactgggtccgacaggctccaggacaacggcttgagtggatgggctacttcagccccggcaacgacgacttcaagtacagccagaaattccagggcagagtgaccatcaccgccgatacaagcgccagcaccgcctacatggaactgagcagtctgagaagcgaggataccgccgtgtacttctgcacacggtccctgaacatggcctattggggccagggaaccctggtcacagtgtctagcggaagcacatctacgcgtctgtgggtgtcccagccacctgaaattcggacactggaaggctcctccgcctttctgccctgtagctttaacgccagccaggggagactcgccatcggctctgtgacatggttccgggatgaagtcgtccctggaaaagaagttcgcaacggaacaccagagttcagaggcagactcgccccactggcaagctccagattcctgcatgaccatcaggctgaactgcacattagggacgtgcggggccacgatgcctccatctatgtgtgtcgggtcgaagtgcttggactcggcgtcggaactggaaacggcactaggctggtggtcgagaaagaacatccacagcttggcgctggcaccgtcctgttgcttagagccggattctatgccgtcagcttcctgtccgtggctgtggggtctacagtgtattaccagggaaaatgtctcacctggaaaggccccagacgccagcttccagctgttgttcctgctccactgccaccaccttgtggctcctctgctcacttgcttccaccagtgcctggcggacgcgccaagagaagcggatctggcgtgaagcagaccctgaatttcgacctgctgaagctggctggcgacgtggaatccaacccaggcccttctagaatgtaccggatgcagctgctgagctgtatcgccctgtctctggccctggtcacaaatagcgcccctaccagcagcagcaccaagaaaacccagctgcaactggaacacctcctgctggacctccagatgatcctgaacggcatcaacaactacaagaaccccaagctgaccgagatgctgaccgccaagttctacatgcccaagaaggccaccgagctgaagcacctccagtgcctggaagaggaactgaagcccctggaagaagtgctgaatctggcccagagcaagaacttccacctgaggccaagggacctgatctccaacatcaacgtgatcgtgctggaactgaaaggcagcgagacaaccttcatgtgcgagtacgccgacgagacagctaccatcgtggaatttctgaatcggtggatcaccttctgccagagcatcatcagcaccctgacaaagatcgaagtgatgtaccctcctccttacctggacaacgagaagtccaacggcaccatcatccacgtgaagggcaagcacctgtgtccttctccactgttccccggacctagcaagcctttctgggtgctcgttgttgttggcggcgtgctggcctgttacagcctgctggttaccgtggccttcatcatcttttgggtccgaagcaagcggagctaa

SEQ ID NO: 3914 - DNA, 2061 bp, synthetic construct
  source 1..2061: mol_type = other DNA
atggccttaccagtgaccgccttgctcctgccgctggccttgctgctccacgccgccaggccggatattgtgatgacacagagccccgacagcctggccgtgtctcttggagaaagagccaccatcaactgcaagagcagccagagcctgctgtactccagcaacagcaagaactacctggcctggtatcagcagaagcccggccagcctcctaagctgctgatctactgggccagcaccagagaaagcggcgtgcccgatagattttctggctctggcagcggcaccgacttcaccctgacaatttctagcctgcaagccgaggacgtggccgtgtattactgccagcagccttacagctaccctctgagctttggagccggcaccaagctggaactgaaaggcggaggcggaagtggaggcggaggatctggcggcggaggctctcaggttcagctggttcagtctggggccgaagtgaagaaacctggggcctctgtgaaggtgtcctgcaaggcttccggctacacctttaccgaccacgccatccactgggtccgacaggctccaggacaacggcttgagtggatgggctacttcagccccggcaacgacgacttcaagtacagccagaaattccagggcagagtgaccatcaccgccgatacaagcgccagcaccgcctacatggaactgagcagtctgagaagcgaggataccgccgtgtacttctgcacacggtccctgaacatggcctattggggccagggaaccctggtcacagtgtctagcggaagcacatctacgcgtctgtgggtgtcccagccacctgaaattcggacactggaaggctcctccgcctttctgccctgtagctttaacgccagccaggggagactcgccatcggctctgtgacatggttccgggatgaagtcgtccctggaaaagaagttcgcaacggaacaccagagttcagaggcagactcgccccactggcaagctccagattcctgcatgaccatcaggctgaactgcacattagggacgtgcggggccacgatgcctccatctatgtgtgtcgggtcgaagtgcttggactcggcgtcggaactggaaacggcactaggctggtggtcgagaaagaacatccacagcttggcgctggcaccgtcctgttgcttagagccggattctatgccgtcagcttcctgtccgtggctgtggggtctacagtgtattaccagggaaaatgtctcacctggaaaggccccagacgccagcttccagctgttgttcctgctccactgccaccaccttgtggctcctctgctcacttgcttccaccagtgcctggcggacgcgccaagagaagcggatctggcgtgaagcagaccctgaatttcgacctgctgaagctggctggcgacgtggaatccaacccaggcccttctagaggccatatgaccgagtacaagcccacggtgcgcctcgccacccgcgacgacgtccccagggccgtacgcaccctcgccgccgcgttcgccgactaccccgccacgcgccacaccgtcgatccggaccgccacatcgagcgggtcaccgagctgcaagaactcttcctcacgcgcgtcgggctcgacatcggcaaggtgtgggtcgcggacgacggcgccgcggtggcggtctggaccacgccggagagcgtcgaagcgggggcggtgttcgccgagatcggcccgcgcatggccgagttgagcggttcccggctggccgcgcagcaacagatggaaggcctcctggcgccgcaccggcccaaggagcccgcgtggttcctggccaccgtcggcgtctcgcccgaccaccagggcaagggtctgggcagcgccgtcgtgctccccggagtggaggcggccgagcgcgccggggtgcccgccttcctggagacctccgcgccccgcaacctccccttctacgagcggctcggcttcaccgtcaccgccgacgtcgaggtgcccgaaggaccgcgcacctggtgcatgacccgcaagcccggtgcctga

SEQ ID NO: 3915 - DNA, 1086 bp, synthetic construct
  source 1..1086: mol_type = other DNA
atggccttaccagtgaccgccttgctcctgccgctggccttgctgctccacgccgccaggccggatattgtgatgacacagagccccgacagcctggccgtgtctcttggagaaagagccaccatcaactgcaagagcagccagagcctgctgtactccagcaacagcaagaactacctggcctggtatcagcagaagcccggccagcctcctaagctgctgatctactgggccagcaccagagaaagcggcgtgcccgatagattttctggctctggcagcggcaccgacttcaccctgacaatttctagcctgcaagccgaggacgtggccgtgtattactgccagcagccttacagctaccctctgagctttggagccggcaccaagctggaactgaaaggcggaggcggaagtggaggcggaggatctggcggcggaggctctcaggttcagctggttcagtctggggccgaagtgaagaaacctggggcctctgtgaaggtgtcctgcaaggcttccggctacacctttaccgaccacgccatccactgggtccgacaggctccaggacaacggcttgagtggatgggctacttcagccccggcaacgacgacttcaagtacagccagaaattccagggcagagtgaccatcaccgccgatacaagcgccagcaccgcctacatggaactgagcagtctgagaagcgaggataccgccgtgtacttctgcacacggtccctgaacatggcctattggggccagggaaccctggtcacagtgtctagcggaagcacatctacgcgtaaaattgaagttatgtatcctcctccttacctagacaatgagaagagcaatggaaccattatccatgtgaaaggggcgcgtatcacccagggcctggccgtgtctaccatcagcagctttttcccacccggctaccaggtgtccttctgcctcgtgatggtgctgctgttcgccgtggacaccggcctgtacttcagcgtgaaaacaaacatccggtccagcaccagagactggaaggaccacaagttcaagtggcggaaggacccccaggacaag

SEQ ID NO: 3916 - DNA, 1086 bp, synthetic construct
  source 1..1086: mol_type = other DNA
atggccttaccagtgaccgccttgctcctgccgctggccttgctgctccacgccgccaggccggatattgtgatgacacagagccccgacagcctggccgtgtctcttggagaaagagccaccatcaactgcaagagcagccagagcctgctgtactccagcaacagcaagaactacctggcctggtatcagcagaagcccggccagcctcctaagctgctgatctactgggccagcaccagagaaagcggcgtgcccgatagattttctggctctggcagcggcaccgacttcaccctgacaatttctagcctgcaagccgaggacgtggccgtgtattactgccagcagccttacagctaccctctgagctttggagccggcaccaagctggaactgaaaggcggaggcggaagtggaggcggaggatctggcggcggaggctctcaggttcagctggttcagtctggggccgaagtgaagaaacctggggcctctgtgaaggtgtcctgcaaggcttccggctacacctttaccgaccacgccatccactgggtccgacaggctccaggacaacggcttgagtggatgggctacttcagccccggcaacgacgacttcaagtacagccagaaattccagggcagagtgaccatcaccgccgatacaagcgccagcaccgcctacatggaactgagcagtctgagaagcgaggataccgccgtgtacttctgcacacggtccctgaacatggcctattggggccagggaaccctggtcacagtgtctagcggaagcacatctacgcgtaaaattgaagttatgtatcctcctccttacctagacaatgagaagagcaatggaaccattatccatgtgaaaggggcgcgtattacccaaggactggctgtgcctacaatctctagcttctttccgcctggataccaagtctccttctgtcttgtgatggtcctcctgtttgctgtggacacaggactgtacttttccgtgaaaacgaacatccgcagctccacacgcgattggaaagatcacaagtttaaatggcgcaaagatccccaggacaag

SEQ ID NO: 3917 - DNA, 1023 bp, synthetic construct
  source 1..1023: mol_type = other DNA
atggccttaccagtgaccgccttgctcctgccgctggccttgctgctccacgccgccaggccggatattgtgatgacacagagccccgacagcctggccgtgtctcttggagaaagagccaccatcaactgcaagagcagccagagcctgctgtactccagcaacagcaagaactacctggcctggtatcagcagaagcccggccagcctcctaagctgctgatctactgggccagcaccagagaaagcggcgtgcccgatagattttctggctctggcagcggcaccgacttcaccctgacaatttctagcctgcaagccgaggacgtggccgtgtattactgccagcagccttacagctaccctctgagctttggagccggcaccaagctggaactgaaaggcggaggcggaagtggaggcggaggatctggcggcggaggctctcaggttcagctggttcagtctggggccgaagtgaagaaacctggggcctctgtgaaggtgtcctgcaaggcttccggctacacctttaccgaccacgccatccactgggtccgacaggctccaggacaacggcttgagtggatgggctacttcagccccggcaacgacgacttcaagtacagccagaaattccagggcagagtgaccatcaccgccgatacaagcgccagcaccgcctacatggaactgagcagtctgagaagcgaggataccgccgtgtacttctgcacacggtccctgaacatggcctattggggccagggaaccctggtcacagtgtctagcggaagcacatctacgcgtaaaattgaagttatgtatcctcctccttacctagacaatgagaagagcaatggaaccattatccatgtgaaaggggcgcgtattacccaaggactggctgtgtctacaatctctagcttctctccgcctggataccaagtctccttctgtcttgtgatggtcctcctgtttgctgtggacacaggactgtacttttccgtgaaaacgaacatc

SEQ ID NO: 3918 - DNA, 1116 bp, synthetic construct
  source 1..1116: mol_type = other DNA
atggccttaccagtgaccgccttgctcctgccgctggccttgctgctccacgccgccaggccggatattgtgatgacacagagccccgacagcctggccgtgtctcttggagaaagagccaccatcaactgcaagagcagccagagcctgctgtactccagcaacagcaagaactacctggcctggtatcagcagaagcccggccagcctcctaagctgctgatctactgggccagcaccagagaaagcggcgtgcccgatagattttctggctctggcagcggcaccgacttcaccctgacaatttctagcctgcaagccgaggacgtggccgtgtattactgccagcagccttacagctaccctctgagctttggagccggcaccaagctggaactgaaaggcggaggcggaagtggaggcggaggatctggcggcggaggctctcaggttcagctggttcagtctggggccgaagtgaagaaacctggggcctctgtgaaggtgtcctgcaaggcttccggctacacctttaccgaccacgccatccactgggtccgacaggctccaggacaacggcttgagtggatgggctacttcagccccggcaacgacgacttcaagtacagccagaaattccagggcagagtgaccatcaccgccgatacaagcgccagcaccgcctacatggaactgagcagtctgagaagcgaggataccgccgtgtacttctgcacacggtccctgaacatggcctattggggccagggaaccctggtcacagtgtctagcggaagcacatctacgcgtaaaattgaagttatgtatcctcctccttacctagacaatgagaagagcaatggaaccattatccatgtgaaaggggcgcgtgtcgagaaagaacatccacagcttggcgctggcaccgtcctgttgcttagagccggattctatgccgtcagcttcctgtccgtggctgtggggtctacagtgtattaccagggaaaatgtctcacctggaaaggccccagacgccagcttccagctgttgttcctgctccactgccaccaccttgtggctcctctgctcacttgcttccaccagtgcctggcgga

SEQ ID NO: 3919 - DNA, 1359 bp, synthetic construct
  source 1..1359: mol_type = other DNA
atggccttaccagtgaccgccttgctcctgccgctggccttgctgctccacgccgccaggccggatattgtgatgacacagagccccgacagcctggccgtgtctcttggagaaagagccaccatcaactgcaagagcagccagagcctgctgtactccagcaacagcaagaactacctggcctggtatcagcagaagcccggccagcctcctaagctgctgatctactgggccagcaccagagaaagcggcgtgcccgatagattttctggctctggcagcggcaccgacttcaccctgacaatttctagcctgcaagccgaggacgtggccgtgtattactgccagcagccttacagctaccctctgagctttggagccggcaccaagctggaactgaaaggcggaggcggaagtggaggcggaggatctggcggcggaggctctcaggttcagctggttcagtctggggccgaagtgaagaaacctggggcctctgtgaaggtgtcctgcaaggcttccggctacacctttaccgaccacgccatccactgggtccgacaggctccaggacaacggcttgagtggatgggctacttcagccccggcaacgacgacttcaagtacagccagaaattccagggcagagtgaccatcaccgccgatacaagcgccagcaccgcctacatggaactgagcagtctgagaagcgaggataccgccgtgtacttctgcacacggtccctgaacatggcctattggggccagggaaccctggtcacagtgtctagcggaagcacatctacgcgtaaaattgaagttatgtatcctcctccttacctagacaatgagaagagcaatggaaccattatccatgtgaaaggggcgcgtaagtctgtgcgcttttacctggtcgtcagccctgccagtgcctccactcagacatcttggaccccaagggaccttgtgtcctctcagacacagacacagtcctgcgtgccaccaactgctggcgcaagacaggctccagagtctcccagcacaatccccgtcccttctcagccccagaactccacacttaggccaggaccagctgctccaatcgcactggtcccagtgttctgcggactgctggttgccaagtctctggtgctgagcgcactcctcgtttggtggggcgatatttggtggaaaacgatgatggaattgagatccctcgatacgcagaaagccacatgccaccttcagcaagtcacagacttgccttggaccagcgtcagctctcccgtggaacgggaaattctgtatcatacagtggcccgcaccaagatttccgacgatgacgacgagcacacactg

SEQ ID NO: 3920 - DNA, 1170 bp, synthetic construct
  source 1..1170: mol_type = other DNA
atggccttaccagtgaccgccttgctcctgccgctggccttgctgctccacgccgccaggccggatattgtgatgacacagagccccgacagcctggccgtgtctcttggagaaagagccaccatcaactgcaagagcagccagagcctgctgtactccagcaacagcaagaactacctggcctggtatcagcagaagcccggccagcctcctaagctgctgatctactgggccagcaccagagaaagcggcgtgcccgatagattttctggctctggcagcggcaccgacttcaccctgacaatttctagcctgcaagccgaggacgtggccgtgtattactgccagcagccttacagctaccctctgagctttggagccggcaccaagctggaactgaaaggcggaggcggaagtggaggcggaggatctggcggcggaggctctcaggttcagctggttcagtctggggccgaagtgaagaaacctggggcctctgtgaaggtgtcctgcaaggcttccggctacacctttaccgaccacgccatccactgggtccgacaggctccaggacaacggcttgagtggatgggctacttcagccccggcaacgacgacttcaagtacagccagaaattccagggcagagtgaccatcaccgccgatacaagcgccagcaccgcctacatggaactgagcagtctgagaagcgaggataccgccgtgtacttctgcacacggtccctgaacatggcctattggggccagggaaccctggtcacagtgtctagcggaagcacatctacgcgtaaaattgaagttatgtatcctcctccttacctagacaatgagaagagcaatggaaccattatccatgtgaaaggggcgcgtggcgatattgagaatacctctctggccccagaagatcctacattccccgccgacacatggggaacatatctgctgacaaccgaaaccgggctgcaaaaggaccatgctctgtgggatcataccgctcagaatctgcttcggatggggcttgcattcctggtcctggtggctcttgtctggtttctggtcgaggactggctgtcccggaagagaaccagagaaagagcttccagggccagcacctgggaaggcagacgcagactgaatactcagaccctg

SEQ ID NO: 3921 - DNA, 2961 bp, synthetic construct
  source 1..2961: mol_type = other DNA
atggccttaccagtgaccgccttgctcctgccgctggccttgctgctccacgccgccaggccggatattgtgatgacacagagccccgacagcctggccgtgtctcttggagaaagagccaccatcaactgcaagagcagccagagcctgctgtactccagcaacagcaagaactacctggcctggtatcagcagaagcccggccagcctcctaagctgctgatctactgggccagcaccagagaaagcggcgtgcccgatagattttctggctctggcagcggcaccgacttcaccctgacaatttctagcctgcaagccgaggacgtggccgtgtattactgccagcagccttacagctaccctctgagctttggagccggcaccaagctggaactgaaactcgagggacagcctaaggccaatcctaccgtgacactgttccctccaagcagcgaagaactccaggccaacaaggccacacttgtgtgcctgatctccgacttctaccctggggctgtgacagtggcttggaaggccgatggatctcctgtgaaagccggcgtggaaaccaccaagccatccaagcagagcaacaacaaatacgccgccagctcctacctgagcctgacacctgagcagtggaagtcccacagatcctacagctgccaagtgacccacgaaggcagcaccgtggaaaagacagtggcccctacagagtgcagcggatcccagagcttcggcctgctggaccccaagctgtgctacctgctggatggcatcctgttcatctacggcgtgatcctgaccgccctgttcctgagagtgaagttcagcagaagcgccgacgcccctgcctaccagcagggacagaaccaactgtacaacgagctgaacctgggcagacgggaagagtacgacgtgctggacaagcggagaggcagggaccctgagatgggcggaaagccccagcggagaaagaacccccaggaaggactgtataacgaactccagaaagacaagatggccgaagcctacagcgagatcggcatgaagggcgagcggagaagaggcaagggccacgatggcctgtaccagggcctgagcaccgccaccaaggacacctatgacgccctgcacatgcaggccctgcctccaagaagggccaagcgatctggatctggagcaacaaacttctcactactcaaacaagcaggtgacgtggaggagaatcccgggcctactagtatggactggatttggcgcatccttttccttgtcggcgctgctaccggcgcgcattccttcgaacaggttcagctggttcagtctggggccgaagtgaagaaacctggggcctctgtgaaggtgtcctgcaaggcttccggctacacctttaccgaccacgccatccactgggtccgacaggctccaggacaacggcttgagtggatgggctacttcagccccggcaacgacgacttcaagtacagccagaaattccagggcagagtgaccatcaccgccgatacaagcgccagcaccgcctacatggaactgagcagtctgagaagcgaggataccgccgtgtacttctgcacacggtccctgaacatggcctattggggccagggaaccctggtcacagtgtctagcggaagcacatctacgcgtgcctctacaaagggaccctccgtgtttcctctggctcccagcagcaagtctacaagcggaggaacagccgctctgggctgcctggtcaaggattactttcccgagcctgtgaccgtgtcctggaatagcggagcactgacaagcggcgtgcacacctttccagccgtgctgcaaagcagcggcctgtactctctgagcagcgtggtcacagtgcctagctctagcctgggcacccagacctacatctgcaatgtgaaccacaagcctagcaacaccaaggtggacaagagagtggaacccaagagctgtggtaccggcgacatcgagaacaccagtctggcccctgaggaccctacctttcctgccgatacctggggcacctacctgctgaccacagagacaggactccagaaagatcacgccctgtgggaccacacagcccagaacctgctgagaatgggcctcgcctttctggtgctggttgccctcgtgtggttcctggtggaagattggctgagccggaagcggacaagagagagagccagcagagcctctacctgggagggaagaagaaggctgaacacccagacacttagggccaagcgatctggatctggagcaacaaacttctcactactcaaacaagcaggtgacgtggaggagaatcccgggccttctagaggccatatgaccgagtacaagcccacggtgcgcctcgccacccgcgacgacgtccccagggccgtacgcaccctcgccgccgcgttcgccgactaccccgccacgcgccacaccgtcgatccggaccgccacatcgagcgggtcaccgagctgcaagaactcttcctcacgcgcgtcgggctcgacatcggcaaggtgtgggtcgcggacgacggcgccgcggtggcggtctggaccacgccggagagcgtcgaagcgggggcggtgttcgccgagatcggcccgcgcatggccgagttgagcggttcccggctggccgcgcagcaacagatggaaggcctcctggcgccgcaccggcccaaggagcccgcgtggttcctggccaccgtcggcgtctcgcccgaccaccagggcaagggtctgggcagcgccgtcgtgctccccggagtggaggcggccgagcgcgccggggtgcccgccttcctggagacctccgcgccccgcaacctccccttctacgagcggctcggcttcaccgtcaccgccgacgtcgaggtgcccgaaggaccgcgcacctggtgcatgacccgcaagcccggtgcctga

SEQ ID NO: 3922 - DNA, 3159 bp, synthetic construct
  source 1..3159: mol_type = other DNA
atggccttaccagtgaccgccttgctcctgccgctggccttgctgctccacgccgccaggccggatattgtgatgacacagagccccgacagcctggccgtgtctcttggagaaagagccaccatcaactgcaagagcagccagagcctgctgtactccagcaacagcaagaactacctggcctggtatcagcagaagcccggccagcctcctaagctgctgatctactgggccagcaccagagaaagcggcgtgcccgatagattttctggctctggcagcggcaccgacttcaccctgacaatttctagcctgcaagccgaggacgtggccgtgtattactgccagcagccttacagctaccctctgagctttggagccggcaccaagctggaactgaaactcgagggacagcctaaggccaatcctaccgtgacactgttccctccaagcagcgaagaactccaggccaacaaggccacacttgtgtgcctgatctccgacttctaccctggggctgtgacagtggcttggaaggccgatggatctcctgtgaaagccggcgtggaaaccaccaagccatccaagcagagcaacaacaaatacgccgccagctcctacctgagcctgacacctgagcagtggaagtcccacagatcctacagctgccaagtgacccacgaaggcagcaccgtggaaaagacagtggcccctacagagtgcagcggatcccagagcttcggcctgctggaccccaagctgtgctacctgctggatggcatcctgttcatctacggcgtgatcctgaccgccctgttcctgagagtgaagttcagcagaagcgccgacgcccctgcctaccagcagggacagaaccaactgtacaacgagctgaacctgggcagacgggaagagtacgacgtgctggacaagcggagaggcagggaccctgagatgggcggaaagccccagcggagaaagaacccccaggaaggactgtataacgaactccagaaagacaagatggccgaagcctacagcgagatcggcatgaagggcgagcggagaagaggcaagggccacgatggcctgtaccagggcctgagcaccgccaccaaggacacctatgacgccctgcacatgcaggccctgcctccaagaagggccaagcgatctggatctggagcaacaaacttctcactactcaaacaagcaggtgacgtggaggagaatcccgggcctactagtatggactggatttggcgcatccttttccttgtcggcgctgctaccggcgcgcattccttcgaacaggttcagctggttcagtctggggccgaagtgaagaaacctggggcctctgtgaaggtgtcctgcaaggcttccggctacacctttaccgaccacgccatccactgggtccgacaggctccaggacaacggcttgagtggatgggctacttcagccccggcaacgacgacttcaagtacagccagaaattccagggcagagtgaccatcaccgccgatacaagcgccagcaccgcctacatggaactgagcagtctgagaagcgaggataccgccgtgtacttctgcacacggtccctgaacatggcctattggggccagggaaccctggtcacagtgtctagcggaagcacatctacgcgtgcctctacaaagggaccctccgtgtttcctctggctcccagcagcaagtctacaagcggaggaacagccgctctgggctgcctggtcaaggattactttcccgagcctgtgaccgtgtcctggaatagcggagcactgacaagcggcgtgcacacctttccagccgtgctgcaaagcagcggcctgtactctctgagcagcgtggtcacagtgcctagctctagcctgggcacccagacctacatctgcaatgtgaaccacaagcctagcaacaccaaggtggacaagagagtggaacccaagagctgtggtaccaagtctgtgcgcttttacctggtcgtcagccctgccagtgcctccactcagacatcttggaccccaagggaccttgtgtcctctcagacacagacacagtcctgcgtgccaccaactgctggcgcaagacaggctccagagtctcccagcacaatccccgtcccttctcagccccagaactccacacttaggccaggaccagctgctccaatcgcactggtcccagtgttctgcggactgctggttgccaagtctctggtgctgagcgcactcctcgtttggtggggcgatatttggtggaaaacgatgatggaattgagatccctcgatacgcagaaagccacatgccaccttcagcaagtcacagacttgccttggaccagcgtcagctctcccgtggaacgggaaattctgtatcatacagtggcccgcaccaagatttccgacgatgacgacgagcacacactgcgcgccaagagaagcggatctggcgtgaagcagaccctgaatttcgacctgctgaagctggctggcgacgtggaatccaacccaggcccttctagaggccatatgaccgagtacaagcccacggtgcgcctcgccacccgcgacgacgtccccagggccgtacgcaccctcgccgccgcgttcgccgactaccccgccacgcgccacaccgtcgatccggaccgccacatcgagcgggtcaccgagctgcaagaactcttcctcacgcgcgtcgggctcgacatcggcaaggtgtgggtcgcggacgacggcgccgcggtggcggtctggaccacgccggagagcgtcgaagcgggggcggtgttcgccgagatcggcccgcgcatggccgagttgagcggttcccggctggccgcgcagcaacagatggaaggcctcctggcgccgcaccggcccaaggagcccgcgtggttcctggccaccgtcggcgtctcgcccgaccaccagggcaagggtctgggcagcgccgtcgtgctccccggagtggaggcggccgagcgcgccggggtgcccgccttcctggagacctccgcgccccgcaacctccccttctacgagcggctcggcttcaccgtcaccgccgacgtcgaggtgcccgaaggaccgcgcacctggtgcatgacccgcaagcccggtgcctga

SEQ ID NO: 3923 - DNA, 2919 bp, synthetic construct
  source 1..2919: mol_type = other DNA
atggccttaccagtgaccgccttgctcctgccgctggccttgctgctccacgccgccaggccggatattgtgatgacacagagccccgacagcctggccgtgtctcttggagaaagagccaccatcaactgcaagagcagccagagcctgctgtactccagcaacagcaagaactacctggcctggtatcagcagaagcccggccagcctcctaagctgctgatctactgggccagcaccagagaaagcggcgtgcccgatagattttctggctctggcagcggcaccgacttcaccctgacaatttctagcctgcaagccgaggacgtggccgtgtattactgccagcagccttacagctaccctctgagctttggagccggcaccaagctggaactgaaactcgagggacagcctaaggccaatcctaccgtgacactgttccctccaagcagcgaagaactccaggccaacaaggccacacttgtgtgcctgatctccgacttctaccctggggctgtgacagtggcttggaaggccgatggatctcctgtgaaagccggcgtggaaaccaccaagccatccaagcagagcaacaacaaatacgccgccagctcctacctgagcctgacacctgagcagtggaagtcccacagatcctacagctgccaagtgacccacgaaggcagcaccgtggaaaagacagtggcccctacagagtgcagcggatcccagagcttcggcctgctggaccccaagctgtgctacctgctggatggcatcctgttcatctacggcgtgatcctgaccgccctgttcctgagagtgaagttcagcagaagcgccgacgcccctgcctaccagcagggacagaaccaactgtacaacgagctgaacctgggcagacgggaagagtacgacgtgctggacaagcggagaggcagggaccctgagatgggcggaaagccccagcggagaaagaacccccaggaaggactgtataacgaactccagaaagacaagatggccgaagcctacagcgagatcggcatgaagggcgagcggagaagaggcaagggccacgatggcctgtaccagggcctgagcaccgccaccaaggacacctatgacgccctgcacatgcaggccctgcctccaagaagggccaagcgatctggatctggagcaacaaacttctcactactcaaacaagcaggtgacgtggaggagaatcccgggcctactagtatggactggatttggcgcatccttttccttgtcggcgctgctaccggcgcgcattccttcgaacaggttcagctggttcagtctggggccgaagtgaagaaacctggggcctctgtgaaggtgtcctgcaaggcttccggctacacctttaccgaccacgccatccactgggtccgacaggctccaggacaacggcttgagtggatgggctacttcagccccggcaacgacgacttcaagtacagccagaaattccagggcagagtgaccatcaccgccgatacaagcgccagcaccgcctacatggaactgagcagtctgagaagcgaggataccgccgtgtacttctgcacacggtccctgaacatggcctattggggccagggaaccctggtcacagtgtctagcggaagcacatctacgcgtgcctctacaaagggaccctccgtgtttcctctggctcccagcagcaagtctacaagcggaggaacagccgctctgggctgcctggtcaaggattactttcccgagcctgtgaccgtgtcctggaatagcggagcactgacaagcggcgtgcacacctttccagccgtgctgcaaagcagcggcctgtactctctgagcagcgtggtcacagtgcctagctctagcctgggcacccagacctacatctgcaatgtgaaccacaagcctagcaacaccaaggtggacaagagagtggaacccaagagctgtggtaccgtggtcgagaaagaacatccacagcttggcgctggcaccgtcctgttgcttagagccggattctatgccgtcagcttcctgtccgtggctgtggggtctacagtgtattaccagggaaaatgtctcacctggaaaggccccagacgccagcttccagctgttgttcctgctccactgccaccaccttgtggctcctctgctcacttgcttccaccagtgcctggcggacgcgccaagagaagcggatctggcgtgaagcagaccctgaatttcgacctgctgaagctggctggcgacgtggaatccaacccaggcccttctagaggccatatgaccgagtacaagcccacggtgcgcctcgccacccgcgacgacgtccccagggccgtacgcaccctcgccgccgcgttcgccgactaccccgccacgcgccacaccgtcgatccggaccgccacatcgagcgggtcaccgagctgcaagaactcttcctcacgcgcgtcgggctcgacatcggcaaggtgtgggtcgcggacgacggcgccgcggtggcggtctggaccacgccggagagcgtcgaagcgggggcggtgttcgccgagatcggcccgcgcatggccgagttgagcggttcccggctggccgcgcagcaacagatggaaggcctcctggcgccgcaccggcccaaggagcccgcgtggttcctggccaccgtcggcgtctcgcccgaccaccagggcaagggtctgggcagcgccgtcgtgctccccggagtggaggcggccgagcgcgccggggtgcccgccttcctggagacctccgcgccccgcaacctccccttctacgagcggctcggcttcaccgtcaccgccgacgtcgaggtgcccgaaggaccgcgcacctggtgcatgacccgcaagcccggtgcctga

SEQ ID NO: 3924 - DNA, 3006 bp, synthetic construct
  source 1..3006: mol_type = other DNA
atggccttaccagtgaccgccttgctcctgccgctggccttgctgctccacgccgccaggccggatattgtgatgacacagagccccgacagcctggccgtgtctcttggagaaagagccaccatcaactgcaagagcagccagagcctgctgtactccagcaacagcaagaactacctggcctggtatcagcagaagcccggccagcctcctaagctgctgatctactgggccagcaccagagaaagcggcgtgcccgatagattttctggctctggcagcggcaccgacttcaccctgacaatttctagcctgcaagccgaggacgtggccgtgtattactgccagcagccttacagctaccctctgagctttggagccggcaccaagctggaactgaaactcgaggacctgaagaacgtgttcccacctgaggtggccgtgttcgagcctagcgaggccgagatcagccacacccagaaagccaccctcgtgtgcctggctaccggcttctaccccgaccatgtggaactgtcttggtgggtcaacggcaaagaggtgcacagcggcgtgtctaccgacccccagccactgaaagaacagcccgccctgaacgacagccggtactgcctgagcagcagactgagagtgtccgccaccttctggcagaacccccggaaccacttcagatgccaggtgcagttctacggcctgagcgagaacgacgagtggacccaggacagagccaagcccgtgacccagatcgtgtctgccgaagcctggggcagagccgattgcggatcccagagcttcggcctgctggaccccaagctgtgctacctgctggatggcatcctgttcatctacggcgtgatcctgaccgccctgttcctgagagtgaagttcagcagaagcgccgacgcccctgcctaccagcagggacagaaccaactgtacaacgagctgaacctgggcagacgggaagagtacgacgtgctggacaagcggagaggcagggaccctgagatgggcggaaagccccagcggagaaagaacccccaggaaggactgtataacgaactccagaaagacaagatggccgaagcctacagcgagatcggcatgaagggcgagcggagaagaggcaagggccacgatggcctgtaccagggcctgagcaccgccaccaaggacacctatgacgccctgcacatgcaggccctgcctccaagaagggccaagcgatctggatctggagcaacaaacttctcactactcaaacaagcaggtgacgtggaggagaatcccgggcctactagtatggactggatttggcgcatccttttccttgtcggcgctgctaccggcgcgcattccttcgaacaggttcagctggttcagtctggggccgaagtgaagaaacctggggcctctgtgaaggtgtcctgcaaggcttccggctacacctttaccgaccacgccatccactgggtccgacaggctccaggacaacggcttgagtggatgggctacttcagccccggcaacgacgacttcaagtacagccagaaattccagggcagagtgaccatcaccgccgatacaagcgccagcaccgcctacatggaactgagcagtctgagaagcgaggataccgccgtgtacttctgcacacggtccctgaacatggcctattggggccagggaaccctggtcacagtgtctagcggaagcacatctacgcgtatccagaaccctgatcctgccgtgtaccagctgcgggatagcaagagcagcgacaagagcgtgtgtctgttcaccgacttcgacagccagaccaacgtgtcccagagcaaggactccgacgtgtacatcaccgataagaccgtgctggacatgcggagcatggacttcaagagcaactccgccgtggcctggtccaacaagtccgatttcgcctgcgccaacgccttcaacaacagcattatccccgaggacacattcttcccaagccccgagagcagctgcggtaccggcgacatcgagaacaccagtctggcccctgaggaccctacctttcctgccgatacctggggcacctacctgctgaccacagagacaggactccagaaagatcacgccctgtgggaccacacagcccagaacctgctgagaatgggcctcgcctttctggtgctggttgccctcgtgtggttcctggtggaagattggctgagccggaagcggacaagagagagagccagcagagcctctacctgggagggaagaagaaggctgaacacccagacacttagggccaagcgatctggatctggagcaacaaacttctcactactcaaacaagcaggtgacgtggaggagaatcccgggccttctagaggccatatgaccgagtacaagcccacggtgcgcctcgccacccgcgacgacgtccccagggccgtacgcaccctcgccgccgcgttcgccgactaccccgccacgcgccacaccgtcgatccggaccgccacatcgagcgggtcaccgagctgcaagaactcttcctcacgcgcgtcgggctcgacatcggcaaggtgtgggtcgcggacgacggcgccgcggtggcggtctggaccacgccggagagcgtcgaagcgggggcggtgttcgccgagatcggcccgcgcatggccgagttgagcggttcccggctggccgcgcagcaacagatggaaggcctcctggcgccgcaccggcccaaggagcccgcgtggttcctggccaccgtcggcgtctcgcccgaccaccagggcaagggtctgggcagcgccgtcgtgctccccggagtggaggcggccgagcgcgccggggtgcccgccttcctggagacctccgcgccccgcaacctccccttctacgagcggctcggcttcaccgtcaccgccgacgtcgaggtgcccgaaggaccgcgcacctggtgcatgacccgcaagcccggtgcctga

SEQ ID NO: 3925 - DNA, 3204 bp, synthetic construct
  source 1..3204: mol_type = other DNA
atggccttaccagtgaccgccttgctcctgccgctggccttgctgctccacgccgccaggccggatattgtgatgacacagagccccgacagcctggccgtgtctcttggagaaagagccaccatcaactgcaagagcagccagagcctgctgtactccagcaacagcaagaactacctggcctggtatcagcagaagcccggccagcctcctaagctgctgatctactgggccagcaccagagaaagcggcgtgcccgatagattttctggctctggcagcggcaccgacttcaccctgacaatttctagcctgcaagccgaggacgtggccgtgtattactgccagcagccttacagctaccctctgagctttggagccggcaccaagctggaactgaaactcgaggacctgaagaacgtgttcccacctgaggtggccgtgttcgagcctagcgaggccgagatcagccacacccagaaagccaccctcgtgtgcctggctaccggcttctaccccgaccatgtggaactgtcttggtgggtcaacggcaaagaggtgcacagcggcgtgtctaccgacccccagccactgaaagaacagcccgccctgaacgacagccggtactgcctgagcagcagactgagagtgtccgccaccttctggcagaacccccggaaccacttcagatgccaggtgcagttctacggcctgagcgagaacgacgagtggacccaggacagagccaagcccgtgacccagatcgtgtctgccgaagcctggggcagagccgattgcggatcccagagcttcggcctgctggaccccaagctgtgctacctgctggatggcatcctgttcatctacggcgtgatcctgaccgccctgttcctgagagtgaagttcagcagaagcgccgacgcccctgcctaccagcagggacagaaccaactgtacaacgagctgaacctgggcagacgggaagagtacgacgtgctggacaagcggagaggcagggaccctgagatgggcggaaagccccagcggagaaagaacccccaggaaggactgtataacgaactccagaaagacaagatggccgaagcctacagcgagatcggcatgaagggcgagcggagaagaggcaagggccacgatggcctgtaccagggcctgagcaccgccaccaaggacacctatgacgccctgcacatgcaggccctgcctccaagaagggccaagcgatctggatctggagcaacaaacttctcactactcaaacaagcaggtgacgtggaggagaatcccgggcctactagtatggactggatttggcgcatccttttccttgtcggcgctgctaccggcgcgcattccttcgaacaggttcagctggttcagtctggggccgaagtgaagaaacctggggcctctgtgaaggtgtcctgcaaggcttccggctacacctttaccgaccacgccatccactgggtccgacaggctccaggacaacggcttgagtggatgggctacttcagccccggcaacgacgacttcaagtacagccagaaattccagggcagagtgaccatcaccgccgatacaagcgccagcaccgcctacatggaactgagcagtctgagaagcgaggataccgccgtgtacttctgcacacggtccctgaacatggcctattggggccagggaaccctggtcacagtgtctagcggaagcacatctacgcgtatccagaaccctgatcctgccgtgtaccagctgcgggatagcaagagcagcgacaagagcgtgtgtctgttcaccgacttcgacagccagaccaacgtgtcccagagcaaggactccgacgtgtacatcaccgataagaccgtgctggacatgcggagcatggacttcaagagcaactccgccgtggcctggtccaacaagtccgatttcgcctgcgccaacgccttcaacaacagcattatccccgaggacacattcttcccaagccccgagagcagctgcggtaccaagtctgtgcgcttttacctggtcgtcagccctgccagtgcctccactcagacatcttggaccccaagggaccttgtgtcctctcagacacagacacagtcctgcgtgccaccaactgctggcgcaagacaggctccagagtctcccagcacaatccccgtcccttctcagccccagaactccacacttaggccaggaccagctgctccaatcgcactggtcccagtgttctgcggactgctggttgccaagtctctggtgctgagcgcactcctcgtttggtggggcgatatttggtggaaaacgatgatggaattgagatccctcgatacgcagaaagccacatgccaccttcagcaagtcacagacttgccttggaccagcgtcagctctcccgtggaacgggaaattctgtatcatacagtggcccgcaccaagatttccgacgatgacgacgagcacacactgcgcgccaagagaagcggatctggcgtgaagcagaccctgaatttcgacctgctgaagctggctggcgacgtggaatccaacccaggcccttctagaggccatatgaccgagtacaagcccacggtgcgcctcgccacccgcgacgacgtccccagggccgtacgcaccctcgccgccgcgttcgccgactaccccgccacgcgccacaccgtcgatccggaccgccacatcgagcgggtcaccgagctgcaagaactcttcctcacgcgcgtcgggctcgacatcggcaaggtgtgggtcgcggacgacggcgccgcggtggcggtctggaccacgccggagagcgtcgaagcgggggcggtgttcgccgagatcggcccgcgcatggccgagttgagcggttcccggctggccgcgcagcaacagatggaaggcctcctggcgccgcaccggcccaaggagcccgcgtggttcctggccaccgtcggcgtctcgcccgaccaccagggcaagggtctgggcagcgccgtcgtgctccccggagtggaggcggccgagcgcgccggggtgcccgccttcctggagacctccgcgccccgcaacctccccttctacgagcggctcggcttcaccgtcaccgccgacgtcgaggtgcccgaaggaccgcgcacctggtgcatgacccgcaagcccggtgcctga

SEQ ID NO: 3926 - DNA, 2964 bp, synthetic construct
  source 1..2964: mol_type = other DNA
atggccttaccagtgaccgccttgctcctgccgctggccttgctgctccacgccgccaggccggatattgtgatgacacagagccccgacagcctggccgtgtctcttggagaaagagccaccatcaactgcaagagcagccagagcctgctgtactccagcaacagcaagaactacctggcctggtatcagcagaagcccggccagcctcctaagctgctgatctactgggccagcaccagagaaagcggcgtgcccgatagattttctggctctggcagcggcaccgacttcaccctgacaatttctagcctgcaagccgaggacgtggccgtgtattactgccagcagccttacagctaccctctgagctttggagccggcaccaagctggaactgaaactcgaggacctgaagaacgtgttcccacctgaggtggccgtgttcgagcctagcgaggccgagatcagccacacccagaaagccaccctcgtgtgcctggctaccggcttctaccccgaccatgtggaactgtcttggtgggtcaacggcaaagaggtgcacagcggcgtgtctaccgacccccagccactgaaagaacagcccgccctgaacgacagccggtactgcctgagcagcagactgagagtgtccgccaccttctggcagaacccccggaaccacttcagatgccaggtgcagttctacggcctgagcgagaacgacgagtggacccaggacagagccaagcccgtgacccagatcgtgtctgccgaagcctggggcagagccgattgcggatcccagagcttcggcctgctggaccccaagctgtgctacctgctggatggcatcctgttcatctacggcgtgatcctgaccgccctgttcctgagagtgaagttcagcagaagcgccgacgcccctgcctaccagcagggacagaaccaactgtacaacgagctgaacctgggcagacgggaagagtacgacgtgctggacaagcggagaggcagggaccctgagatgggcggaaagccccagcggagaaagaacccccaggaaggactgtataacgaactccagaaagacaagatggccgaagcctacagcgagatcggcatgaagggcgagcggagaagaggcaagggccacgatggcctgtaccagggcctgagcaccgccaccaaggacacctatgacgccctgcacatgcaggccctgcctccaagaagggccaagcgatctggatctggagcaacaaacttctcactactcaaacaagcaggtgacgtggaggagaatcccgggcctactagtatggactggatttggcgcatccttttccttgtcggcgctgctaccggcgcgcattccttcgaacaggttcagctggttcagtctggggccgaagtgaagaaacctggggcctctgtgaaggtgtcctgcaaggcttccggctacacctttaccgaccacgccatccactgggtccgacaggctccaggacaacggcttgagtggatgggctacttcagccccggcaacgacgacttcaagtacagccagaaattccagggcagagtgaccatcaccgccgatacaagcgccagcaccgcctacatggaactgagcagtctgagaagcgaggataccgccgtgtacttctgcacacggtccctgaacatggcctattggggccagggaaccctggtcacagtgtctagcggaagcacatctacgcgtatccagaaccctgatcctgccgtgtaccagctgcgggatagcaagagcagcgacaagagcgtgtgtctgttcaccgacttcgacagccagaccaacgtgtcccagagcaaggactccgacgtgtacatcaccgataagaccgtgctggacatgcggagcatggacttcaagagcaactccgccgtggcctggtccaacaagtccgatttcgcctgcgccaacgccttcaacaacagcattatccccgaggacacattcttcccaagccccgagagcagctgcggtaccgtggtcgagaaagaacatccacagcttggcgctggcaccgtcctgttgcttagagccggattctatgccgtcagcttcctgtccgtggctgtggggtctacagtgtattaccagggaaaatgtctcacctggaaaggccccagacgccagcttccagctgttgttcctgctccactgccaccaccttgtggctcctctgctcacttgcttccaccagtgcctggcggacgcgccaagagaagcggatctggcgtgaagcagaccctgaatttcgacctgctgaagctggctggcgacgtggaatccaacccaggcccttctagaggccatatgaccgagtacaagcccacggtgcgcctcgccacccgcgacgacgtccccagggccgtacgcaccctcgccgccgcgttcgccgactaccccgccacgcgccacaccgtcgatccggaccgccacatcgagcgggtcaccgagctgcaagaactcttcctcacgcgcgtcgggctcgacatcggcaaggtgtgggtcgcggacgacggcgccgcggtggcggtctggaccacgccggagagcgtcgaagcgggggcggtgttcgccgagatcggcccgcgcatggccgagttgagcggttcccggctggccgcgcagcaacagatggaaggcctcctggcgccgcaccggcccaaggagcccgcgtggttcctggccaccgtcggcgtctcgcccgaccaccagggcaagggtctgggcagcgccgtcgtgctccccggagtggaggcggccgagcgcgccggggtgcccgccttcctggagacctccgcgccccgcaacctccccttctacgagcggctcggcttcaccgtcaccgccgacgtcgaggtgcccgaaggaccgcgcacctggtgcatgacccgcaagcccggtgcctga

SEQ ID NO: 3927 - DNA, 2877 bp, synthetic construct
  source 1..2877: mol_type = other DNA
atggccttaccagtgaccgccttgctcctgccgctggccttgctgctccacgccgccaggccggatattgtgatgacacagagccccgacagcctggccgtgtctcttggagaaagagccaccatcaactgcaagagcagccagagcctgctgtactccagcaacagcaagaactacctggcctggtatcagcagaagcccggccagcctcctaagctgctgatctactgggccagcaccagagaaagcggcgtgcccgatagattttctggctctggcagcggcaccgacttcaccctgacaatttctagcctgcaagccgaggacgtggccgtgtattactgccagcagccttacagctaccctctgagctttggagccggcaccaagctggaactgaaactcgagggacagcctaaggccaatcctaccgtgacactgttccctccaagcagcgaagaactccaggccaacaaggccacacttgtgtgcctgatctccgacttctaccctggggctgtgacagtggcttggaaggccgatggatctcctgtgaaagccggcgtggaaaccaccaagccatccaagcagagcaacaacaaatacgccgccagctcctacctgagcctgacacctgagcagtggaagtcccacagatcctacagctgccaagtgacccacgaaggcagcaccgtggaaaagacagtggcccctacagagtgcagcggatcccagagcttcggcctgctggaccccaagctgtgctacctgctggatggcatcctgttcatctacggcgtgatcctgaccgccctgttcctgagagtgaagttcagcagaagcgccgacgcccctgcctaccagcagggacagaaccaactgtacaacgagctgaacctgggcagacgggaagagtacgacgtgctggacaagcggagaggcagggaccctgagatgggcggaaagccccagcggagaaagaacccccaggaaggactgtataacgaactccagaaagacaagatggccgaagcctacagcgagatcggcatgaagggcgagcggagaagaggcaagggccacgatggcctgtaccagggcctgagcaccgccaccaaggacacctatgacgccctgcacatgcaggccctgcctccaagaagggccaagcgatctggatctggagcaacaaacttctcactactcaaacaagcaggtgacgtggaggagaatcccgggcctactagtatggactggatttggcgcatccttttccttgtcggcgctgctaccggcgcgcattccttcgaacaggttcagctggttcagtctggggccgaagtgaagaaacctggggcctctgtgaaggtgtcctgcaaggcttccggctacacctttaccgaccacgccatccactgggtccgacaggctccaggacaacggcttgagtggatgggctacttcagccccggcaacgacgacttcaagtacagccagaaattccagggcagagtgaccatcaccgccgatacaagcgccagcaccgcctacatggaactgagcagtctgagaagcgaggataccgccgtgtacttctgcacacggtccctgaacatggcctattggggccagggaaccctggtcacagtgtctagcggaagcacatctacgcgtgcctctacaaagggaccctccgtgtttcctctggctcccagcagcaagtctacaagcggaggaacagccgctctgggctgcctggtcaaggattactttcccgagcctgtgaccgtgtcctggaatagcggagcactgacaagcggcgtgcacacctttccagccgtgctgcaaagcagcggcctgtactctctgagcagcgtggtcacagtgcctagctctagcctgggcacccagacctacatctgcaatgtgaaccacaagcctagcaacaccaaggtggacaagagagtggaacccaagagctgtggtaccatcactcaaggtttggcagtgtcaaccatctcatcattctttccacctggctaccaagtgtccttctgcctggtcatggtgctgctgttcgccgtggataccggcctgtacttcagcgtcaagaccaacatccggtccagcaccagagactggaaggaccacaagttcaagtggcggaaggaccctcaggacaagagggccaagcgatctggatctggagcaacaaacttctcactactcaaacaagcaggtgacgtggaggagaatcccgggccttctagaggccatatgaccgagtacaagcccacggtgcgcctcgccacccgcgacgacgtccccagggccgtacgcaccctcgccgccgcgttcgccgactaccccgccacgcgccacaccgtcgatccggaccgccacatcgagcgggtcaccgagctgcaagaactcttcctcacgcgcgtcgggctcgacatcggcaaggtgtgggtcgcggacgacggcgccgcggtggcggtctggaccacgccggagagcgtcgaagcgggggcggtgttcgccgagatcggcccgcgcatggccgagttgagcggttcccggctggccgcgcagcaacagatggaaggcctcctggcgccgcaccggcccaaggagcccgcgtggttcctggccaccgtcggcgtctcgcccgaccaccagggcaagggtctgggcagcgccgtcgtgctccccggagtggaggcggccgagcgcgccggggtgcccgccttcctggagacctccgcgccccgcaacctccccttctacgagcggctcggcttcaccgtcaccgccgacgtcgaggtgcccgaaggaccgcgcacctggtgcatgacccgcaagcccggtgcctga

SEQ ID NO: 3928 - DNA, 2922 bp, synthetic construct
  source 1..2922: mol_type = other DNA
atggccttaccagtgaccgccttgctcctgccgctggccttgctgctccacgccgccaggccggatattgtgatgacacagagccccgacagcctggccgtgtctcttggagaaagagccaccatcaactgcaagagcagccagagcctgctgtactccagcaacagcaagaactacctggcctggtatcagcagaagcccggccagcctcctaagctgctgatctactgggccagcaccagagaaagcggcgtgcccgatagattttctggctctggcagcggcaccgacttcaccctgacaatttctagcctgcaagccgaggacgtggccgtgtattactgccagcagccttacagctaccctctgagctttggagccggcaccaagctggaactgaaactcgaggacctgaagaacgtgttcccacctgaggtggccgtgttcgagcctagcgaggccgagatcagccacacccagaaagccaccctcgtgtgcctggctaccggcttctaccccgaccatgtggaactgtcttggtgggtcaacggcaaagaggtgcacagcggcgtgtctaccgacccccagccactgaaagaacagcccgccctgaacgacagccggtactgcctgagcagcagactgagagtgtccgccaccttctggcagaacccccggaaccacttcagatgccaggtgcagttctacggcctgagcgagaacgacgagtggacccaggacagagccaagcccgtgacccagatcgtgtctgccgaagcctggggcagagccgattgcggatcccagagcttcggcctgctggaccccaagctgtgctacctgctggatggcatcctgttcatctacggcgtgatcctgaccgccctgttcctgagagtgaagttcagcagaagcgccgacgcccctgcctaccagcagggacagaaccaactgtacaacgagctgaacctgggcagacgggaagagtacgacgtgctggacaagcggagaggcagggaccctgagatgggcggaaagccccagcggagaaagaacccccaggaaggactgtataacgaactccagaaagacaagatggccgaagcctacagcgagatcggcatgaagggcgagcggagaagaggcaagggccacgatggcctgtaccagggcctgagcaccgccaccaaggacacctatgacgccctgcacatgcaggccctgcctccaagaagggccaagcgatctggatctggagcaacaaacttctcactactcaaacaagcaggtgacgtggaggagaatcccgggcctactagtatggactggatttggcgcatccttttccttgtcggcgctgctaccggcgcgcattccttcgaacaggttcagctggttcagtctggggccgaagtgaagaaacctggggcctctgtgaaggtgtcctgcaaggcttccggctacacctttaccgaccacgccatccactgggtccgacaggctccaggacaacggcttgagtggatgggctacttcagccccggcaacgacgacttcaagtacagccagaaattccagggcagagtgaccatcaccgccgatacaagcgccagcaccgcctacatggaactgagcagtctgagaagcgaggataccgccgtgtacttctgcacacggtccctgaacatggcctattggggccagggaaccctggtcacagtgtctagcggaagcacatctacgcgtatccagaaccctgatcctgccgtgtaccagctgcgggatagcaagagcagcgacaagagcgtgtgtctgttcaccgacttcgacagccagaccaacgtgtcccagagcaaggactccgacgtgtacatcaccgataagaccgtgctggacatgcggagcatggacttcaagagcaactccgccgtggcctggtccaacaagtccgatttcgcctgcgccaacgccttcaacaacagcattatccccgaggacacattcttcccaagccccgagagcagctgcggtaccatcactcaaggtttggcagtgtcaaccatctcatcattctttccacctggctaccaagtgtccttctgcctggtcatggtgctgctgttcgccgtggataccggcctgtacttcagcgtcaagaccaacatccggtccagcaccagagactggaaggaccacaagttcaagtggcggaaggaccctcaggacaagagggccaagcgatctggatctggagcaacaaacttctcactactcaaacaagcaggtgacgtggaggagaatcccgggccttctagaggccatatgaccgagtacaagcccacggtgcgcctcgccacccgcgacgacgtccccagggccgtacgcaccctcgccgccgcgttcgccgactaccccgccacgcgccacaccgtcgatccggaccgccacatcgagcgggtcaccgagctgcaagaactcttcctcacgcgcgtcgggctcgacatcggcaaggtgtgggtcgcggacgacggcgccgcggtggcggtctggaccacgccggagagcgtcgaagcgggggcggtgttcgccgagatcggcccgcgcatggccgagttgagcggttcccggctggccgcgcagcaacagatggaaggcctcctggcgccgcaccggcccaaggagcccgcgtggttcctggccaccgtcggcgtctcgcccgaccaccagggcaagggtctgggcagcgccgtcgtgctccccggagtggaggcggccgagcgcgccggggtgcccgccttcctggagacctccgcgccccgcaacctccccttctacgagcggctcggcttcaccgtcaccgccgacgtcgaggtgcccgaaggaccgcgcacctggtgcatgacccgcaagcccggtgcctga

SEQ ID NO: 3929 - DNA, 1971 bp, synthetic construct
  source 1..1971: mol_type = other DNA
atggccttaccagtgaccgccttgctcctgccgctggccttgctgctccacgccgccaggccggatattgtgatgacacagagccccgacagcctggccgtgtctcttggagaaagagccaccatcaactgcaagagcagccagagcctgctgtactccagcaacagcaagaactacctggcctggtatcagcagaagcccggccagcctcctaagctgctgatctactgggccagcaccagagaaagcggcgtgcccgatagattttctggctctggcagcggcaccgacttcaccctgacaatttctagcctgcaagccgaggacgtggccgtgtattactgccagcagccttacagctaccctctgagctttggagccggcaccaagctggaactgaaactcgagggacagcctaaggccaatcctaccgtgacactgttccctccaagcagcgaagaactccaggccaacaaggccacacttgtgtgcctgatctccgacttctaccctggggctgtgacagtggcttggaaggccgatggatctcctgtgaaagccggcgtggaaaccaccaagccatccaagcagagcaacaacaaatacgccgccagctcctacctgagcctgacacctgagcagtggaagtcccacagatcctacagctgccaagtgacccacgaaggcagcaccgtggaaaagacagtggcccctacagagtgcagcggatccctgggagagcctcagctgtgctatatcctggacgccatcctgtttctgtacggcatcgtgctgaccctgctgtactgccggctgaagatccaagtgcggaaggccgccatcaccagctacgagaaatccgacggcgtgtacaccggcctgagcaccagaaatcaagagacatacgagacactgaagcacgaaaagcctccacaaagggccaagcgatctggatctggagcaacaaacttctcactactcaaacaagcaggtgacgtggaggagaatcccgggcctactagtatggactggatttggcgcatccttttccttgtcggcgctgctaccggcgcgcattccttcgaacaggttcagctggttcagtctggggccgaagtgaagaaacctggggcctctgtgaaggtgtcctgcaaggcttccggctacacctttaccgaccacgccatccactgggtccgacaggctccaggacaacggcttgagtggatgggctacttcagccccggcaacgacgacttcaagtacagccagaaattccagggcagagtgaccatcaccgccgatacaagcgccagcaccgcctacatggaactgagcagtctgagaagcgaggataccgccgtgtacttctgcacacggtccctgaacatggcctattggggccagggaaccctggtcacagtgtctagcggaagcacatctacgcgtgcctctacaaagggaccctccgtgtttcctctggctcccagcagcaagtctacaagcggaggaacagccgctctgggctgcctggtcaaggattactttcccgagcctgtgaccgtgtcctggaatagcggagcactgacaagcggcgtgcacacctttccagccgtgctgcaaagcagcggcctgtactctctgagcagcgtggtcacagtgcctagctctagcctgggcacccagacctacatctgcaatgtgaaccacaagcctagcaacaccaaggtggacaagagagtggaacccaagagctgtggtaccctcggagaaccacagctctgttacattctggatgctatcctgttcctctatgggatcgtcctgacactcctgtattgcagactcaaaattcaagttcgcaaagccgccattacctcttacgagaagagtgatggggtgtacacaggactgtctacccggaatcaagaaacctacgaaaccctcaaacatgagaagccacctcagtaa

SEQ ID NO: 3930 - DNA, 35 bp, synthetic construct
  source 1..35: mol_type = other DNA
ggggggggggggggggggggggggggggggggggg

SEQ ID NO: 3931 - DNA, 1857 bp, synthetic construct
  source 1..1857: mol_type = other DNA
atggccttaccagtgaccgccttgctcctgccgctggccttgctgctccacgccgccaggccggacatccagatgacacagactacatcctccctgtctgcctctctgggagacagagtcaccatcagttgcagggcaagtcaggacattagtaagtacctgaactggtatcagcagaaaccagatggaactgttaaactcctgatctaccatacatcaagattacactcaggagtcccatcaaggttcagtggcagtgggtctggaacagattattctctcaccattagcaacctggagcaagaagatattgccacttacttttgccaacagggtaatacgcttccgtacacgttcggaggggggaccaagctggagatcacactcgaggacctgaagaacgtgttcccacctgaggtggccgtgttcgagcctagcgaggccgagatcagccacacccagaaagccaccctcgtgtgcctggctaccggcttctaccccgaccatgtggaactgtcttggtgggtcaacggcaaagaggtgcacagcggcgtgtgtaccgacccccagccactgaaagaacagcccgccctgaacgacagccggtactgcctgagcagcagactgagagtgtccgccaccttctggcagaacccccggaaccacttcagatgccaggtgcagttctacggcctgagcgagaacgacgagtggacccaggacagagccaagcccgtgacccagatcgtgtctgccgaagcctggggcagagccgattgcgacgtgaagctggtggaaaagagcttcgagacagacaccaacctgaacttccagaacctgagcgtgatcggcttcagaatcctgctgctgaaagtggccggctttaacctgctgatgaccctgcggctgtggtccagcagggccaagcgatctggatctggagcaacaaacttctcactactcaaacaagcaggtgacgtggaggagaatcccgggcctactagtatggactggatttggcgcatccttttccttgtcggcgctgctaccggcgcgcattccttcgaagtgaaactgcaggagtcaggacctggcctggtggcgccctcacagagcctgtccgtcacatgcactgtctcaggggtctcattacccgactatggtgtaagctggattcgccagcctccacgaaagggtctggagtggctgggagtaatatggggtagtgaaaccacatactataattcagctctcaaatccagactgaccatcatcaaggacaactccaagagccaagttttcttaaaaatgaacagtctgcaaactgatgacacagccatttactactgtgccaaacattattactacggtggtagctatgctatggactactggggccaaggaacctcagtcaccgtctcctcaacgcgtatccagaaccctgatcctgccgtgtaccagctgcgggatagcaagagcagcgacaagagcgtgtgtctgttcaccgacttcgacagccagaccaacgtgtcccagagcaaggactccgacgtgtacatcaccgataagtgcgtgctggacatgcggagcatggacttcaagagcaactccgccgtggcctggtccaacaagtccgatttcgcctgcgccaacgccttcaacaacagcattatccccgaggacacattcttcccaagccccgagagcagctgcggctttaccagcgagagctaccagcagggcgtgctgagcgccaccatcctgtacgagatcctgctgggcaaggccaccctgtacgccgtgctggtgtctgccctggtgctgatggctatggtcaagcggaaggacagccgggga

SEQ ID NO: 3932 - DNA, 1860 bp, synthetic construct
  source 1..1860: mol_type = other DNA
atggccttaccagtgaccgccttgctcctgccgctggccttgctgctccacgccgccaggccggagatcgtgatgacccagagccctgccaccctgtctctgagccctggcgaaagagccaccctgagctgtagagccagccaggacatcagcaagtacctgaactggtatcagcagaagcccggccaggcccccagactgctgatctaccacaccagcagactgcacagcggcatccccgccagattttctggctctggcagcggcaccgactacaccctgacaatcagcagcctccagcccgaggacttcgccgtgtacttctgtcagcaaggcaacaccctgccctacaccttcggccagggcaccaagctggaaatcaagctcgaggacctgaagaacgtgttcccacctgaggtggccgtgttcgagcctagcgaggccgagatcagccacacccagaaagccaccctcgtgtgcctggctaccggcttctaccccgaccatgtggaactgtcttggtgggtcaacggcaaagaggtgcacagcggcgtgtgtaccgacccccagccactgaaagaacagcccgccctgaacgacagccggtactgcctgagcagcagactgagagtgtccgccaccttctggcagaacccccggaaccacttcagatgccaggtgcagttctacggcctgagcgagaacgacgagtggacccaggacagagccaagcccgtgacccagatcgtgtctgccgaagcctggggcagagccgattgcgacgtgaagctggtggaaaagagcttcgagacagacaccaacctgaacttccagaacctgagcgtgatcggcttcagaatcctgctgctgaaagtggccggctttaacctgctgatgaccctgcggctgtggtccagcagggccaagcgatctggatctggagcaacaaacttctcactactcaaacaagcaggtgacgtggaggagaatcccgggcctactagtatggactggatttggcgcatccttttccttgtcggcgctgctaccggcgcgcattccttcgaacaggtgcaactccaggaatctggccctggcctcgtgaagcccagcgagacactgagcctgacctgtaccgtgtccggcgtgtccctgcctgactatggcgtgtcctggatcagacagccccctggcaagggcctggaatggatcggagtgatttggggcagcgaaaccacctactacaacagctccctgaagtccagagtgaccatctccaaggacaactccaagaaccaggtgtccctgaagctgagcagcgtgacagccgccgacaccgccgtgtattactgcgccaagcactactactacggcggcagctacgctatggactactggggccagggaaccctcgtgaccgtgtctagtacgcgtatccagaaccctgatcctgccgtgtaccagctgcgggatagcaagagcagcgacaagagcgtgtgtctgttcaccgacttcgacagccagaccaacgtgtcccagagcaaggactccgacgtgtacatcaccgataagtgcgtgctggacatgcggagcatggacttcaagagcaactccgccgtggcctggtccaacaagtccgatttcgcctgcgccaacgccttcaacaacagcattatccccgaggacacattcttcccaagccccgagagcagctgcggctttaccagcgagagctaccagcagggcgtgctgagcgccaccatcctgtacgagatcctgctgggcaaggccaccctgtacgccgtgctggtgtctgccctggtgctgatggctatggtcaagcggaaggacagccgggga

SEQ ID NO: 3933 - DNA, 1863 bp, synthetic construct
  source 1..1863: mol_type = other DNA
atggccttaccagtgaccgccttgctcctgccgctggccttgctgctccacgccgccaggccggacgagatcgtgctgacacagagccccgccaccctgtcactgtctccaggcgaaagagccaccctgagctgtagcgccagcagcagcgtgtcctacatgcactggtatcagcagaagcccggccaggcccccagactgctgatctacgataccagcaagctggcctccggcatccccgccagattttctggcagcggctccggcaccgacttcaccctgacaatcagcagcctggaacccgaggacgtggccgtgtactactgttttcaaggcagcgtgtaccccttcaccttcggccagggcaccaagctggaaatcaagagactcgaggacctgaagaacgtgttcccacctgaggtggccgtgttcgagcctagcgaggccgagatcagccacacccagaaagccaccctcgtgtgcctggctaccggcttctaccccgaccatgtggaactgtcttggtgggtcaacggcaaagaggtgcacagcggcgtgtgtaccgacccccagccactgaaagaacagcccgccctgaacgacagccggtactgcctgagcagcagactgagagtgtccgccaccttctggcagaacccccggaaccacttcagatgccaggtgcagttctacggcctgagcgagaacgacgagtggacccaggacagagccaagcccgtgacccagatcgtgtctgccgaagcctggggcagagccgattgcgacgtgaagctggtggaaaagagcttcgagacagacaccaacctgaacttccagaacctgagcgtgatcggcttcagaatcctgctgctgaaagtggccggctttaacctgctgatgaccctgcggctgtggtccagcagggccaagcgatctggatctggagcaacaaacttctcactactcaaacaagcaggtgacgtggaggagaatcccgggcctactagtatggactggatttggcgcatccttttccttgtcggcgctgctaccggcgcgcattccttcgaacaggtgcagctccaggaatctggccctggcctcgtgaagcctagccagaccctgagcctgacctgtaccgtgtctggcggcagcatcagcacaagcggcatgggcgtgggctggatcagacagcaccctggcaagggcctggaatggatcggccacatttggtgggacgacgacaagcggtacaaccccgccctgaagtccagagtgaccatcagcgtggacaccagcaagaaccagttcagcctgaagctgagcagcgtgacagccgccgataccgccgtgtattattgcgcccggatggaactgtggtcctactacttcgactactggggccagggaaccctcgtgaccgtgtctagtacgcgtatccagaaccctgatcctgccgtgtaccagctgcgggatagcaagagcagcgacaagagcgtgtgtctgttcaccgacttcgacagccagaccaacgtgtcccagagcaaggactccgacgtgtacatcaccgataagtgcgtgctggacatgcggagcatggacttcaagagcaactccgccgtggcctggtccaacaagtccgatttcgcctgcgccaacgccttcaacaacagcattatccccgaggacacattcttcccaagccccgagagcagctgcggctttaccagcgagagctaccagcagggcgtgctgagcgccaccatcctgtacgagatcctgctgggcaaggccaccctgtacgccgtgctggtgtctgccctggtgctgatggctatggtcaagcggaaggacagccgggga

SEQ ID NO: 3934 - DNA, 1857 bp, synthetic construct
  source 1..1857: mol_type = other DNA
atggccttaccagtgaccgccttgctcctgccgctggccttgctgctccacgccgccaggccggactacatccacgtgacacagagccctagcagcctgtccgtgtccatcggcgatagagtgaccatcaactgccagacctctcaaggcgtgggcagcgacctgcactggtatcagcacaaacctggcagagcccctaagctgctgatccaccatgccagctctgtggaagatggcgtgcccagcagattttccggcaccggatttcacaccagcttcaacctgacaatcaacgacctccaggccgacgacatcggcacctactactgtcaagtgctccagagcttcggcagaggcagcagactggatacaaaactcgaggacctgaagaacgtgttcccacctgaggtggccgtgttcgagcctagcgaggccgagatcagccacacccagaaagccaccctcgtgtgcctggctaccggcttctaccccgaccatgtggaactgtcttggtgggtcaacggcaaagaggtgcacagcggcgtgtgtaccgacccccagccactgaaagaacagcccgccctgaacgacagccggtactgcctgagcagcagactgagagtgtccgccaccttctggcagaacccccggaaccacttcagatgccaggtgcagttctacggcctgagcgagaacgacgagtggacccaggacagagccaagcccgtgacccagatcgtgtctgccgaagcctggggcagagccgattgcgacgtgaagctggtggaaaagagcttcgagacagacaccaacctgaacttccagaacctgagcgtgatcggcttcagaatcctgctgctgaaagtggccggctttaacctgctgatgaccctgcggctgtggtccagcagggccaagcgatctggatctggagcaacaaacttctcactactcaaacaagcaggtgacgtggaggagaatcccgggcctactagtatggactggatttggcgcatccttttccttgtcggcgctgctaccggcgcgcattccttcgaaagggcacacctggtgcagtctggcaccgccatgaagaaacctggcgcttccgtcagagtgtcctgtcagacaagcggctacaccttcacagcccacatcctgttctggttcagacaggccccaggcagaggactggaatgggtcggatggatcaagccccagtacggggccgtgaatttcggcggaggcttcagagacagagtgaccctgaccagggacgtgtaccgggaaatcgcctacatggacatccggggcctgaagcctgatgacaccgccgtgtactactgcgccagggatagaagctacggcgacagctcttgggctctcgatgcttggggacagggcacaacagtggtggtgtctgctacgcgtatccagaaccctgatcctgccgtgtaccagctgcgggatagcaagagcagcgacaagagcgtgtgtctgttcaccgacttcgacagccagaccaacgtgtcccagagcaaggactccgacgtgtacatcaccgataagtgcgtgctggacatgcggagcatggacttcaagagcaactccgccgtggcctggtccaacaagtccgatttcgcctgcgccaacgccttcaacaacagcattatccccgaggacacattcttcccaagccccgagagcagctgcggctttaccagcgagagctaccagcagggcgtgctgagcgccaccatcctgtacgagatcctgctgggcaaggccaccctgtacgccgtgctggtgtctgccctggtgctgatggctatggtcaagcggaaggacagccgggga

SEQ ID NO: 3935 - DNA, 1887 bp, synthetic construct
  source 1..1887: mol_type = other DNA
atggccttaccagtgaccgccttgctcctgccgctggccttgctgctccacgccgccaggccggacgtgcagatgatccagacccccgatagcctggccgtgtccctgggacagagagccaccatctcttgcagagccagcgagagcgtggacaactacggcatcagcttcatgcactggtatcagcagaagcccggccagagccccaagctgctgatctacagagcctccaacctggaaagcggcatccccgccagattttccggcagcggcagcagaaccgacttcaccctgaccatcaaccccgtggaaaccgacgacgtggcaacctactactgccagcagaacaacaaggacccccccacctttggcggaggcaccaagctggaaatcaagctcgaggacctgaagaacgtgttcccacctgaggtggccgtgttcgagcctagcgaggccgagatcagccacacccagaaagccaccctcgtgtgcctggctaccggcttctaccccgaccatgtggaactgtcttggtgggtcaacggcaaagaggtgcacagcggcgtgtgtaccgacccccagccactgaaagaacagcccgccctgaacgacagccggtactgcctgagcagcagactgagagtgtccgccaccttctggcagaacccccggaaccacttcagatgccaggtgcagttctacggcctgagcgagaacgacgagtggacccaggacagagccaagcccgtgacccagatcgtgtctgccgaagcctggggcagagccgattgcgacgtgaagctggtggaaaagagcttcgagacagacaccaacctgaacttccagaacctgagcgtgatcggcttcagaatcctgctgctgaaagtggccggctttaacctgctgatgaccctgcggctgtggtccagcagggccaagcgatctggatctggagcaacaaacttctcactactcaaacaagcaggtgacgtggaggagaatcccgggcctactagtatggactggatttggcgcatccttttccttgtcggcgctgctaccggcgcgcattccttcgaagggggaggcggctctcaggtgcaactccagcagtctggcgctgagcttgtgaagcctggggccagcgtgaagattagctgcaaggccagcggctacgccttcagcagctactggatgaactgggtcaagcagcggcctggcaagggcctggaatggatcggccaaatctaccccggcgacggcgacaccacctacaacggcaagttcaagggcaaggccaccctgacagccgacaagagcagcagcaccgtgtacatgcaactgaacagcctgaccagcgaggacagcgccgtgtacttctgcgtgcggtactactacggcagctccggctacttcgactattggggccagggcaccacactgaccgtgtcctctacgcgtatccagaaccctgatcctgccgtgtaccagctgcgggatagcaagagcagcgacaagagcgtgtgtctgttcaccgacttcgacagccagaccaacgtgtcccagagcaaggactccgacgtgtacatcaccgataagtgcgtgctggacatgcggagcatggacttcaagagcaactccgccgtggcctggtccaacaagtccgatttcgcctgcgccaacgccttcaacaacagcattatccccgaggacacattcttcccaagccccgagagcagctgcggctttaccagcgagagctaccagcagggcgtgctgagcgccaccatcctgtacgagatcctgctgggcaaggccaccctgtacgccgtgctggtgtctgccctggtgctgatggctatggtcaagcggaaggacagccgggga

SEQ ID NO: 3936 - DNA, 1860 bp, synthetic construct
  source 1..1860: mol_type = other DNA
atggccttaccagtgaccgccttgctcctgccgctggccttgctgctccacgccgccaggccggacgtgcagatgatccagacccccagcagcctgtctgccagcctgggcgatagagtgaccatcagctgtcgggccagccaggacatcggcaactacctgaactggtatcagcagaaacccgacggcaccgtgaagctgctgatctactacaccagcagactgcacagcggcgtgcccagcagattttctggcagcggctctggcaccgagtacagcctgaccatctccaacctggaacaggaagatattgctacctacttctgtcagcaaggcagcgccctgccccctacatttggcggcggaacaaagctggaaatcaacctcgaggacctgaagaacgtgttcccacctgaggtggccgtgttcgagcctagcgaggccgagatcagccacacccagaaagccaccctcgtgtgcctggctaccggcttctaccccgaccatgtggaactgtcttggtgggtcaacggcaaagaggtgcacagcggcgtgtgtaccgacccccagccactgaaagaacagcccgccctgaacgacagccggtactgcctgagcagcagactgagagtgtccgccaccttctggcagaacccccggaaccacttcagatgccaggtgcagttctacggcctgagcgagaacgacgagtggacccaggacagagccaagcccgtgacccagatcgtgtctgccgaagcctggggcagagccgattgcgacgtgaagctggtggaaaagagcttcgagacagacaccaacctgaacttccagaacctgagcgtgatcggcttcagaatcctgctgctgaaagtggccggctttaacctgctgatgaccctgcggctgtggtccagcagggccaagcgatctggatctggagcaacaaacttctcactactcaaacaagcaggtgacgtggaggagaatcccgggcctactagtatggactggatttggcgcatccttttccttgtcggcgctgctaccggcgcgcattccttcgaagctctccagctccagcagtctggcgcagaactcgtgcggcctggcgcttctgtgaccctgagctgtaaagccagcggctacaccttcaccgactacgagatgcactgggtcaagcagacccctgtgcacggcctggaatggatcggagccatcgaccctgagacaggcggcaccgcctacaaccagaagttcgagggcaaggccatcctgaccgccgacaagagcagcagcacagcctacatggaactgcggagcctgacctccgaggacagccccgtgtactactgtgccagacggcggtactacggcagcagctccttcgactattggggccagggcaccaccctgaccgtgtctagtacgcgtatccagaaccctgatcctgccgtgtaccagctgcgggatagcaagagcagcgacaagagcgtgtgtctgttcaccgacttcgacagccagaccaacgtgtcccagagcaaggactccgacgtgtacatcaccgataagtgcgtgctggacatgcggagcatggacttcaagagcaactccgccgtggcctggtccaacaagtccgatttcgcctgcgccaacgccttcaacaacagcattatccccgaggacacattcttcccaagccccgagagcagctgcggctttaccagcgagagctaccagcagggcgtgctgagcgccaccatcctgtacgagatcctgctgggcaaggccaccctgtacgccgtgctggtgtctgccctggtgctgatggctatggtcaagcggaaggacagccgggga

SEQ ID NO: 3937 - DNA, 1872 bp, synthetic construct
  source 1..1872: mol_type = other DNA
atggccttaccagtgaccgccttgctcctgccgctggccttgctgctccacgccgccaggccggacatcgtcctgacccagtccccagccagcctggcggtgtccctgggtcaacgagctaccatttcctgcagagcctctaagtccgtatccacttccggctatagttacctgcattggtaccaacagaaaccagggcagccacccaagctgctcatctatctggcctcaaacctggagtccggcgtgcccgccagattctccggaagtgggagcggcaccgactttacattgaacatccacccagtcgaagaggaagatgctgccacttattactgtcagcactccagggagctgccatttacatttggctctggcacaaaactggagatcaaactcgaggacctgaagaacgtgttcccacctgaggtggccgtgttcgagcctagcgaggccgagatcagccacacccagaaagccaccctcgtgtgcctggctaccggcttctaccccgaccatgtggaactgtcttggtgggtcaacggcaaagaggtgcacagcggcgtgtgtaccgacccccagccactgaaagaacagcccgccctgaacgacagccggtactgcctgagcagcagactgagagtgtccgccaccttctggcagaacccccggaaccacttcagatgccaggtgcagttctacggcctgagcgagaacgacgagtggacccaggacagagccaagcccgtgacccagatcgtgtctgccgaagcctggggcagagccgattgcgacgtgaagctggtggaaaagagcttcgagacagacaccaacctgaacttccagaacctgagcgtgatcggcttcagaatcctgctgctgaaagtggccggctttaacctgctgatgaccctgcggctgtggtccagcagggccaagcgatctggatctggagcaacaaacttctcactactcaaacaagcaggtgacgtggaggagaatcccgggcctactagtatggactggatttggcgcatccttttccttgtcggcgctgctaccggcgcgcattccttcgaacaggttcagctggtcgagtccgggggaggtctggtacagccgggtggcagcctcaagctgtcatgtgccgcatctggttttgactttagcaggtattggatgagctgggtccgccaggccccgggcaagggacttgagtggattggagaaataaaccctacttccagcacaatcaacttcacaccttctttgaaagataaggtttttatctctcgggataacgctaaaaacacactgtacttgcagatgtctaaggtgcgaagcgaagacaccgccctctattattgcgcccggggtaattactaccgctatggggatgcgatggactattgggggcaaggtacctccgtcacggtctcaacgcgtatccagaaccctgatcctgccgtgtaccagctgcgggatagcaagagcagcgacaagagcgtgtgtctgttcaccgacttcgacagccagaccaacgtgtcccagagcaaggactccgacgtgtacatcaccgataagtgcgtgctggacatgcggagcatggacttcaagagcaactccgccgtggcctggtccaacaagtccgatttcgcctgcgccaacgccttcaacaacagcattatccccgaggacacattcttcccaagccccgagagcagctgcggctttaccagcgagagctaccagcagggcgtgctgagcgccaccatcctgtacgagatcctgctgggcaaggccaccctgtacgccgtgctggtgtctgccctggtgctgatggctatggtcaagcggaaggacagccgggga

SEQ ID NO: 3938 - DNA, 1866 bp, synthetic construct
  source 1..1866: mol_type = other DNA
atggccttaccagtgaccgccttgctcctgccgctggccttgctgctccacgccgccaggccggacatccagatgacccagagccctagctcactgagcgccagcgtgggcgacagggtgaccattacctgctccgccagccaggacatcagcaactacctgaactggtaccagcagaagcccggcaaggcccccaagctgctgatctactacacctccaacctgcactccggcgtgcccagcaggttcagcggaagcggcagcggcaccgatttcaccctgaccatctccagcctgcagcccgaggacttcgccacctactactgccagcagtacaggaagctcccctggactttcggccagggcaccaaactggagatcaagcgtctcgaggacctgaagaacgtgttcccacctgaggtggccgtgttcgagcctagcgaggccgagatcagccacacccagaaagccaccctcgtgtgcctggctaccggcttctaccccgaccatgtggaactgtcttggtgggtcaacggcaaagaggtgcacagcggcgtgtgtaccgacccccagccactgaaagaacagcccgccctgaacgacagccggtactgcctgagcagcagactgagagtgtccgccaccttctggcagaacccccggaaccacttcagatgccaggtgcagttctacggcctgagcgagaacgacgagtggacccaggacagagccaagcccgtgacccagatcgtgtctgccgaagcctggggcagagccgattgcgacgtgaagctggtggaaaagagcttcgagacagacaccaacctgaacttccagaacctgagcgtgatcggcttcagaatcctgctgctgaaagtggccggctttaacctgctgatgaccctgcggctgtggtccagcagggccaagcgatctggatctggagcaacaaacttctcactactcaaacaagcaggtgacgtggaggagaatcccgggcctactagtatggactggatttggcgcatccttttccttgtcggcgctgctaccggcgcgcattccttcgaacaggtgcagctggtccagagcggcgccgaagtgaagaagcccggcagctccgtgaaagtgagctgcaaggccagcggcggcaccttcagcaactactggatgcactgggtgaggcaggcccccggacagggcctggagtggatgggcgccacctacaggggccacagcgacacctactacaaccagaagttcaagggccgggtgaccatcaccgccgacaagagcaccagcaccgcctacatggaactgagcagcctcaggagcgaggacaccgctgtgtattactgcgccaggggcgccatctacgacggctacgacgtgctggacaactggggccagggcacactggtgaccgtgtccagcacgcgtatccagaaccctgatcctgccgtgtaccagctgcgggatagcaagagcagcgacaagagcgtgtgtctgttcaccgacttcgacagccagaccaacgtgtcccagagcaaggactccgacgtgtacatcaccgataagtgcgtgctggacatgcggagcatggacttcaagagcaactccgccgtggcctggtccaacaagtccgatttcgcctgcgccaacgccttcaacaacagcattatccccgaggacacattcttcccaagccccgagagcagctgcggctttaccagcgagagctaccagcagggcgtgctgagcgccaccatcctgtacgagatcctgctgggcaaggccaccctgtacgccgtgctggtgtctgccctggtgctgatggctatggtcaagcggaaggacagccgggga

SEQ ID NO: 3939 - DNA, 1866 bp, synthetic construct
  source 1..1866: mol_type = other DNA
atggccttaccagtgaccgccttgctcctgccgctggccttgctgctccacgccgccaggccggacatcgtgctgacacagagccctgccaccctgtctctgagccctggcgatagagccaccatcagctgtagagccagcgagagcgtgaccatcctgggcagccacctgatctactggtatcagcagaagcccggccagccccccagactgctgattcagctggcctccaatgtgcagaccggcgtgccagccagattttccggcagcggcagcagaaccgacttcaccctgaccatcagcagcgtggaacccgaggacttcgccgtgtactactgcctccagagccggaccatccccagaacattcggccagggcaccaagctggaaatcaagagactcgaggacctgaagaacgtgttcccacctgaggtggccgtgttcgagcctagcgaggccgagatcagccacacccagaaagccaccctcgtgtgcctggctaccggcttctaccccgaccatgtggaactgtcttggtgggtcaacggcaaagaggtgcacagcggcgtgtgtaccgacccccagccactgaaagaacagcccgccctgaacgacagccggtactgcctgagcagcagactgagagtgtccgccaccttctggcagaacccccggaaccacttcagatgccaggtgcagttctacggcctgagcgagaacgacgagtggacccaggacagagccaagcccgtgacccagatcgtgtctgccgaagcctggggcagagccgattgcgacgtgaagctggtggaaaagagcttcgagacagacaccaacctgaacttccagaacctgagcgtgatcggcttcagaatcctgctgctgaaagtggccggctttaacctgctgatgaccctgcggctgtggtccagcagggccaagcgatctggatctggagcaacaaacttctcactactcaaacaagcaggtgacgtggaggagaatcccgggcctactagtatggactggatttggcgcatccttttccttgtcggcgctgctaccggcgcgcattccttcgaacaggtgcagctggtgcagtctggccccgaagtgaagaaacccggcgagtccgtgaagatcagctgcaaggccagcggctacaccttccggcactacagcatgaactgggtcaagcaggccccaggccagggcctgaagtggatgggcagaatcaacaccgagagcggcgtgcccatctacgccgacgacttcaagggccggttcagcttcaccgtggacaccagcgccagcaccgcctacctggaaatctccagcctgaccagcgaggataccgccgtgtatttctgctccaacgactacctgtacagcctggatttctggggccagggaaccaccctgacagtgtcctctacgcgtatccagaaccctgatcctgccgtgtaccagctgcgggatagcaagagcagcgacaagagcgtgtgtctgttcaccgacttcgacagccagaccaacgtgtcccagagcaaggactccgacgtgtacatcaccgataagtgcgtgctggacatgcggagcatggacttcaagagcaactccgccgtggcctggtccaacaagtccgatttcgcctgcgccaacgccttcaacaacagcattatccccgaggacacattcttcccaagccccgagagcagctgcggctttaccagcgagagctaccagcagggcgtgctgagcgccaccatcctgtacgagatcctgctgggcaaggccaccctgtacgccgtgctggtgtctgccctggtgctgatggctatggtcaagcggaaggacagccgggga

SEQ ID NO: 3940 - DNA, 1869 bp, synthetic construct
  source 1..1869: mol_type = other DNA
atggccttaccagtgaccgccttgctcctgccgctggccttgctgctccacgccgccaggccgcagtctgtgctgacacagcctcctagtgtgtctggcgctcctggacagagagtgaccatcagctgtacaggcagcagcagcaatatcggagccggctttgacgtgcactggtatcagcagctgcctggcacagcccctaaactgctgatctacggcaacagcaacagacccagcggcgtgcccgatagattttccggctctaagagcggcacaagcgccagcctggctattactggactccaggccgaggacgaggccgactactactgtcagagctacgacagcagcctgagcggctacgttttcggcaccggcaccaaagtgacagtgcttggtctcgaggacctgaagaacgtgttcccacctgaggtggccgtgttcgagcctagcgaggccgagatcagccacacccagaaagccaccctcgtgtgcctggctaccggcttctaccccgaccatgtggaactgtcttggtgggtcaacggcaaagaggtgcacagcggcgtgtgtaccgacccccagccactgaaagaacagcccgccctgaacgacagccggtactgcctgagcagcagactgagagtgtccgccaccttctggcagaacccccggaaccacttcagatgccaggtgcagttctacggcctgagcgagaacgacgagtggacccaggacagagccaagcccgtgacccagatcgtgtctgccgaagcctggggcagagccgattgcgacgtgaagctggtggaaaagagcttcgagacagacaccaacctgaacttccagaacctgagcgtgatcggcttcagaatcctgctgctgaaagtggccggctttaacctgctgatgaccctgcggctgtggtccagcagggccaagcgatctggatctggagcaacaaacttctcactactcaaacaagcaggtgacgtggaggagaatcccgggcctactagtatggactggatttggcgcatccttttccttgtcggcgctgctaccggcgcgcattccttcgaacaagttcagctggttcagagcggagccgaagtgaagaaacctggggcctctgtgaaggtgtcctgcaaggcttccggctacacctttaccgattactacatgcactgggtccgacaggctcccggccaaagacttgaatggatgggctggatcaaccccaacagcggcggcacaaattacgcccagaagttccaggaccggatcaccgtgaccagagacaccagctccaacaccggctacatggaactgacccggctgagatccgatgacaccgccgtgtactactgcgctagaagcccttactccggcgtgctggataagtggggacagggcacactggtcaccgtgtcatctacgcgtatccagaaccctgatcctgccgtgtaccagctgcgggatagcaagagcagcgacaagagcgtgtgtctgttcaccgacttcgacagccagaccaacgtgtcccagagcaaggactccgacgtgtacatcaccgataagtgcgtgctggacatgcggagcatggacttcaagagcaactccgccgtggcctggtccaacaagtccgatttcgcctgcgccaacgccttcaacaacagcattatccccgaggacacattcttcccaagccccgagagcagctgcggctttaccagcgagagctaccagcagggcgtgctgagcgccaccatcctgtacgagatcctgctgggcaaggccaccctgtacgccgtgctggtgtctgccctggtgctgatggctatggtcaagcggaaggacagccgggga

SEQ ID NO: 3941 - DNA, 1860 bp, synthetic construct
  source 1..1860: mol_type = other DNA
atggccttaccagtgaccgccttgctcctgccgctggccttgctgctccacgccgccaggccgcaggctgttctgacacagcctccatctgcctctggcacacctggacagagagtgaccatctcctgtagcggcagcagcagcaacatcggcagctacaccgtgtcctggtatcagcagctccctggaacagcccctaagttcctgatctacagcaacaaccagcggcctagcggcgtgcccgatagattttctggcagcaagagcggcacaagcgccagcctggctatttctggactccagtctgaggacgaggccgactactattgtgccgcctgggacgatagcctgaacggctatgtgtttggcaccggcaccaaagtgacagtgcttggtctcgaggacctgaagaacgtgttcccacctgaggtggccgtgttcgagcctagcgaggccgagatcagccacacccagaaagccaccctcgtgtgcctggctaccggcttctaccccgaccatgtggaactgtcttggtgggtcaacggcaaagaggtgcacagcggcgtgtgtaccgacccccagccactgaaagaacagcccgccctgaacgacagccggtactgcctgagcagcagactgagagtgtccgccaccttctggcagaacccccggaaccacttcagatgccaggtgcagttctacggcctgagcgagaacgacgagtggacccaggacagagccaagcccgtgacccagatcgtgtctgccgaagcctggggcagagccgattgcgacgtgaagctggtggaaaagagcttcgagacagacaccaacctgaacttccagaacctgagcgtgatcggcttcagaatcctgctgctgaaagtggccggctttaacctgctgatgaccctgcggctgtggtccagcagggccaagcgatctggatctggagcaacaaacttctcactactcaaacaagcaggtgacgtggaggagaatcccgggcctactagtatggactggatttggcgcatccttttccttgtcggcgctgctaccggcgcgcattccttcgaagttcaactggttcagagcggagccgaagtgaagaagcctggcgagagcctgaagattagctgcaaaggcagcggctacgacttcaccacctactggatcggctgggtccgacagatgcctggcaaaggactggaatggatgggcatcatctaccccggcgacagcgacaccagatacagccctagcgttagaggccgcgtgaccatcagcgccgacaagtctatcaacaccgcctacctccagtggtccagcctggaagcctctgacaccgccatgtactactgcgccagaatgtggaccttcagccaggatggatggggccagggaacactggtcacagtgtcatctacgcgtatccagaaccctgatcctgccgtgtaccagctgcgggatagcaagagcagcgacaagagcgtgtgtctgttcaccgacttcgacagccagaccaacgtgtcccagagcaaggactccgacgtgtacatcaccgataagtgcgtgctggacatgcggagcatggacttcaagagcaactccgccgtggcctggtccaacaagtccgatttcgcctgcgccaacgccttcaacaacagcattatccccgaggacacattcttcccaagccccgagagcagctgcggctttaccagcgagagctaccagcagggcgtgctgagcgccaccatcctgtacgagatcctgctgggcaaggccaccctgtacgccgtgctggtgtctgccctggtgctgatggctatggtcaagcggaaggacagccgggga

SEQ ID NO: 3942 - DNA, 1869 bp, synthetic construct
  source 1..1869: mol_type = other DNA
atggccttaccagtgaccgccttgctcctgccgctggccttgctgctccacgccgccaggccggacatcgtgatgacccagagccccgatagcctggccgtgtctctgggagagagagccaccatcaactgcaagagcagccagagcatcctgtacagcagcaaccagaagaactacctggcctggtatcagcagaagcccggccagagccctaagctgctgatctactgggccagcaccagagaaagcggcgtgcccgatagattcagcggcagcggctctggcaccgacttcaccctgaccatcagttctcttcaggccgaggacgtggccgtgtactactgccaccagtacatcagctcctacaccttcggccagggcaccaagctggaaatcaagctcgaggacctgaagaacgtgttcccacctgaggtggccgtgttcgagcctagcgaggccgagatcagccacacccagaaagccaccctcgtgtgcctggctaccggcttctaccccgaccatgtggaactgtcttggtgggtcaacggcaaagaggtgcacagcggcgtgtgtaccgacccccagccactgaaagaacagcccgccctgaacgacagccggtactgcctgagcagcagactgagagtgtccgccaccttctggcagaacccccggaaccacttcagatgccaggtgcagttctacggcctgagcgagaacgacgagtggacccaggacagagccaagcccgtgacccagatcgtgtctgccgaagcctggggcagagccgattgcgacgtgaagctggtggaaaagagcttcgagacagacaccaacctgaacttccagaacctgagcgtgatcggcttcagaatcctgctgctgaaagtggccggctttaacctgctgatgaccctgcggctgtggtccagcagggccaagcgatctggatctggagcaacaaacttctcactactcaaacaagcaggtgacgtggaggagaatcccgggcctactagtatggactggatttggcgcatccttttccttgtcggcgctgctaccggcgcgcattccttcgaacaggtgcagctggtgcagtctggcgctgaagtgaagaaacctggggccagcgtgaaggtgtcctgcaaggccagcggctacacctttgccagccagtggatgcactggatgagacaggcccctggacagggcctggaatggatcggctggatcaaccccggcaacgtgaacaccaagtacaacgagaagttcaagggcagagccaccctgacagtggacaccagcaccaacaccgcctacatggaactgagcagcctgcggagcgaggacaccgccgtgtattattgcgccagaagcacctggtacagacccctggattattggggccagggaacccttgtgaccgtgtcctctacgcgtatccagaaccctgatcctgccgtgtaccagctgcgggatagcaagagcagcgacaagagcgtgtgtctgttcaccgacttcgacagccagaccaacgtgtcccagagcaaggactccgacgtgtacatcaccgataagtgcgtgctggacatgcggagcatggacttcaagagcaactccgccgtggcctggtccaacaagtccgatttcgcctgcgccaacgccttcaacaacagcattatccccgaggacacattcttcccaagccccgagagcagctgcggctttaccagcgagagctaccagcagggcgtgctgagcgccaccatcctgtacgagatcctgctgggcaaggccaccctgtacgccgtgctggtgtctgccctggtgctgatggctatggtcaagcggaaggacagccgggga

SEQ ID NO: 3943 - DNA, 1869 bp, synthetic construct
  source 1..1869: mol_type = other DNA
atggccttaccagtgaccgccttgctcctgccgctggccttgctgctccacgccgccaggccggaccacatcgtgctgacccagagccctagcagcctgtctgccagcctgggcgacagagtgaccatcagctgtagagccagccaggacatcagcacctacctgaactggtatcagcagaaacccgacggcaccgtgaagctgctgatcttctacaccagcagactgcacgccggggtgcccagcagattttctggcagcggctctggcacccaccacagcctgaccatctccaacctggaacaggaagatattgctacctacttctgtcagcaaggcaacagcctgcccttcaccttcggcagcggcaccaagctggaaatcaagagactcgaggacctgaagaacgtgttcccacctgaggtggccgtgttcgagcctagcgaggccgagatcagccacacccagaaagccaccctcgtgtgcctggctaccggcttctaccccgaccatgtggaactgtcttggtgggtcaacggcaaagaggtgcacagcggcgtgtgtaccgacccccagccactgaaagaacagcccgccctgaacgacagccggtactgcctgagcagcagactgagagtgtccgccaccttctggcagaacccccggaaccacttcagatgccaggtgcagttctacggcctgagcgagaacgacgagtggacccaggacagagccaagcccgtgacccagatcgtgtctgccgaagcctggggcagagccgattgcgacgtgaagctggtggaaaagagcttcgagacagacaccaacctgaacttccagaacctgagcgtgatcggcttcagaatcctgctgctgaaagtggccggctttaacctgctgatgaccctgcggctgtggtccagcagggccaagcgatctggatctggagcaacaaacttctcactactcaaacaagcaggtgacgtggaggagaatcccgggcctactagtatggactggatttggcgcatccttttccttgtcggcgctgctaccggcgcgcattccttcgaacaggtgcagctgaaagagagcggccctgagctggaaaagcctggggccagcgtgaagattagctgcaaggccagcggctacagcttcaccgcctacagcatgaactgggtcaagcagaacaacggcatgagcctggaatggatcggcagcatcgacccctactacggcgacaccaaatacgcccagaagttcaagggcaaggccaccctgaccgtggataaggccagcagcaccgcctacctccagctgaagtctctgaccagcgaggacagcgccgtgtactactgcgccagacggatgattaccaccggcgactggtacttcgacgtgtggggagccggaaccaccgtgacagtgtctagcacgcgtatccagaaccctgatcctgccgtgtaccagctgcgggatagcaagagcagcgacaagagcgtgtgtctgttcaccgacttcgacagccagaccaacgtgtcccagagcaaggactccgacgtgtacatcaccgataagtgcgtgctggacatgcggagcatggacttcaagagcaactccgccgtggcctggtccaacaagtccgatttcgcctgcgccaacgccttcaacaacagcattatccccgaggacacattcttcccaagccccgagagcagctgcggctttaccagcgagagctaccagcagggcgtgctgagcgccaccatcctgtacgagatcctgctgggcaaggccaccctgtacgccgtgctggtgtctgccctggtgctgatggctatggtcaagcggaaggacagccgggga

SEQ ID NO: 3944 - DNA, 1869 bp, synthetic construct; identical to SEQ ID NO: 3943
  source 1..1869: mol_type = other DNA

SEQ ID NO: 3945 - DNA, 1869 bp, synthetic construct
  source 1..1869: mol_type = other DNA
atggccttaccagtgaccgccttgctcctgccgctggccttgctgctccacgccgccaggccggacgagatcgtgctgacacagagccctgccaccctgtctctgagccctggcgaaagagccaccctgagctgtagagccagccagagcgtgtccagctacctggcctggtatcagcagaagcccggccaggctccccggctgctgatctacgatgccagcaatagagccaccggcatccccgccagattttccggctctggcagcggcaccgacttcaccctgaccatcagctccctggaacccgaggacttcgccgtgtactactgccagcagcggagcaactggcccatcacattcggccagggcacccggctggaaatcaaactcgaggacctgaagaacgtgttcccacctgaggtggccgtgttcgagcctagcgaggccgagatcagccacacccagaaagccaccctcgtgtgcctggctaccggcttctaccccgaccatgtggaactgtcttggtgggtcaacggcaaagaggtgcacagcggcgtgtgtaccgacccccagccactgaaagaacagcccgccctgaacgacagccggtactgcctgagcagcagactgagagtgtccgccaccttctggcagaacccccggaaccacttcagatgccaggtgcagttctacggcctgagcgagaacgacgagtggacccaggacagagccaagcccgtgacccagatcgtgtctgccgaagcctggggcagagccgattgcgacgtgaagctggtggaaaagagcttcgagacagacaccaacctgaacttccagaacctgagcgtgatcggcttcagaatcctgctgctgaaagtggccggctttaacctgctgatgaccctgcggctgtggtccagcagggccaagcgatctggatctggagcaacaaacttctcactactcaaacaagcaggtgacgtggaggagaatcccgggcctactagtatggactggatttggcgcatccttttccttgtcggcgctgctaccggcgcgcattccttcgaagaagtgcagctggtggaatcaggcggcggactggtgcagcctggcagaagcctgagactgagctgtgccgccagcggcttcaccttcaacgactacgccatgcactgggtgcgccaggcccctggaaaaggactggaatgggtgtccacaatcagctggaacagcggcagcatcggctacgccgatagcgtgaagggccggttcaccatcagccgggacaacgccaagaagtccctgtacctccagatgaacagcctgcgggccgaggacacagccctgtactattgcgccaaggacatccagtacggcaactactactacggcatggacgtgtggggccagggaaccaccgtgaccgtgtcatctacgcgtatccagaaccctgatcctgccgtgtaccagctgcgggatagcaagagcagcgacaagagcgtgtgtctgttcaccgacttcgacagccagaccaacgtgtcccagagcaaggactccgacgtgtacatcaccgataagtgcgtgctggacatgcggagcatggacttcaagagcaactccgccgtggcctggtccaacaagtccgatttcgcctgcgccaacgccttcaacaacagcattatccccgaggacacattcttcccaagccccgagagcagctgcggctttaccagcgagagctaccagcagggcgtgctgagcgccaccatcctgtacgagatcctgctgggcaaggccaccctgtacgccgtgctggtgtctgccctggtgctgatggctatggtcaagcggaaggacagccgggga

SEQ ID NO: 3946 - DNA, 1875 bp, synthetic construct
  source 1..1875: mol_type = other DNA
atggccttaccagtgaccgccttgctcctgccgctggccttgctgctccacgccgccaggccggacatcgtgatgacccagacccccctgagcctgcctgtgacacctggcgagcctgccagcatctcctgcagaagcagcaagagcctgctgcacagcaacggcatcacctacctgtactggtatctgcagaaacccggccagagcccccaactgctgatctaccagatgagcaacctggtgtccggcgtgcccgacagattttctggcagcggctccggcaccgacttcaccctgaagatcagccgggtggaagccgaggacgtgggcgtgtactactgcgcccagaacctggaactgccctacacctttggcggcggaacaaaggtggaaatcaagcggctcgaggacctgaagaacgtgttcccacctgaggtggccgtgttcgagcctagcgaggccgagatcagccacacccagaaagccaccctcgtgtgcctggctaccggcttctaccccgaccatgtggaactgtcttggtgggtcaacggcaaagaggtgcacagcggcgtgtgtaccgacccccagccactgaaagaacagcccgccctgaacgacagccggtactgcctgagcagcagactgagagtgtccgccaccttctggcagaacccccggaaccacttcagatgccaggtgcagttctacggcctgagcgagaacgacgagtggacccaggacagagccaagcccgtgacccagatcgtgtctgccgaagcctggggcagagccgattgcgacgtgaagctggtggaaaagagcttcgagacagacaccaacctgaacttccagaacctgagcgtgatcggcttcagaatcctgctgctgaaagtggccggctttaacctgctgatgaccctgcggctgtggtccagcagggccaagcgatctggatctggagcaacaaacttctcactactcaaacaagcaggtgacgtggaggagaatcccgggcctactagtatggactggatttggcgcatccttttccttgtcggcgctgctaccggcgcgcattccttcgaacaggtgcaactggtgcagagcggagccgaagtgaaaaagcccggcagcagcgtgaaggtgtcctgcaaggccagcggctacgccttcagctactcctggatcaactgggtgcgccaggcccctggacagggcctggaatggatgggcagaatcttccccggcgacggcgacaccgactacaacggcaagttcaagggcagagtgaccatcaccgccgacaagagcaccagcaccgcctacatggaactgagcagcctgcggagcgaggataccgccgtgtactattgtgccagaaacgtgttcgacggctactggctggtgtactggggccagggaacacttgtgaccgtgtccagcacgcgtatccagaaccctgatcctgccgtgtaccagctgcgggatagcaagagcagcgacaagagcgtgtgtctgttcaccgacttcgacagccagaccaacgtgtcccagagcaaggactccgacgtgtacatcaccgataagtgcgtgctggacatgcggagcatggacttcaagagcaactccgccgtggcctggtccaacaagtccgatttcgcctgcgccaacgccttcaacaacagcattatccccgaggacacattcttcccaagccccgagagcagctgcggctttaccagcgagagctaccagcagggcgtgctgagcgccaccatcctgtacgagatcctgctgggcaaggccaccctgtacgccgtgctggtgtctgccctggtgctgatggctatggtcaagcggaaggacagccgggga

SEQ ID NO: 3947 - DNA, 1878 bp, synthetic construct
  source 1..1878: mol_type = other DNA
atggccttaccagtgaccgccttgctcctgccgctggccttgctgctccacgccgccaggccggacatccagatgacccagagccccagcagcctgtctgccagcgtgggcgacagagtgaccatcacctgtcggagcagccagagcatcgtgcactccgtgggcaacaccttcctggaatggtatcagcagaagcccggcaaggcccccaagctgctgatctacaaggtgtccaacagattcagcggcgtgcccagcaggtttagcggctctggcagcggcaccgacttcaccctgaccatctctagcctccagcccgaggacttcgccacctactactgttttcaaggcagccagttcccctacaccttcggccagggaacaaaggtggaaatcaagcggctcgaggacctgaagaacgtgttcccacctgaggtggccgtgttcgagcctagcgaggccgagatcagccacacccagaaagccaccctcgtgtgcctggctaccggcttctaccccgaccatgtggaactgtcttggtgggtcaacggcaaagaggtgcacagcggcgtgtgtaccgacccccagccactgaaagaacagcccgccctgaacgacagccggtactgcctgagcagcagactgagagtgtccgccaccttctggcagaacccccggaaccacttcagatgccaggtgcagttctacggcctgagcgagaacgacgagtggacccaggacagagccaagcccgtgacccagatcgtgtctgccgaagcctggggcagagccgattgcgacgtgaagctggtggaaaagagcttcgagacagacaccaacctgaacttccagaacctgagcgtgatcggcttcagaatcctgctgctgaaagtggccggctttaacctgctgatgaccctgcggctgtggtccagcagggccaagcgatctggatctggagcaacaaacttctcactactcaaacaagcaggtgacgtggaggagaatcccgggcctactagtatggactggatttggcgcatccttttccttgtcggcgctgctaccggcgcgcattccttcgaagaagtgcaactggtggaaagcggaggcggcctggtgcagcctggcggatctctgagactgagctgtgccgccagcggctacgagttcagccggtcctggatgaactgggtgcgccaggcccctggcaagggactggaatgggtgggaagaatctaccccggcgacggcgacaccaactacagcggcaagttcaagggccggttcaccatcagcgccgacaccagcaagaacaccgcctacctccagatgaacagcctgcgggccgaggataccgccgtgtactactgtgccagagatggcagctcctgggactggtacttcgacgtgtggggacagggaacccttgtgaccgtgtccagcacgcgtatccagaaccctgatcctgccgtgtaccagctgcgggatagcaagagcagcgacaagagcgtgtgtctgttcaccgacttcgacagccagaccaacgtgtcccagagcaaggactccgacgtgtacatcaccgataagtgcgtgctggacatgcggagcatggacttcaagagcaactccgccgtggcctggtccaacaagtccgatttcgcctgcgccaacgccttcaacaacagcattatccccgaggacacattcttcccaagccccgagagcagctgcggctttaccagcgagagctaccagcagggcgtgctgagcgccaccatcctgtacgagatcctgctgggcaaggccaccctgtacgccgtgctggtgtctgccctggtgctgatggctatggtcaagcggaaggacagccgggga

SEQ ID NO: 3948 - DNA, 1872 bp, synthetic construct
  source 1..1872: mol_type = other DNA
atggccttaccagtgaccgccttgctcctgccgctggccttgctgctccacgccgccaggccggacatccagatgacccagagccccagcagcctgtctgccagcgtgggcgacagagtgaccatcacctgtagagccagccagaccatctggtcctacctgaactggtatcagcagaggcccggcaaggcccccaacctgctgatctatgccgccagctctctccagagcggcgtgcccagcagattttccggcagaggcagcggcaccgacttcaccctgaccatcagttccttgcaggccgaggacttcgccacctactactgccagcagagctacagcatcccccagattttcggccagggcaccaagctggaaatcaagctcgaggacctgaagaacgtgttcccacctgaggtggccgtgttcgagcctagcgaggccgagatcagccacacccagaaagccaccctcgtgtgcctggctaccggcttctaccccgaccatgtggaactgtcttggtgggtcaacggcaaagaggtgcacagcggcgtgtgtaccgacccccagccactgaaagaacagcccgccctgaacgacagccggtactgcctgagcagcagactgagagtgtccgccaccttctggcagaacccccggaaccacttcagatgccaggtgcagttctacggcctgagcgagaacgacgagtggacccaggacagagccaagcccgtgacccagatcgtgtctgccgaagcctggggcagagccgattgcgacgtgaagctggtggaaaagagcttcgagacagacaccaacctgaacttccagaacctgagcgtgatcggcttcagaatcctgctgctgaaagtggccggctttaacctgctgatgaccctgcggctgtggtccagcagggccaagcgatctggatctggagcaacaaacttctcactactcaaacaagcaggtgacgtggaggagaatcccgggcctactagtatggactggatttggcgcatccttttccttgtcggcgctgctaccggcgcgcattccttcgaacaggtgcagctccagcagtctggacccggcctcgtgaagcctagccagacactgagcctgacctgcgccatcagcggcgatagcgtgtccagcaatagcgccgcctggaactggatcagacagtccccctctcggggcctggaatggctgggccggacctactaccgcagcaagtggtacaacgactacgccgtgtccgtgaagtcccggatcaccatcaaccccgacaccagcaagaaccagttctccttgcaactgaacagcgtgacccccgaggacaccgccgtgtactactgcgccagagaagtgaccggcgacctggaagatgccttcgacatctggggccagggaacaatggtcacagtgtccagcacgcgtatccagaaccctgatcctgccgtgtaccagctgcgggatagcaagagcagcgacaagagcgtgtgtctgttcaccgacttcgacagccagaccaacgtgtcccagagcaaggactccgacgtgtacatcaccgataagtgcgtgctggacatgcggagcatggacttcaagagcaactccgccgtggcctggtccaacaagtccgatttcgcctgcgccaacgccttcaacaacagcattatccccgaggacacattcttcccaagccccgagagcagctgcggctttaccagcgagagctaccagcagggcgtgctgagcgccaccatcctgtacgagatcctgctgggcaaggccaccctgtacgccgtgctggtgtctgccctggtgctgatggctatggtcaagcggaaggacagccgggga

SEQ ID NO: 3949 - DNA, 1851 bp, synthetic construct
  source 1..1851: mol_type = other DNA
atggccttaccagtgaccgccttgctcctgccgctggccttgctgctccacgccgccaggccggacatccagatgacccagagccccgccaccatcgagaacacaagcctgtctgccagcgtgggcgacagagtgaccatcacctgtagagccagccagggcatcagctcttggctgacctggtatcagcagaagcccgagaaggcccccaagagcctgatctacgccgccagctctctgcagtctggcgtgcccagcagattttccggcagcggctctggcaccgacttcaccctgacaatcagcagcctgcagcccgaggacttcgccacctactactgccagcagtacgacagctaccccatcaccttcggccagggcacccggctggaaatcaagctcgaggacctgaagaacgtgttcccacctgaggtggccgtgttcgagcctagcgaggccgagatcagccacacccagaaagccaccctcgtgtgcctggctaccggcttctaccccgaccatgtggaactgtcttggtgggtcaacggcaaagaggtgcacagcggcgtgtgtaccgacccccagccactgaaagaacagcccgccctgaacgacagccggtactgcctgagcagcagactgagagtgtccgccaccttctggcagaacccccggaaccacttcagatgccaggtgcagttctacggcctgagcgagaacgacgagtggacccaggacagagccaagcccgtgacccagatcgtgtctgccgaagcctggggcagagccgattgcgacgtgaagctggtggaaaagagcttcgagacagacaccaacctgaacttccagaacctgagcgtgatcggcttcagaatcctgctgctgaaagtggccggctttaacctgctgatgaccctgcggctgtggtccagcagggccaagcgatctggatctggagcaacaaacttctcactactcaaacaagcaggtgacgtggaggagaatcccgggcctactagtatggactggatttggcgcatccttttccttgtcggcgctgctaccggcgcgcattccttcgaacaggtgcaactgcagcagtggggagccggactgctgaagcctagcgagacactgagcctgacctgcgccgtgtacggcggcagcttcagcgcctactattggagctggatcagacagccccctggcaagggcctggaatggatcggcgacatcaatcacggcggaggcaccaactacaaccccagcctgaagtcccgcgtgaccatctccgtggacaccagcaagaaccagttctccctgaagctgaacagcgtgacagccgccgacacagccgtgtactactgtgccagcctgaccgcctattggggccagggatctcttgtgaccgtgtccagcacgcgtatccagaaccctgatcctgccgtgtaccagctgcgggatagcaagagcagcgacaagagcgtgtgtctgttcaccgacttcgacagccagaccaacgtgtcccagagcaaggactccgacgtgtacatcaccgataagtgcgtgctggacatgcggagcatggacttcaagagcaactccgccgtggcctggtccaacaagtccgatttcgcctgcgccaacgccttcaacaacagcattatccccgaggacacattcttcccaagccccgagagcagctgcggctttaccagcgagagctaccagcagggcgtgctgagcgccaccatcctgtacgagatcctgctgggcaaggccaccctgtacgccgtgctggtgtctgccctggtgctgatggctatggtcaagcggaaggacagccgggga

SEQ ID NO: 3950 - DNA, 1866 bp, synthetic construct
  source 1..1866: mol_type = other DNA
atggccttaccagtgaccgccttgctcctgccgctggccttgctgctccacgccgccaggccggacgagatcgtgctgacccagagccctgatagcctggccgtgtctctgggcgagagagccaccatcaactgcaaggccagccagagcgtggacttcgacggcgacagctacctgaactggtatcagcagaagcccggccagccccccaaggtgctgatctatgccgccagcacactgcagagcggcgtgcccagcagattttctggcagcggctccggcaccgacttcaccctgaccatcaacagcctggaagccgaggacgccgccacctactactgccagcagagcaacgaggacccctggacctttggcggcggaacaaaggtggaaatcaagctcgaggacctgaagaacgtgttcccacctgaggtggccgtgttcgagcctagcgaggccgagatcagccacacccagaaagccaccctcgtgtgcctggctaccggcttctaccccgaccatgtggaactgtcttggtgggtcaacggcaaagaggtgcacagcggcgtgtgtaccgacccccagccactgaaagaacagcccgccctgaacgacagccggtactgcctgagcagcagactgagagtgtccgccaccttctggcagaacccccggaaccacttcagatgccaggtgcagttctacggcctgagcgagaacgacgagtggacccaggacagagccaagcccgtgacccagatcgtgtctgccgaagcctggggcagagccgattgcgacgtgaagctggtggaaaagagcttcgagacagacaccaacctgaacttccagaacctgagcgtgatcggcttcagaatcctgctgctgaaagtggccggctttaacctgctgatgaccctgcggctgtggtccagcagggccaagcgatctggatctggagcaacaaacttctcactactcaaacaagcaggtgacgtggaggagaatcccgggcctactagtatggactggatttggcgcatccttttccttgtcggcgctgctaccggcgcgcattccttcgaacaggtgcaactggtgcagtccggcgctgaagtgaagaaacctggggccagcgtgaaggtgtcctgcaaggtgtccggctacacctttaccgactactacattacctgggtgcgccaggcccctggacaggccctggaatggatgggctggatctaccccggcagcggcaacaccaagtacagccagaagttccagggcagattcgtgttcagcgtggacaccagcgccagcaccgcctacctgcaactgtctagcctgaaggccgaagataccgccgtgtactactgcgccaactacggcaactattggttcgcctattggggccagggaacccttgtgaccgtgtcctctacgcgtatccagaaccctgatcctgccgtgtaccagctgcgggatagcaagagcagcgacaagagcgtgtgtctgttcaccgacttcgacagccagaccaacgtgtcccagagcaaggactccgacgtgtacatcaccgataagtgcgtgctggacatgcggagcatggacttcaagagcaactccgccgtggcctggtccaacaagtccgatttcgcctgcgccaacgccttcaacaacagcattatccccgaggacacattcttcccaagccccgagagcagctgcggctttaccagcgagagctaccagcagggcgtgctgagcgccaccatcctgtacgagatcctgctgggcaaggccaccctgtacgccgtgctggtgtctgccctggtgctgatggctatggtcaagcggaaggacagccgggga

SEQ ID NO: 3951 - DNA, 1857 bp, synthetic construct
  source 1..1857: mol_type = other DNA
atggccttaccagtgaccgccttgctcctgccgctggccttgctgctccacgccgccaggccggacatccagatgacccagagccccagcagcctgtctgccagcgtgggcgacagagtgaccatcacctgtagagccagccagggcatcagctcttggctggcctggtatcagcagaagcccgagaaggcccccaagagcctgatctacgccgcctctagtctccagagcggcgtgcccagcagattttctggcagcggctccggcaccgacttcaccctgacaatcagctccctccagcccgaggacttcgccacctactactgccagcagtacaacagctaccctcccacctttggcggaggcaccaaggtggaaatcaagctcgaggacctgaagaacgtgttcccacctgaggtggccgtgttcgagcctagcgaggccgagatcagccacacccagaaagccaccctcgtgtgcctggctaccggcttctaccccgaccatgtggaactgtcttggtgggtcaacggcaaagaggtgcacagcggcgtgtgtaccgacccccagccactgaaagaacagcccgccctgaacgacagccggtactgcctgagcagcagactgagagtgtccgccaccttctggcagaacccccggaaccacttcagatgccaggtgcagttctacggcctgagcgagaacgacgagtggacccaggacagagccaagcccgtgacccagatcgtgtctgccgaagcctggggcagagccgattgcgacgtgaagctggtggaaaagagcttcgagacagacaccaacctgaacttccagaacctgagcgtgatcggcttcagaatcctgctgctgaaagtggccggctttaacctgctgatgaccctgcggctgtggtccagcagggccaagcgatctggatctggagcaacaaacttctcactactcaaacaagcaggtgacgtggaggagaatcccgggcctactagtatggactggatttggcgcatccttttccttgtcggcgctgctaccggcgcgcattccttcgaagaagtgcaactggtgcagtctggcggagggctggtgcatcctgggggaagcctgagactgagctgtgccggctctggcttcgccttcagcagcagcaccatgcactggatcagacaggcccctggcaagggcctggaatggatcagcctgatcggaagcggagggggcatctactacggcgacagcgtgaagggccggttcaccatcagccgggacaacgccaagaacagcctgtacctccagatgaactccctgcgggccgaggacatggccgtgtactattgtgtgcggggctacttcgactgggtggactacttcgattactggggccagggcaccctcgtgaccgtgtcatctacgcgtatccagaaccctgatcctgccgtgtaccagctgcgggatagcaagagcagcgacaagagcgtgtgtctgttcaccgacttcgacagccagaccaacgtgtcccagagcaaggactccgacgtgtacatcaccgataagtgcgtgctggacatgcggagcatggacttcaagagcaactccgccgtggcctggtccaacaagtccgatttcgcctgcgccaacgccttcaacaacagcattatccccgaggacacattcttcccaagccccgagagcagctgcggctttaccagcgagagctaccagcagggcgtgctgagcgccaccatcctgtacgagatcctgctgggcaaggccaccctgtacgccgtgctggtgtctgccctggtgctgatggctatggtcaagcggaaggacagccgggga

SEQ ID NO: 3952 - DNA, 1887 bp, synthetic construct
  source 1..1887: mol_type = other DNA
atggccttaccagtgaccgccttgctcctgccgctggccttgctgctccacgccgccaggccggacgacatcgtgatgacacagtcaccagatagcctcaccgtctccctgggggagcggaccaccattaattgtaaatccagccaaagcgtgctggactcaagcaagaacaagaatagcctcgcctggtatcagcagaagcccggtcagcctccaaagctgctgctttcttgggcctccaccagagagtccgggattcctgataggtttagtggttcaggctccggcacagattttactctgaccattgattctctccagccagaggattctgcaacttattactgccagcaaagcgcccactttcctataacttttggccagggaacccgacttgaaatcaagctcgaggacctgaagaacgtgttcccacctgaggtggccgtgttcgagcctagcgaggccgagatcagccacacccagaaagccaccctcgtgtgcctggctaccggcttctaccccgaccatgtggaactgtcttggtgggtcaacggcaaagaggtgcacagcggcgtgtgtaccgacccccagccactgaaagaacagcccgccctgaacgacagccggtactgcctgagcagcagactgagagtgtccgccaccttctggcagaacccccggaaccacttcagatgccaggtgcagttctacggcctgagcgagaacgacgagtggacccaggacagagccaagcccgtgacccagatcgtgtctgccgaagcctggggcagagccgattgcgacgtgaagctggtggaaaagagcttcgagacagacaccaacctgaacttccagaacctgagcgtgatcggcttcagaatcctgctgctgaaagtggccggctttaacctgctgatgaccctgcggctgtggtccagcagggccaagcgatctggatctggagcaacaaacttctcactactcaaacaagcaggtgacgtggaggagaatcccgggcctactagtatggactggatttggcgcatccttttccttgtcggcgctgctaccggcgcgcattccttcgaacaggtgcagctggtgcagagcggtgccgaagtgaagaaaccaggtgcatccgttaaagtttcatgtaaggctagtggatataccttcaccaattacggaatgaactgggtgaaacaggcccctggccagggactgaagtggatggggtggattaacacctacaccggggagccgacttatgcagacgactttaaggggcgggtcacgatgacctccgacacctccaccagtaccgcctacctggagctgcacaaccttaggtcagacgataccgccgtgtattactgtgcccgatggtcttggtccgacggatactatgtctacttcgactattggggccaggggaccacagttaccgtgtcctctacgcgtatccagaaccctgatcctgccgtgtaccagctgcgggatagcaagagcagcgacaagagcgtgtgtctgttcaccgacttcgacagccagaccaacgtgtcccagagcaaggactccgacgtgtacatcaccgataagtgcgtgctggacatgcggagcatggacttcaagagcaactccgccgtggcctggtccaacaagtccgatttcgcctgcgccaacgccttcaacaacagcattatccccgaggacacattcttcccaagccccgagagcagctgcggctttaccagcgagagctaccagcagggcgtgctgagcgccaccatcctgtacgagatcctgctgggcaaggccaccctgtacgccgtgctggtgtctgccctggtgctgatggctatggtcaagcggaaggacagccgggga

SEQ ID NO: 3953 - DNA, 1875 bp, synthetic construct
  source 1..1875: mol_type = other DNA
atggccttaccagtgaccgccttgctcctgccgctggccttgctgctccacgccgccaggccggacgagatcgtgctgacacagagccctggaagcctggccgtgtctcctggcgagcgcgtgacaatgagctgcaagagcagccagagcgtgttcttcagcagctcccagaagaactacctggcctggtatcagcagatccccggccagagccccagactgctgatctactgggccagcaccagagaaagcggcgtgcccgatagattcaccggcagcggctctggcaccgacttcaccctgacaatcagcagcgtgcagcccgaggacctggctatctactactgccaccagtacctgagcagccggaccttcggccagggcaccaagctggaaatcaagagactcgaggacctgaagaacgtgttcccacctgaggtggccgtgttcgagcctagcgaggccgagatcagccacacccagaaagccaccctcgtgtgcctggctaccggcttctaccccgaccatgtggaactgtcttggtgggtcaacggcaaagaggtgcacagcggcgtgtgtaccgacccccagccactgaaagaacagcccgccctgaacgacagccggtactgcctgagcagcagactgagagtgtccgccaccttctggcagaacccccggaaccacttcagatgccaggtgcagttctacggcctgagcgagaacgacgagtggacccaggacagagccaagcccgtgacccagatcgtgtctgccgaagcctggggcagagccgattgcgacgtgaagctggtggaaaagagcttcgagacagacaccaacctgaacttccagaacctgagcgtgatcggcttcagaatcctgctgctgaaagtggccggctttaacctgctgatgaccctgcggctgtggtccagcagggccaagcgatctggatctggagcaacaaacttctcactactcaaacaagcaggtgacgtggaggagaatcccgggcctactagtatggactggatttggcgcatccttttccttgtcggcgctgctaccggcgcgcattccttcgaacaggtgcaactgcagcagcctggcgctgaggtcgtgaagccaggcgcttccgtgaagatgtcctgcaaggccagcggctacaccttcaccagctactacatccactggatcaagcagacccctggacagggcctggaatgggtgggagtgatctaccccggcaacgacgacatcagctacaaccagaagttccagggcaaggccaccctgaccgccgacaagtctagcaccaccgcctacatgcaactgtccagcctgaccagcgaggacagcgccgtgtactactgcgccagagaagtgcggctgcggtacttcgatgtgtggggccagggaaccaccgtgaccgtgtcatctacgcgtatccagaaccctgatcctgccgtgtaccagctgcgggatagcaagagcagcgacaagagcgtgtgtctgttcaccgacttcgacagccagaccaacgtgtcccagagcaaggactccgacgtgtacatcaccgataagtgcgtgctggacatgcggagcatggacttcaagagcaactccgccgtggcctggtccaacaagtccgatttcgcctgcgccaacgccttcaacaacagcattatccccgaggacacattcttcccaagccccgagagcagctgcggctttaccagcgagagctaccagcagggcgtgctgagcgccaccatcctgtacgagatcctgctgggcaaggccaccctgtacgccgtgctggtgtctgccctggtgctgatggctatggtcaagcggaaggacagccgggga

SEQ ID NO: 3954 - DNA, 1887 bp, synthetic construct
  source 1..1887: mol_type = other DNA
atggccttaccagtgaccgccttgctcctgccgctggccttgctgctccacgccgccaggccggatgtgctgctgacccagagccctctgagcctgcctgtgacactgggacagcctgccagcatctcctgtcggagcagccagaccatcgtgcacagcaacggcaacacctacctggaatggttccagcagcggccaggccagagccccagactgctgatctaccaggtgtccaacagattcagcggcgtgcccgacagattctccggcagcggctctggcaccgacttcaccctgaagatcagccgggtggaagccgaggacgtgggcgtgtactactgttttcaaggcagccacgtgccccggacctttggcggaggaacaaaggtggaaatcaagagagccctcgaggacctgaagaacgtgttcccacctgaggtggccgtgttcgagcctagcgaggccgagatcagccacacccagaaagccaccctcgtgtgcctggctaccggcttctaccccgaccatgtggaactgtcttggtgggtcaacggcaaagaggtgcacagcggcgtgtgtaccgacccccagccactgaaagaacagcccgccctgaacgacagccggtactgcctgagcagcagactgagagtgtccgccaccttctggcagaacccccggaaccacttcagatgccaggtgcagttctacggcctgagcgagaacgacgagtggacccaggacagagccaagcccgtgacccagatcgtgtctgccgaagcctggggcagagccgattgcgacgtgaagctggtggaaaagagcttcgagacagacaccaacctgaacttccagaacctgagcgtgatcggcttcagaatcctgctgctgaaagtggccggctttaacctgctgatgaccctgcggctgtggtccagcagggccaagcgatctggatctggagcaacaaacttctcactactcaaacaagcaggtgacgtggaggagaatcccgggcctactagtatggactggatttggcgcatccttttccttgtcggcgctgctaccggcgcgcattccttcgaacagatccaactggtgcagagcggcagcgagctgaagaaacctggggccagcgtgaaggtgtcctgcaaggccagcggctacacctttaccaactacggcatgaactgggtgcgccaggcccctggacagggcctgaaatggatgggctggatcaacaccaacaccggcgagcctaagtacgccgaagagttcaagggcagattcgccctgagcctggacaccagcgtgtccacagcctacctccagatcaacagcctgaaggccgaggataccgccgtgtacttctgcgccagaggctacggcaactacgccagaggggcttggctggcctattggggccagggaacactcgtgaccgtgtcctctacgcgtatccagaaccctgatcctgccgtgtaccagctgcgggatagcaagagcagcgacaagagcgtgtgtctgttcaccgacttcgacagccagaccaacgtgtcccagagcaaggactccgacgtgtacatcaccgataagtgcgtgctggacatgcggagcatggacttcaagagcaactccgccgtggcctggtccaacaagtccgatttcgcctgcgccaacgccttcaacaacagcattatccccgaggacacattcttcccaagccccgagagcagctgcggctttaccagcgagagctaccagcagggcgtgctgagcgccaccatcctgtacgagatcctgctgggcaaggccaccctgtacgccgtgctggtgtctgccctggtgctgatggctatggtcaagcggaaggacagccgggga

SEQ ID NO: 3955 - DNA, 1842 bp, synthetic construct
  source 1..1842: mol_type = other DNA
atggccttaccagtgaccgccttgctcctgccgctggccttgctgctccacgccgccaggccggacgagatcgtgctgacacagagccctgccacactctctctgagccctggcgaaagagccaccctgagctgtagcgccagcagcagcatcaactacatctactggctccagcagaagcccggccaggcccccagaatcctgatctacctgaccagcaacctggcctccggcgtgccagccagattttctggcagcggctccggcaccgacttcaccctgacaatcagcagcctggaacccgaggacttcgccgtgtactactgcctccagtggtccagcaaccccctgacctttggcggaggcaccaaggtggaaatcaagctcgaggacctgaagaacgtgttcccacctgaggtggccgtgttcgagcctagcgaggccgagatcagccacacccagaaagccaccctcgtgtgcctggctaccggcttctaccccgaccatgtggaactgtcttggtgggtcaacggcaaagaggtgcacagcggcgtgtgtaccgacccccagccactgaaagaacagcccgccctgaacgacagccggtactgcctgagcagcagactgagagtgtccgccaccttctggcagaacccccggaaccacttcagatgccaggtgcagttctacggcctgagcgagaacgacgagtggacccaggacagagccaagcccgtgacccagatcgtgtctgccgaagcctggggcagagccgattgcgacgtgaagctggtggaaaagagcttcgagacagacaccaacctgaacttccagaacctgagcgtgatcggcttcagaatcctgctgctgaaagtggccggctttaacctgctgatgaccctgcggctgtggtccagcagggccaagcgatctggatctggagcaacaaacttctcactactcaaacaagcaggtgacgtggaggagaatcccgggcctactagtatggactggatttggcgcatccttttccttgtcggcgctgctaccggcgcgcattccttcgaagaagtgcaactggtggaaagcgggggaggacttgtgaagcctggcggctctctgagactgagctgtgccgcctctggcttcaccttcagcagctacgacatgagctgggtgcgccaggctcctggcaagggactggaatgggtgtccaccatcagcagcggcggcagctacacctactacctggacagcatcaagggccggttcaccatctccagagacaacgccaagaacagcctgtacctccagatgaactccctgcgggccgaggacacagccgtgtattattgcgccagacagggcctggattactggggcagaggcacccttgtgaccgtgtcctctacgcgtatccagaaccctgatcctgccgtgtaccagctgcgggatagcaagagcagcgacaagagcgtgtgtctgttcaccgacttcgacagccagaccaacgtgtcccagagcaaggactccgacgtgtacatcaccgataagtgcgtgctggacatgcggagcatggacttcaagagcaactccgccgtggcctggtccaacaagtccgatttcgcctgcgccaacgccttcaacaacagcattatccccgaggacacattcttcccaagccccgagagcagctgcggctttaccagcgagagctaccagcagggcgtgctgagcgccaccatcctgtacgagatcctgctgggcaaggccaccctgtacgccgtgctggtgtctgccctggtgctgatggctatggtcaagcggaaggacagccgggga

SEQ ID NO: 3956 - DNA, 1869 bp, synthetic construct
  source 1..1869: mol_type = other DNA
atggccttaccagtgaccgccttgctcctgccgctggccttgctgctccacgccgccaggccggacatcgtgatgacccagagccccgatagcctggccgtgtctctgggagagagagccaccatcaactgccgggccagcaagagcgtgtccaccagcggctacagcttcatgcactggtatcagcagaagcccggccagccccccaagctgctgatctacctggcctccaacctggaaagcggcgtgcccgatagattcagcggcagcggctctggcaccgacttcaccctgaccatcagttctcttcaggccgaggacgtggccgtgtactactgccagcacagcagagaggtgccctggacattcggccagggcacaaaggtggaaatcaagcggctcgaggacctgaagaacgtgttcccacctgaggtggccgtgttcgagcctagcgaggccgagatcagccacacccagaaagccaccctcgtgtgcctggctaccggcttctaccccgaccatgtggaactgtcttggtgggtcaacggcaaagaggtgcacagcggcgtgtgtaccgacccccagccactgaaagaacagcccgccctgaacgacagccggtactgcctgagcagcagactgagagtgtccgccaccttctggcagaacccccggaaccacttcagatgccaggtgcagttctacggcctgagcgagaacgacgagtggacccaggacagagccaagcccgtgacccagatcgtgtctgccgaagcctggggcagagccgattgcgacgtgaagctggtggaaaagagcttcgagacagacaccaacctgaacttccagaacctgagcgtgatcggcttcagaatcctgctgctgaaagtggccggctttaacctgctgatgaccctgcggctgtggtccagcagggccaagcgatctggatctggagcaacaaacttctcactactcaaacaagcaggtgacgtggaggagaatcccgggcctactagtatggactggatttggcgcatccttttccttgtcggcgctgctaccggcgcgcattccttcgaacaggtgcagctggtgcagtctggggccgaagtgaagaaacctggggccagcgtgaaggtgtcctgcaaggccagcggatacacctttaccaactacggcatgaactgggtgcgccaggcccctggacagggcctggaatggatgggctggatcaacacctacaccggcgagcccacatacgccgacgccttcaagggcagattcgccttcagcctggacaccagcacctccaccgcctacctccagatcaacagcctgcggagcgacgacaccgccgtgtattattgcgccagagattacggcgactacgggatggactattggggccagggaaccaccgtgaccgtgtcctctacgcgtatccagaaccctgatcctgccgtgtaccagctgcgggatagcaagagcagcgacaagagcgtgtgtctgttcaccgacttcgacagccagaccaacgtgtcccagagcaaggactccgacgtgtacatcaccgataagtgcgtgctggacatgcggagcatggacttcaagagcaactccgccgtggcctggtccaacaagtccgatttcgcctgcgccaacgccttcaacaacagcattatccccgaggacacattcttcccaagccccgagagcagctgcggctttaccagcgagagctaccagcagggcgtgctgagcgccaccatcctgtacgagatcctgctgggcaaggccaccctgtacgccgtgctggtgtctgccctggtgctgatggctatggtcaagcggaaggacagccgggga

SEQ ID NO: 3957 - DNA, 1857 bp, synthetic construct
  source 1..1857: mol_type = other DNA
atggccttaccagtgaccgccttgctcctgccgctggccttgctgctccacgccgccaggccggacatcgtgatgacccagacccccctgaccctgagcgtgacaatcggacagcctgccagcatctcctgcaagagcagccagagcctgctggacagcgacggcaagacctacctgaactggctgctgcagaggccaggccagagccccgagagactgatctacctggtgtccaagctggactccggcgtgcccgatagattcacaggcagcggctccggcaccgacttcaccctgaagatcagccgggtggaagccgaggacctgggcgtgtactgttgttggcagggcacccacttcccttacaccttcggcggagggaccaaggtggaaatcaagggcctcgaggacctgaagaacgtgttcccacctgaggtggccgtgttcgagcctagcgaggccgagatcagccacacccagaaagccaccctcgtgtgcctggctaccggcttctaccccgaccatgtggaactgtcttggtgggtcaacggcaaagaggtgcacagcggcgtgtgtaccgacccccagccactgaaagaacagcccgccctgaacgacagccggtactgcctgagcagcagactgagagtgtccgccaccttctggcagaacccccggaaccacttcagatgccaggtgcagttctacggcctgagcgagaacgacgagtggacccaggacagagccaagcccgtgacccagatcgtgtctgccgaagcctggggcagagccgattgcgacgtgaagctggtggaaaagagcttcgagacagacaccaacctgaacttccagaacctgagcgtgatcggcttcagaatcctgctgctgaaagtggccggctttaacctgctgatgaccctgcggctgtggtccagcagggccaagcgatctggatctggagcaacaaacttctcactactcaaacaagcaggtgacgtggaggagaatcccgggcctactagtatggactggatttggcgcatccttttccttgtcggcgctgctaccggcgcgcattccttcgaacaggtgcaactgcagcagcctggcgctgaacttgtgcggccaggcgcctctgtgaagctgagctgtaaagccagcggctacaccttcaccagctactggatgaactgggtcaagcagcgcccaggccagggcctggaatggatcggaatgatcgaccccagcgacagcgagacacactacaaccacatcttcaaggacaaggccaccctgaccgtggacaagtccagcagcacagcctacctgcaactgtccagcctgaccagcgaggacagcgccgtgtactactgcgcccggaacctgtatctgtggggccagggaacaagcgtgaccgtgtctagcacgcgtatccagaaccctgatcctgccgtgtaccagctgcgggatagcaagagcagcgacaagagcgtgtgtctgttcaccgacttcgacagccagaccaacgtgtcccagagcaaggactccgacgtgtacatcaccgataagtgcgtgctggacatgcggagcatggacttcaagagcaactccgccgtggcctggtccaacaagtccgatttcgcctgcgccaacgccttcaacaacagcattatccccgaggacacattcttcccaagccccgagagcagctgcggctttaccagcgagagctaccagcagggcgtgctgagcgccaccatcctgtacgagatcctgctgggcaaggccaccctgtacgccgtgctggtgtctgccctggtgctgatggctatggtcaagcggaaggacagccgggga

SEQ ID NO: 3958 - DNA, 1881 bp, synthetic construct
  source 1..1881: mol_type = other DNA
atggccttaccagtgaccgccttgctcctgccgctggccttgctgctccacgccgccaggccggacatcgtgatgacccagagccccgatagcctggccgtgtctctgggagagagagccaccatcaactgcgagagcagccagagcctgctgaacagcggcaaccagaagaactacctgacctggtatcagcagaagcccggccagccccccaagcccctgatctattgggccagcaccagagaaagcggcgtgcccgatagattcagcggcagcggaagcggcaccgacttcaccctgaccatcagttctcttcaggccgaggacgtggccgtgtactactgccagaacgactacagctacccctacaccttcggccagggcaccaagctggaaatcaagagactcgaggacctgaagaacgtgttcccacctgaggtggccgtgttcgagcctagcgaggccgagatcagccacacccagaaagccaccctcgtgtgcctggctaccggcttctaccccgaccatgtggaactgtcttggtgggtcaacggcaaagaggtgcacagcggcgtgtgtaccgacccccagccactgaaagaacagcccgccctgaacgacagccggtactgcctgagcagcagactgagagtgtccgccaccttctggcagaacccccggaaccacttcagatgccaggtgcagttctacggcctgagcgagaacgacgagtggacccaggacagagccaagcccgtgacccagatcgtgtctgccgaagcctggggcagagccgattgcgacgtgaagctggtggaaaagagcttcgagacagacaccaacctgaacttccagaacctgagcgtgatcggcttcagaatcctgctgctgaaagtggccggctttaacctgctgatgaccctgcggctgtggtccagcagggccaagcgatctggatctggagcaacaaacttctcactactcaaacaagcaggtgacgtggaggagaatcccgggcctactagtatggactggatttggcgcatccttttccttgtcggcgctgctaccggcgcgcattccttcgaagaagtgcagctggtgcagtctggggccgaagtgaagaagcctggcgagagcctgaagatcagctgcaagggcagcggctacagcttcaccgactactacatgaagtgggccagacagatgcccggcaagggcctggaatggatgggcgacatcatccccagcaacggggccaccttctacaaccagaaattcaagggccaagtgaccatctccgccgacaagagcatcagcaccacctacctccagtggtccagcctgaaggccagcgacaccgccatgtactattgcgccagaagccatctgctgcgggccagttggttcgcctattggggccagggaacaatggtcacagtgtccagcacgcgtatccagaaccctgatcctgccgtgtaccagctgcgggatagcaagagcagcgacaagagcgtgtgtctgttcaccgacttcgacagccagaccaacgtgtcccagagcaaggactccgacgtgtacatcaccgataagtgcgtgctggacatgcggagcatggacttcaagagcaactccgccgtggcctggtccaacaagtccgatttcgcctgcgccaacgccttcaacaacagcattatccccgaggacacattcttcccaagccccgagagcagctgcggctttaccagcgagagctaccagcagggcgtgctgagcgccaccatcctgtacgagatcctgctgggcaaggccaccctgtacgccgtgctggtgtctgccctggtgctgatggctatggtcaagcggaaggacagccgggga

SEQ ID NO: 3959 - DNA, 1866 bp, synthetic construct
  source 1..1866: mol_type = other DNA
atggccttaccagtgaccgccttgctcctgccgctggccttgctgctccacgccgccaggccggacatccagatgacccagtctaccagttccctgagtgcatccctcggagacagggtgacgatcagttgcagcgcaagccaagggatcaataactatctgaactggtatcagcagaaaccggacggaacagtcgaactcctgatttattacaccagcacccttcagagtggcgtcccttcccggttcagtggctccggaagcgggaccgattactccctgaccatttctaatctggagccagaggacataggaacgtattattgccagcagtatagtaaactgccacgaacttttggaggggggacgaaactggagatcaaactcgaggacctgaagaacgtgttcccacctgaggtggccgtgttcgagcctagcgaggccgagatcagccacacccagaaagccaccctcgtgtgcctggctaccggcttctaccccgaccatgtggaactgtcttggtgggtcaacggcaaagaggtgcacagcggcgtgtgtaccgacccccagccactgaaagaacagcccgccctgaacgacagccggtactgcctgagcagcagactgagagtgtccgccaccttctggcagaacccccggaaccacttcagatgccaggtgcagttctacggcctgagcgagaacgacgagtggacccaggacagagccaagcccgtgacccagatcgtgtctgccgaagcctggggcagagccgattgcgacgtgaagctggtggaaaagagcttcgagacagacaccaacctgaacttccagaacctgagcgtgatcggcttcagaatcctgctgctgaaagtggccggctttaacctgctgatgaccctgcggctgtggtccagcagggccaagcgatctggatctggagcaacaaacttctcactactcaaacaagcaggtgacgtggaggagaatcccgggcctactagtatggactggatttggcgcatccttttccttgtcggcgctgctaccggcgcgcattccttcgaacaggtgcaactccagcagtccggaagcgagcttatgatgccaggggcatcagtgaagatcagctgcaaggctactggctacaccttctctaattactggatagagtgggttaaacaaaggccagggcacggcctggaatggatcggcgagatcctgcctgggacaggccgaaccatttataacgagaagttcaaaggcaaggctactttcaccgcagatataagctctaatacagtgcaaatgcagctctcttccctgacaagtgaggatagtgccgtgtattattgcgcacgaagagattactatggaaatttttattacgctatggattattggggtcaaggaacaagtgtgaccgttagcagcacgcgtatccagaaccctgatcctgccgtgtaccagctgcgggatagcaagagcagcgacaagagcgtgtgtctgttcaccgacttcgacagccagaccaacgtgtcccagagcaaggactccgacgtgtacatcaccgataagtgcgtgctggacatgcggagcatggacttcaagagcaactccgccgtggcctggtccaacaagtccgatttcgcctgcgccaacgccttcaacaacagcattatccccgaggacacattcttcccaagccccgagagcagctgcggctttaccagcgagagctaccagcagggcgtgctgagcgccaccatcctgtacgagatcctgctgggcaaggccaccctgtacgccgtgctggtgtctgccctggtgctgatggctatggtcaagcggaaggacagccgggga

SEQ ID NO: 3960 - DNA, 1851 bp, synthetic construct
  source 1..1851: mol_type = other DNA
atggccttaccagtgaccgccttgctcctgccgctggccttgctgctccacgccgccaggccggacatccagatgacccagagccctgccagcctgtccgtgtctgtgggcgagacagtgaccatcacctgtcgggccagcgagaacatctacagcaacctggcctggtatcagcagaagcagggcaagagcccccaactgctggtgtacgccgccaccaatctggccgatggcgtgcccagcagattttccggctctggcagcggcacccagtacagcctgaagatcaacagcctccagagcgaggacttcggcagctactactgccagcacttctggggcacctggacctttggaggaggcaccaccctggaaatcaagctcgaggacctgaagaacgtgttcccacctgaggtggccgtgttcgagcctagcgaggccgagatcagccacacccagaaagccaccctcgtgtgcctggctaccggcttctaccccgaccatgtggaactgtcttggtgggtcaacggcaaagaggtgcacagcggcgtgtgtaccgacccccagccactgaaagaacagcccgccctgaacgacagccggtactgcctgagcagcagactgagagtgtccgccaccttctggcagaacccccggaaccacttcagatgccaggtgcagttctacggcctgagcgagaacgacgagtggacccaggacagagccaagcccgtgacccagatcgtgtctgccgaagcctggggcagagccgattgcgacgtgaagctggtggaaaagagcttcgagacagacaccaacctgaacttccagaacctgagcgtgatcggcttcagaatcctgctgctgaaagtggccggctttaacctgctgatgaccctgcggctgtggtccagcagggccaagcgatctggatctggagcaacaaacttctcactactcaaacaagcaggtgacgtggaggagaatcccgggcctactagtatggactggatttggcgcatccttttccttgtcggcgctgctaccggcgcgcattccttcgaagaagtgcaactccagcagagcggccctgagcttgtgaagcctggcgcttccgtgaagatgagctgcaaggccagcggctacaccttcaccgactactacatgaagtggatgaagcagagccacggcaagtccctggaatggatcggcgacatcaaccccaacaacggcggcaccacctacaaccagaagttcaagggcaaggccaccctgaccgtggacaagagcagcagcaccgcctacatgcaactgaacagcctgaccagcgaggacagcgccgtgtactactgcgccagagactacggctacggctatttcgactactggggccagggcacaaccctgacagtgtcctctacgcgtatccagaaccctgatcctgccgtgtaccagctgcgggatagcaagagcagcgacaagagcgtgtgtctgttcaccgacttcgacagccagaccaacgtgtcccagagcaaggactccgacgtgtacatcaccgataagtgcgtgctggacatgcggagcatggacttcaagagcaactccgccgtggcctggtccaacaagtccgatttcgcctgcgccaacgccttcaacaacagcattatccccgaggacacattcttcccaagccccgagagcagctgcggctttaccagcgagagctaccagcagggcgtgctgagcgccaccatcctgtacgagatcctgctgggcaaggccaccctgtacgccgtgctggtgtctgccctggtgctgatggctatggtcaagcggaaggacagccgggga

SEQ ID NO: 3961 - DNA, 1860 bp, synthetic construct
  source 1..1860: mol_type = other DNA
atggccttaccagtgaccgccttgctcctgccgctggccttgctgctccacgccgccaggccggagatcgtgctgacacagagccctggcaccctgagcctgtctccaggcgaaagagccacactgagctgtcgggcctctcagagcgtgggaggctacctggcttggtatcagcagaagccaggccaggcccccagactgctgatctacgacgccagcaatcgggccacaggcatccccgccagattttctggcagcggctccggcaccgacttcaccctgacaatcagcagcctggaacccgaggacttcgccgtgtactactgccagcagcggaacaactggccccccatgtacacattcggccagggcaccaagctggaaatcaagagactcgaggacctgaagaacgtgttcccacctgaggtggccgtgttcgagcctagcgaggccgagatcagccacacccagaaagccaccctcgtgtgcctggctaccggcttctaccccgaccatgtggaactgtcttggtgggtcaacggcaaagaggtgcacagcggcgtgtgtaccgacccccagccactgaaagaacagcccgccctgaacgacagccggtactgcctgagcagcagactgagagtgtccgccaccttctggcagaacccccggaaccacttcagatgccaggtgcagttctacggcctgagcgagaacgacgagtggacccaggacagagccaagcccgtgacccagatcgtgtctgccgaagcctggggcagagccgattgcgacgtgaagctggtggaaaagagcttcgagacagacaccaacctgaacttccagaacctgagcgtgatcggcttcagaatcctgctgctgaaagtggccggctttaacctgctgatgaccctgcggctgtggtccagcagggccaagcgatctggatctggagcaacaaacttctcactactcaaacaagcaggtgacgtggaggagaatcccgggcctactagtatggactggatttggcgcatccttttccttgtcggcgctgctaccggcgcgcattccttcgaacaggtgcaactggtgcagagcggagccgaagtgaagaaacccggcagcagcgtgaaggtgtcctgcaaggcttccggcggcaccttcagcagctacgccatttcttgggtgcgccaggctcctggacagggcctggaatggatgggcggcatcatccctatcctgggcaccgccaactacgcccagaaattccagggcagagtgaccatcaccgccgacgagagcaccagcaccgcctacatggaactgagcagcctgcggagcgaggacacagccgtgtattattgcgccagatggggcggaggggccttcgacatttggggccagggaacaatggtcaccgtgtccagcacgcgtatccagaaccctgatcctgccgtgtaccagctgcgggatagcaagagcagcgacaagagcgtgtgtctgttcaccgacttcgacagccagaccaacgtgtcccagagcaaggactccgacgtgtacatcaccgataagtgcgtgctggacatgcggagcatggacttcaagagcaactccgccgtggcctggtccaacaagtccgatttcgcctgcgccaacgccttcaacaacagcattatccccgaggacacattcttcccaagccccgagagcagctgcggctttaccagcgagagctaccagcagggcgtgctgagcgccaccatcctgtacgagatcctgctgggcaaggccaccctgtacgccgtgctggtgtctgccctggtgctgatggctatggtcaagcggaaggacagccgggga

SEQ ID NO: 3962 - DNA, 1845 bp, synthetic construct
  source 1..1845: mol_type = other DNA
atggccttaccagtgaccgccttgctcctgccgctggccttgctgctccacgccgccaggccgcagatcgtgctgacacagagccctgccctgatgagcgccagccctggcgagaaagtgaccatgacctgtagcgccagcagcagcgtgcgctacatgtactggtatcagcagaagcccagaagcagccccaagccctggattcacctgaccagcaatctggcctctggcgtgcccgctagattttccggctctggcagcggcaccagctacagcctgaccatcagcagcatggaagccgaggacgccgccacctactactgccagcagtggtccagccaccccttcacatttggctccggcaccaagctggaaatcaagctcgaggacctgaagaacgtgttcccacctgaggtggccgtgttcgagcctagcgaggccgagatcagccacacccagaaagccaccctcgtgtgcctggctaccggcttctaccccgaccatgtggaactgtcttggtgggtcaacggcaaagaggtgcacagcggcgtgtgtaccgacccccagccactgaaagaacagcccgccctgaacgacagccggtactgcctgagcagcagactgagagtgtccgccaccttctggcagaacccccggaaccacttcagatgccaggtgcagttctacggcctgagcgagaacgacgagtggacccaggacagagccaagcccgtgacccagatcgtgtctgccgaagcctggggcagagccgattgcgacgtgaagctggtggaaaagagcttcgagacagacaccaacctgaacttccagaacctgagcgtgatcggcttcagaatcctgctgctgaaagtggccggctttaacctgctgatgaccctgcggctgtggtccagcagggccaagcgatctggatctggagcaacaaacttctcactactcaaacaagcaggtgacgtggaggagaatcccgggcctactagtatggactggatttggcgcatccttttccttgtcggcgctgctaccggcgcgcattccttcgaagatgtgcaactccaggaaagcggccctggccttgtgaagcctagccagagcctgtccctgacctgtaccgtgaccggcttcagcatcaccagcgactactcttggaactggatcagacagttccctggcaacaaactggaatggatgggctacatcagctactccggccacacctcctacaaccccagcctggaaagccggatctccatcaccagagacaccagcaagaaccagttcttcttgcaactgaacagcgtgaccaccgaggataccgccacatattactgtaccagaggcaactgggacgtggtgtactggggccagggcacacttgtgaccgtgtctgctacgcgtatccagaaccctgatcctgccgtgtaccagctgcgggatagcaagagcagcgacaagagcgtgtgtctgttcaccgacttcgacagccagaccaacgtgtcccagagcaaggactccgacgtgtacatcaccgataagtgcgtgctggacatgcggagcatggacttcaagagcaactccgccgtggcctggtccaacaagtccgatttcgcctgcgccaacgccttcaacaacagcattatccccgaggacacattcttcccaagccccgagagcagctgcggctttaccagcgagagctaccagcagggcgtgctgagcgccaccatcctgtacgagatcctgctgggcaaggccaccctgtacgccgtgctggtgtctgccctggtgctgatggctatggtcaagcggaaggacagccgggga

SEQ ID NO: 3963 - DNA, 1875 bp, synthetic construct
  source 1..1875: mol_type = other DNA
atggccttaccagtgaccgccttgctcctgccgctggccttgctgctccacgccgccaggccggacgtcgtgatgacccagagccctctgagcctgcctgtgacactgggacagcctgccagcatctcctgtcggagcagccagagcatcgtgcacagcgacggcaacacctacctggaatggtatcagcagcggccaggccagagccccagacggctgatctacaaggtgtccaacagattcagcggcgtgcccgacagattctccggcagcggctctggcaccgacttcaccctgaagatcagcagagtggaagccgaggacgtgggcgtgtactactgttttcaaggcagccacgccccctggacctttggcggaggaacaaaggtggaaatcaagctcgaggacctgaagaacgtgttcccacctgaggtggccgtgttcgagcctagcgaggccgagatcagccacacccagaaagccaccctcgtgtgcctggctaccggcttctaccccgaccatgtggaactgtcttggtgggtcaacggcaaagaggtgcacagcggcgtgtgtaccgacccccagccactgaaagaacagcccgccctgaacgacagccggtactgcctgagcagcagactgagagtgtccgccaccttctggcagaacccccggaaccacttcagatgccaggtgcagttctacggcctgagcgagaacgacgagtggacccaggacagagccaagcccgtgacccagatcgtgtctgccgaagcctggggcagagccgattgcgacgtgaagctggtggaaaagagcttcgagacagacaccaacctgaacttccagaacctgagcgtgatcggcttcagaatcctgctgctgaaagtggccggctttaacctgctgatgaccctgcggctgtggtccagcagggccaagcgatctggatctggagcaacaaacttctcactactcaaacaagcaggtgacgtggaggagaatcccgggcctactagtatggactggatttggcgcatccttttccttgtcggcgctgctaccggcgcgcattccttcgaagaagtgcaactggtggaatcaggcggcggactggtgcagcctggcggatctctgagactgagctgtgccgccagcggcttcaccttcagcagctacggaatgcactgggtgcgccaggcccctggcaaaggactggaatgggtggcctacatcaccaccagaagcagcaccatctactacgccgacagcgtgaagggccggttcaccatctccagagacaacgccaagaacagcctgtacctccagatgaactccctgcgggccgaggacaccgccgtgtactattgcaccagagagcccctgaccggctactacgctatggactattggggccagggcaccagcgtgaccgtgtctagtacgcgtatccagaaccctgatcctgccgtgtaccagctgcgggatagcaagagcagcgacaagagcgtgtgtctgttcaccgacttcgacagccagaccaacgtgtcccagagcaaggactccgacgtgtacatcaccgataagtgcgtgctggacatgcggagcatggacttcaagagcaactccgccgtggcctggtccaacaagtccgatttcgcctgcgccaacgccttcaacaacagcattatccccgaggacacattcttcccaagccccgagagcagctgcggctttaccagcgagagctaccagcagggcgtgctgagcgccaccatcctgtacgagatcctgctgggcaaggccaccctgtacgccgtgctggtgtctgccctggtgctgatggctatggtcaagcggaaggacagccgggga

SEQ ID NO: 3964 - DNA, 1851 bp, synthetic construct
  source 1..1851: mol_type = other DNA
atggccttaccagtgaccgccttgctcctgccgctggccttgctgctccacgccgccaggccggacatccagatgacccagagccccagcagcctgtctgccagcgtgggcgacagagtgaccatcacctgtagagccagccagagcatcagcctgtggctgaactggtatcagcagaagcccggcaaggcccccaagctgctgatctacgccgccagcacactccagagcggcgtgccaagcagattttccggcagcggctccggcaccgacttcaccctgacaatcagctccctccagcccgaggacttcgccacctactactgccagcagtactacaccagcccctacaccttcggccagggcaccaaggtggaaatcaagagactcgaggacctgaagaacgtgttcccacctgaggtggccgtgttcgagcctagcgaggccgagatcagccacacccagaaagccaccctcgtgtgcctggctaccggcttctaccccgaccatgtggaactgtcttggtgggtcaacggcaaagaggtgcacagcggcgtgtgtaccgacccccagccactgaaagaacagcccgccctgaacgacagccggtactgcctgagcagcagactgagagtgtccgccaccttctggcagaacccccggaaccacttcagatgccaggtgcagttctacggcctgagcgagaacgacgagtggacccaggacagagccaagcccgtgacccagatcgtgtctgccgaagcctggggcagagccgattgcgacgtgaagctggtggaaaagagcttcgagacagacaccaacctgaacttccagaacctgagcgtgatcggcttcagaatcctgctgctgaaagtggccggctttaacctgctgatgaccctgcggctgtggtccagcagggccaagcgatctggatctggagcaacaaacttctcactactcaaacaagcaggtgacgtggaggagaatcccgggcctactagtatggactggatttggcgcatccttttccttgtcggcgctgctaccggcgcgcattccttcgaacaggtgcaactgctggaatctggcggcggactggtgcagcctggcggatctctgagactgagctgtgccgccagcggcttcaccttcagcagctacgccatgagctgggtgcgccaggcccctggaaaaggactggaatgggtgtccgtgatccggtccagcggcagcagcacctattacgccgatagcgtgaagggccggttcaccatcagccgggacaacagcaagaacaccctgtacctccagatgaacagcctgcgggccgaggacaccgccgtgtactattgtgctaggggaggcggctacttcgactactggggccagggaacactcgtgaccgtgtcctctacgcgtatccagaaccctgatcctgccgtgtaccagctgcgggatagcaagagcagcgacaagagcgtgtgtctgttcaccgacttcgacagccagaccaacgtgtcccagagcaaggactccgacgtgtacatcaccgataagtgcgtgctggacatgcggagcatggacttcaagagcaactccgccgtggcctggtccaacaagtccgatttcgcctgcgccaacgccttcaacaacagcattatccccgaggacacattcttcccaagccccgagagcagctgcggctttaccagcgagagctaccagcagggcgtgctgagcgccaccatcctgtacgagatcctgctgggcaaggccaccctgtacgccgtgctggtgtctgccctggtgctgatggctatggtcaagcggaaggacagccgggga

SEQ ID NO: 3965 - DNA, 1860 bp, synthetic construct
  source 1..1860: mol_type = other DNA
atggccttaccagtgaccgccttgctcctgccgctggccttgctgctccacgccgccaggccggacatccagatgacccagagccccagcagcctgtctgccagcgtgggcgacagagtgaccatcacctgtagagccagccagagcatcagcagctacctgaactggtatcagcagaagcccggcaaggcccccaaactgctgatctacgccgtgtccacactccagagcggcgtgcccagcagattttctggcagcggctccggcaccgacttcaccctgacaatcagctccctccagcccgaggacttcgccacctactactgtcagcagagcggcaccttccctcccaccacatttggacagggcaccaaggtggaaatcaagagactcgaggacctgaagaacgtgttcccacctgaggtggccgtgttcgagcctagcgaggccgagatcagccacacccagaaagccaccctcgtgtgcctggctaccggcttctaccccgaccatgtggaactgtcttggtgggtcaacggcaaagaggtgcacagcggcgtgtgtaccgacccccagccactgaaagaacagcccgccctgaacgacagccggtactgcctgagcagcagactgagagtgtccgccaccttctggcagaacccccggaaccacttcagatgccaggtgcagttctacggcctgagcgagaacgacgagtggacccaggacagagccaagcccgtgacccagatcgtgtctgccgaagcctggggcagagccgattgcgacgtgaagctggtggaaaagagcttcgagacagacaccaacctgaacttccagaacctgagcgtgatcggcttcagaatcctgctgctgaaagtggccggctttaacctgctgatgaccctgcggctgtggtccagcagggccaagcgatctggatctggagcaacaaacttctcactactcaaacaagcaggtgacgtggaggagaatcccgggcctactagtatggactggatttggcgcatccttttccttgtcggcgctgctaccggcgcgcattccttcgaacaggtgcaactgctggaatctggcggcggactggtgcagcctggcggatctctgagactgagctgtgccgccagcggcttcaccttcagcagccacggaatgcactgggtgcgccaggcccctggaaagggactggaatgggtgtccgtgatctccggcagcggcagcaataccggctacgccgatagcgtgaagggccggttcaccatcagccgggacaacagcaagaacaccctgtacctccagatgaacagcctgcgggccgaggacaccgccgtgtactattgtgccagacagtggggcagctacgccttcgattcttggggccagggcaccctcgtgaccgtgtcatctacgcgtatccagaaccctgatcctgccgtgtaccagctgcgggatagcaagagcagcgacaagagcgtgtgtctgttcaccgacttcgacagccagaccaacgtgtcccagagcaaggactccgacgtgtacatcaccgataagtgcgtgctggacatgcggagcatggacttcaagagcaactccgccgtggcctggtccaacaagtccgatttcgcctgcgccaacgccttcaacaacagcattatccccgaggacacattcttcccaagccccgagagcagctgcggctttaccagcgagagctaccagcagggcgtgctgagcgccaccatcctgtacgagatcctgctgggcaaggccaccctgtacgccgtgctggtgtctgccctggtgctgatggctatggtcaagcggaaggacagccgggga

SEQ ID NO: 3966 - DNA, 1890 bp, synthetic construct
  source 1..1890: mol_type = other DNA
atggccttaccagtgaccgccttgctcctgccgctggccttgctgctccacgccgccaggccggacatcgtgatgagccagagccctagcagcctggccgtgtccgtgggcgagaaagtgaccatgagctgcaagagcagccagtccctgctgcacagcagcaaccagaagaactacctggcctggtatcagcagaagcccggccagtcccccaaggtgctgatctactgggccagcaccagagaaagcggcgtgcccgatagattcaccggcagcggctctggcaccgacttcaccctgaccatcaccagcgtgaagtccgaggacctggctgtgtactactgccagcagtattacagctacccctggaccttcggcggaggcacccggctggaaatcaaaagactcgaggacctgaagaacgtgttcccacctgaggtggccgtgttcgagcctagcgaggccgagatcagccacacccagaaagccaccctcgtgtgcctggctaccggcttctaccccgaccatgtggaactgtcttggtgggtcaacggcaaagaggtgcacagcggcgtgtgtaccgacccccagccactgaaagaacagcccgccctgaacgacagccggtactgcctgagcagcagactgagagtgtccgccaccttctggcagaacccccggaaccacttcagatgccaggtgcagttctacggcctgagcgagaacgacgagtggacccaggacagagccaagcccgtgacccagatcgtgtctgccgaagcctggggcagagccgattgcgacgtgaagctggtggaaaagagcttcgagacagacaccaacctgaacttccagaacctgagcgtgatcggcttcagaatcctgctgctgaaagtggccggctttaacctgctgatgaccctgcggctgtggtccagcagggccaagcgatctggatctggagcaacaaacttctcactactcaaacaagcaggtgacgtggaggagaatcccgggcctactagtatggactggatttggcgcatccttttccttgtcggcgctgctaccggcgcgcattccttcgaagaagtgcaactccagcagagcgtggccgagcttgtgaagcctggcgcttccgtgaagatgtcctgcaaggtgtccggctacaccctgacagaccacaccatccactggatgaagcagcggcctgagcagggcctggaatggatcggctacatctaccccagggacggcatcaccggctacaacgagaagttcaagggcaaggccacactgaccgccgacaccagcagcagcacagcctacatgcaactgaacagcctgaccagcgaggacagcgccgtgtacttctgtgccagatggggctacagctacagaaactacgcctactactacgactactggggccagggcacaaccctgaccgtgtctagtacgcgtatccagaaccctgatcctgccgtgtaccagctgcgggatagcaagagcagcgacaagagcgtgtgtctgttcaccgacttcgacagccagaccaacgtgtcccagagcaaggactccgacgtgtacatcaccgataagtgcgtgctggacatgcggagcatggacttcaagagcaactccgccgtggcctggtccaacaagtccgatttcgcctgcgccaacgccttcaacaacagcattatccccgaggacacattcttcccaagccccgagagcagctgcggctttaccagcgagagctaccagcagggcgtgctgagcgccaccatcctgtacgagatcctgctgggcaaggccaccctgtacgccgtgctggtgtctgccctggtgctgatggctatggtcaagcggaaggacagccgggga

SEQ ID NO: 3967 - DNA, 1881 bp, synthetic construct
  source 1..1881: mol_type = other DNA
atggccttaccagtgaccgccttgctcctgccgctggccttgctgctccacgccgccaggccggagatcgtgctgacacagagccctggcaccctgagcctgtctccaggcgaaagagccacactgagctgtcgggccagccagagcgtgtccagctcttacctggcctggtatcagcagaagcccggccaggctccccggctgctgatctacggaacaagcagcagagccaccggcatccccgacagattttctggcagcggctccggcaccgacttcaccctgacaatcagcagactggaacccgaggacttcgccgtgtactactgccagcagtacggcagcagccccttcacctttggcggaggcaccaaggtggaaatcaagagactcgaggacctgaagaacgtgttcccacctgaggtggccgtgttcgagcctagcgaggccgagatcagccacacccagaaagccaccctcgtgtgcctggctaccggcttctaccccgaccatgtggaactgtcttggtgggtcaacggcaaagaggtgcacagcggcgtgtgtaccgacccccagccactgaaagaacagcccgccctgaacgacagccggtactgcctgagcagcagactgagagtgtccgccaccttctggcagaacccccggaaccacttcagatgccaggtgcagttctacggcctgagcgagaacgacgagtggacccaggacagagccaagcccgtgacccagatcgtgtctgccgaagcctggggcagagccgattgcgacgtgaagctggtggaaaagagcttcgagacagacaccaacctgaacttccagaacctgagcgtgatcggcttcagaatcctgctgctgaaagtggccggctttaacctgctgatgaccctgcggctgtggtccagcagggccaagcgatctggatctggagcaacaaacttctcactactcaaacaagcaggtgacgtggaggagaatcccgggcctactagtatggactggatttggcgcatccttttccttgtcggcgctgctaccggcgcgcattccttcgaacaggtgcaactccaggaatctggccccggactggctaagcccagcgagacactgagcctgacctgtaccgtgtccggcgacagcatcaccagctactactggtcctggatcagacagccccctggcaagggcctggaatggatcggctacatctactacagcggcagcaccaactacaaccccagcctgaagtccagagtgaccatcagcgtggacaccagcaagaaccagttctccctgaagctgagcagcgtgacagccgccgacaccgccgtgtattattgcgccagagatcagcggagaatcgccgctgccggcacccacttttacggcatggatgtgtggggccagggcaccaccgtgaccgtgtcatctacgcgtatccagaaccctgatcctgccgtgtaccagctgcgggatagcaagagcagcgacaagagcgtgtgtctgttcaccgacttcgacagccagaccaacgtgtcccagagcaaggactccgacgtgtacatcaccgataagtgcgtgctggacatgcggagcatggacttcaagagcaactccgccgtggcctggtccaacaagtccgatttcgcctgcgccaacgccttcaacaacagcattatccccgaggacacattcttcccaagccccgagagcagctgcggctttaccagcgagagctaccagcagggcgtgctgagcgccaccatcctgtacgagatcctgctgggcaaggccaccctgtacgccgtgctggtgtctgccctggtgctgatggctatggtcaagcggaaggacagccgggga

SEQ ID NO: 3968 - DNA, 1857 bp, synthetic construct
  source 1..1857: mol_type = other DNA
atggccttaccagtgaccgccttgctcctgccgctggccttgctgctccacgccgccaggccggacatcctgctgacccagagccccgtgatcctgtccgtgtctcctggcgagagagtgtccttcagctgtcgggccagccagagcatcggcaccaacatccactggtatcagcagcggaccaacggcagccccagactgctgattaagtacgccagcgagtccatcagcggcatccccagcagattttccggcagcggctccggcaccgacttcaccctgagcatcaacagcgtggaaagcgaggacattgccgactactactgccagcagaacaacaactggcccaccaccttcggagccggcaccaagctggaactgaagctcgaggacctgaagaacgtgttcccacctgaggtggccgtgttcgagcctagcgaggccgagatcagccacacccagaaagccaccctcgtgtgcctggctaccggcttctaccccgaccatgtggaactgtcttggtgggtcaacggcaaagaggtgcacagcggcgtgtgtaccgacccccagccactgaaagaacagcccgccctgaacgacagccggtactgcctgagcagcagactgagagtgtccgccaccttctggcagaacccccggaaccacttcagatgccaggtgcagttctacggcctgagcgagaacgacgagtggacccaggacagagccaagcccgtgacccagatcgtgtctgccgaagcctggggcagagccgattgcgacgtgaagctggtggaaaagagcttcgagacagacaccaacctgaacttccagaacctgagcgtgatcggcttcagaatcctgctgctgaaagtggccggctttaacctgctgatgaccctgcggctgtggtccagcagggccaagcgatctggatctggagcaacaaacttctcactactcaaacaagcaggtgacgtggaggagaatcccgggcctactagtatggactggatttggcgcatccttttccttgtcggcgctgctaccggcgcgcattccttcgaacaggtgcagctgaagcagagcggacctggcctggtgcagcctagccagagcctgtccatcacctgtaccgtgtccggcttcagcctgaccaactacggcgtgcactgggtgcgccagagccctggaaaaggactggaatggctgggagtgatttggagcggcggcaacaccgactacaacacccccttcaccagcagactgtctatcaacaaggacaacagcaagagccaggtgttcttcaagatgaacagcctccagagcaacgacaccgccatctactactgtgctagagccctgacctactatgactacgagttcgcctactggggccagggcacactcgtgacagtgtctgctacgcgtatccagaaccctgatcctgccgtgtaccagctgcgggatagcaagagcagcgacaagagcgtgtgtctgttcaccgacttcgacagccagaccaacgtgtcccagagcaaggactccgacgtgtacatcaccgataagtgcgtgctggacatgcggagcatggacttcaagagcaactccgccgtggcctggtccaacaagtccgatttcgcctgcgccaacgccttcaacaacagcattatccccgaggacacattcttcccaagccccgagagcagctgcggctttaccagcgagagctaccagcagggcgtgctgagcgccaccatcctgtacgagatcctgctgggcaaggccaccctgtacgccgtgctggtgtctgccctggtgctgatggctatggtcaagcggaaggacagccgggga

SEQ ID NO: 3969 - DNA, 1836 bp, synthetic construct
  source 1..1836: mol_type = other DNA
atggccttaccagtgaccgccttgctcctgccgctggccttgctgctccacgccgccaggccgatgacccagagccccaagttcctgctggtgtctgccggcgacagagtgaccctgacatgcaaggccagccagagcgtgaacaacgacgtgtactggtatcagcaggaacccggccagtcccccaagctgctgatctactgggccagcaccagagaaagcggcgtgcccgatagattcaccggcagcggctctggcaccgacttcaccctgacaatcagcagcgtgcaggccgaggacctggccgtgtactactgcaagcagagctacaacctgtacaccttcggcggaggcaccaagctggaaatcaagagactcgaggacctgaagaacgtgttcccacctgaggtggccgtgttcgagcctagcgaggccgagatcagccacacccagaaagccaccctcgtgtgcctggctaccggcttctaccccgaccatgtggaactgtcttggtgggtcaacggcaaagaggtgcacagcggcgtgtgtaccgacccccagccactgaaagaacagcccgccctgaacgacagccggtactgcctgagcagcagactgagagtgtccgccaccttctggcagaacccccggaaccacttcagatgccaggtgcagttctacggcctgagcgagaacgacgagtggacccaggacagagccaagcccgtgacccagatcgtgtctgccgaagcctggggcagagccgattgcgacgtgaagctggtggaaaagagcttcgagacagacaccaacctgaacttccagaacctgagcgtgatcggcttcagaatcctgctgctgaaagtggccggctttaacctgctgatgaccctgcggctgtggtccagcagggccaagcgatctggatctggagcaacaaacttctcactactcaaacaagcaggtgacgtggaggagaatcccgggcctactagtatggactggatttggcgcatccttttccttgtcggcgctgctaccggcgcgcattccttcgaagaatctggaagaggactggtgcagcctggcggcagcagaaagctgtcttgtgccgccagcggcttcaccttcagcaccagcggaatgcactgggtgcgccaggcccctgagaagggactggaatgggtggcctacatcagctccggcagcaccaccatctaccacgccgataccgtgaagggccggttcaccatcagccgggacaaccccaagaataccctgttcctccagatgaccagcctgcggagcgaggacaccgccatgtactattgctgcgccagaagcggccagttcggcaactacttcgactactggggccagggcaccaccctgaccgtgtcatctacgcgtatccagaaccctgatcctgccgtgtaccagctgcgggatagcaagagcagcgacaagagcgtgtgtctgttcaccgacttcgacagccagaccaacgtgtcccagagcaaggactccgacgtgtacatcaccgataagtgcgtgctggacatgcggagcatggacttcaagagcaactccgccgtggcctggtccaacaagtccgatttcgcctgcgccaacgccttcaacaacagcattatccccgaggacacattcttcccaagccccgagagcagctgcggctttaccagcgagagctaccagcagggcgtgctgagcgccaccatcctgtacgagatcctgctgggcaaggccaccctgtacgccgtgctggtgtctgccctggtgctgatggctatggtcaagcggaaggacagccgggga

SEQ ID NO: 3970 - DNA, 1851 bp, synthetic construct
  source 1..1851: mol_type = other DNA
atggccttaccagtgaccgccttgctcctgccgctggccttgctgctccacgccgccaggccgcagagcccatctagcctggctgtgtctgccggcgagaaagtgaccatgagctgcaagagcagccagagcctgctgaacagccggacccggaagaactacctggcctggtatcagcagaagcccggccagagccccaagctgctgatctactgggccagcaccagagaaagcggcgtgcccgatagattcaccggctctggcagcggcaccgacttcaccctgacaatcagcagcgtgcaggccgaggacctggccgtgtactactgcaagcagagcaacctgtacaccttcggcggaggcaccaagctggaaatcaagctcgaggacctgaagaacgtgttcccacctgaggtggccgtgttcgagcctagcgaggccgagatcagccacacccagaaagccaccctcgtgtgcctggctaccggcttctaccccgaccatgtggaactgtcttggtgggtcaacggcaaagaggtgcacagcggcgtgtgtaccgacccccagccactgaaagaacagcccgccctgaacgacagccggtactgcctgagcagcagactgagagtgtccgccaccttctggcagaacccccggaaccacttcagatgccaggtgcagttctacggcctgagcgagaacgacgagtggacccaggacagagccaagcccgtgacccagatcgtgtctgccgaagcctggggcagagccgattgcgacgtgaagctggtggaaaagagcttcgagacagacaccaacctgaacttccagaacctgagcgtgatcggcttcagaatcctgctgctgaaagtggccggctttaacctgctgatgaccctgcggctgtggtccagcagggccaagcgatctggatctggagcaacaaacttctcactactcaaacaagcaggtgacgtggaggagaatcccgggcctactagtatggactggatttggcgcatccttttccttgtcggcgctgctaccggcgcgcattccttcgaacaggtgcagctggaagagtctggacccgagcttgtgaagcctggggccagcgtgaagctgtcctgtaaagccagcggctacaccttcaccgagtacatcatccactgggtcaagcagcggagcggccagggcctggaatggatcggctggttttaccctggctccggcagcatcaagtacaacgagaagttcaaggacaaggccaccctgaccgccgacaagtccagcagcaccgtgtacatggaactgagcggcctgaccagcgaggacagcgccgtgtatttctgcgccagacacgacggctacagctacttcgactattggggccagggcaccacactgaccgtgtcctctacgcgtatccagaaccctgatcctgccgtgtaccagctgcgggatagcaagagcagcgacaagagcgtgtgtctgttcaccgacttcgacagccagaccaacgtgtcccagagcaaggactccgacgtgtacatcaccgataagtgcgtgctggacatgcggagcatggacttcaagagcaactccgccgtggcctggtccaacaagtccgatttcgcctgcgccaacgccttcaacaacagcattatccccgaggacacattcttcccaagccccgagagcagctgcggctttaccagcgagagctaccagcagggcgtgctgagcgccaccatcctgtacgagatcctgctgggcaaggccaccctgtacgccgtgctggtgtctgccctggtgctgatggctatggtcaagcggaaggacagccgggga

SEQ ID NO: 3971 - DNA, 1860 bp, synthetic construct
  source 1..1860: mol_type = other DNA
atggccttaccagtgaccgccttgctcctgccgctggccttgctgctccacgccgccaggccggacatccagatgacccagagccccagcagcctgtctgcctctctgggcgagagagtgtccctgacctgtcgggccacacaggaactgagcggctacctgtcttggctgcagcagaagcccgacggcaccatcaagcggctgatctacgccgccagcaccctggatagcggcgtgcccaagagattcagcggcaacagaagcggcagcgactacagcctgaccatcagctccctggaaagcgaggacttcgccgactactactgcctgcagtacgccatctacccctacaccttcggcggaggcaccaagctggaaatcaagctcgaggacctgaagaacgtgttcccacctgaggtggccgtgttcgagcctagcgaggccgagatcagccacacccagaaagccaccctcgtgtgcctggctaccggcttctaccccgaccatgtggaactgtcttggtgggtcaacggcaaagaggtgcacagcggcgtgtgtaccgacccccagccactgaaagaacagcccgccctgaacgacagccggtactgcctgagcagcagactgagagtgtccgccaccttctggcagaacccccggaaccacttcagatgccaggtgcagttctacggcctgagcgagaacgacgagtggacccaggacagagccaagcccgtgacccagatcgtgtctgccgaagcctggggcagagccgattgcgacgtgaagctggtggaaaagagcttcgagacagacaccaacctgaacttccagaacctgagcgtgatcggcttcagaatcctgctgctgaaagtggccggctttaacctgctgatgaccctgcggctgtggtccagcagggccaagcgatctggatctggagcaacaaacttctcactactcaaacaagcaggtgacgtggaggagaatcccgggcctactagtatggactggatttggcgcatccttttccttgtcggcgctgctaccggcgcgcattccttcgaagaggtgcaactgcagcagtctggccccgagcttgtgaagcctggcgcctccgtgaagatgagctgcaaggccagcggctacacctttaccagctacttcatccactgggtcaagcagaaacccggccagggcctggaatggatcggcttcatcaacccttacaacgacggcagcaagtacaacgagaagttcaagggcaaggccaccctgaccagcgacaagagcagcagcaccgcctacatggaactgtccagcctgacatccgaggacagcgccgtgtactactgcaccagggacgacggctactacggctacgccatggactactggggccagggaacaagcgtcaccgtgtcctctacgcgtatccagaaccctgatcctgccgtgtaccagctgcgggatagcaagagcagcgacaagagcgtgtgtctgttcaccgacttcgacagccagaccaacgtgtcccagagcaaggactccgacgtgtacatcaccgataagtgcgtgctggacatgcggagcatggacttcaagagcaactccgccgtggcctggtccaacaagtccgatttcgcctgcgccaacgccttcaacaacagcattatccccgaggacacattcttcccaagccccgagagcagctgcggctttaccagcgagagctaccagcagggcgtgctgagcgccaccatcctgtacgagatcctgctgggcaaggccaccctgtacgccgtgctggtgtctgccctggtgctgatggctatggtcaagcggaaggacagccgggga

SEQ ID NO: 3972 - DNA, 1875 bp, synthetic construct
  source 1..1875: mol_type = other DNA
atggccttaccagtgaccgccttgctcctgccgctggccttgctgctccacgccgccaggccggacaccatcgtgctgacacagagccctgcttccctggccgtgtccctgggacagagagccaccatctcttgcagagccagcgagagcgtggacagctacggcaacagcttcatgcactggtatcagcagaagcccggccagccccccaagctgctgatctacctggcctccaacctggaaagcggcgtgcccgccagattttctggcagcggcagcagaaccgacttcaccctgaccatcgaccccgtggaagccgatgatgccgccacctactactgccagcagaacaactacgacccctggaccttcggcggaggcaccaagctggaaatcaagctcgaggacctgaagaacgtgttcccacctgaggtggccgtgttcgagcctagcgaggccgagatcagccacacccagaaagccaccctcgtgtgcctggctaccggcttctaccccgaccatgtggaactgtcttggtgggtcaacggcaaagaggtgcacagcggcgtgtgtaccgacccccagccactgaaagaacagcccgccctgaacgacagccggtactgcctgagcagcagactgagagtgtccgccaccttctggcagaacccccggaaccacttcagatgccaggtgcagttctacggcctgagcgagaacgacgagtggacccaggacagagccaagcccgtgacccagatcgtgtctgccgaagcctggggcagagccgattgcgacgtgaagctggtggaaaagagcttcgagacagacaccaacctgaacttccagaacctgagcgtgatcggcttcagaatcctgctgctgaaagtggccggctttaacctgctgatgaccctgcggctgtggtccagcagggccaagcgatctggatctggagcaacaaacttctcactactcaaacaagcaggtgacgtggaggagaatcccgggcctactagtatggactggatttggcgcatccttttccttgtcggcgctgctaccggcgcgcattccttcgaagaagtgcaactccagcagagcggccctgagcttgtgaagcctggcgcttccgtgaagatgagctgcaaggccagcggctacaccttcaccagctacgtgatgcactgggtcaagcagaaacctggacagggcctggaatggatcggctacatcaacccctacaacgacggcaccaagtacaacgagaagttcaagggcaaggccaccctgacaagcgacaccagcagcagcaccgcctacatggaactgaacagcctgaccagcgaggacagcgccgtgtacttctgcgccagacccatctacttcgacaacgactacttcgattactggggccagggcaccaccctgaaggtgtcctctacgcgtatccagaaccctgatcctgccgtgtaccagctgcgggatagcaagagcagcgacaagagcgtgtgtctgttcaccgacttcgacagccagaccaacgtgtcccagagcaaggactccgacgtgtacatcaccgataagtgcgtgctggacatgcggagcatggacttcaagagcaactccgccgtggcctggtccaacaagtccgatttcgcctgcgccaacgccttcaacaacagcattatccccgaggacacattcttcccaagccccgagagcagctgcggctttaccagcgagagctaccagcagggcgtgctgagcgccaccatcctgtacgagatcctgctgggcaaggccaccctgtacgccgtgctggtgtctgccctggtgctgatggctatggtcaagcggaaggacagccgggga

SEQ ID NO: 3973 - DNA, 1860 bp, synthetic construct
  source 1..1860: mol_type = other DNA
atggccttaccagtgaccgccttgctcctgccgctggccttgctgctccacgccgccaggccggacatccagatgacccagagccccagcagcctgtctgccagcgtgggcgacagagtgaccatcacatgcaaggccagccaggacgtgggaatcgccgtggcctggtatcagcagaaacccggcaaggtgcccaagctgctgatctactgggccagcaccagacacaccggcgtgcccgatagattttccggcagcggctccggcaccgacttcaccctgacaatcagctccctccagcccgaggacgtggcaacctactactgccagcagtacagcagctacccctacaccttcggccagggcaccaaggtggaaatcaagagactcgaggacctgaagaacgtgttcccacctgaggtggccgtgttcgagcctagcgaggccgagatcagccacacccagaaagccaccctcgtgtgcctggctaccggcttctaccccgaccatgtggaactgtcttggtgggtcaacggcaaagaggtgcacagcggcgtgtgtaccgacccccagccactgaaagaacagcccgccctgaacgacagccggtactgcctgagcagcagactgagagtgtccgccaccttctggcagaacccccggaaccacttcagatgccaggtgcagttctacggcctgagcgagaacgacgagtggacccaggacagagccaagcccgtgacccagatcgtgtctgccgaagcctggggcagagccgattgcgacgtgaagctggtggaaaagagcttcgagacagacaccaacctgaacttccagaacctgagcgtgatcggcttcagaatcctgctgctgaaagtggccggctttaacctgctgatgaccctgcggctgtggtccagcagggccaagcgatctggatctggagcaacaaacttctcactactcaaacaagcaggtgacgtggaggagaatcccgggcctactagtatggactggatttggcgcatccttttccttgtcggcgctgctaccggcgcgcattccttcgaagaagtgcaactggtggaatcaggcggcggactggtgcagcctggcggatctctgagactgagctgtgccgccagcggcttcgacttcagccggtactggatgagctgggtgcgccaggcccctggcaaaggactggaatggatcggcgagatcaaccccgacagcagcaccatcaactacgcccccagcctgaaggacaagttcatcatcagccgggacaacgccaagaacagcctgtacctccagatgaactccctgcgggccgaggacaccgccgtgtactattgcgccagacccgacggcaactactggtacttcgacgtgtggggccagggaaccctcgtgaccgtgtcatctacgcgtatccagaaccctgatcctgccgtgtaccagctgcgggatagcaagagcagcgacaagagcgtgtgtctgttcaccgacttcgacagccagaccaacgtgtcccagagcaaggactccgacgtgtacatcaccgataagtgcgtgctggacatgcggagcatggacttcaagagcaactccgccgtggcctggtccaacaagtccgatttcgcctgcgccaacgccttcaacaacagcattatccccgaggacacattcttcccaagccccgagagcagctgcggctttaccagcgagagctaccagcagggcgtgctgagcgccaccatcctgtacgagatcctgctgggcaaggccaccctgtacgccgtgctggtgtctgccctggtgctgatggctatggtcaagcggaaggacagccgggga

SEQ ID NO: 3974 - DNA, 1860 bp, synthetic construct
  source 1..1860: mol_type = other DNA
atggccttaccagtgaccgccttgctcctgccgctggccttgctgctccacgccgccaggccggacatcgtgatgacccagagccagaagagcatgagcaccagcgtgggcgacagagtgagcatcacctgcaaggccagccaggacgtgatcaccggcgtggcctggtaccagcagaagcccggccagagccccaagctgctgatctacagcgccagctacagatacaccggcgtgcccgacagattcaccggcagcggcagcggcaccgacttcaccttcaccatcagcaacgtgcaggccgaggacctggccgtgtactactgccagcagcactacagcacccccctgaccttcggcgccggcaccaagctggagctgaagctcgaggacctgaagaacgtgttcccacctgaggtggccgtgttcgagcctagcgaggccgagatcagccacacccagaaagccaccctcgtgtgcctggctaccggcttctaccccgaccatgtggaactgtcttggtgggtcaacggcaaagaggtgcacagcggcgtgtgtaccgacccccagccactgaaagaacagcccgccctgaacgacagccggtactgcctgagcagcagactgagagtgtccgccaccttctggcagaacccccggaaccacttcagatgccaggtgcagttctacggcctgagcgagaacgacgagtggacccaggacagagccaagcccgtgacccagatcgtgtctgccgaagcctggggcagagccgattgcgacgtgaagctggtggaaaagagcttcgagacagacaccaacctgaacttccagaacctgagcgtgatcggcttcagaatcctgctgctgaaagtggccggctttaacctgctgatgaccctgcggctgtggtccagcagggccaagcgatctggatctggagcaacaaacttctcactactcaaacaagcaggtgacgtggaggagaatcccgggcctactagtatggactggatttggcgcatccttttccttgtcggcgctgctaccggcgcgcattccttcgaacaggtgcagctgcagcagcccggcgccgagctggtgagacccggcgccagcgtgaagctgagctgcaaggccagcggctacagcttcaccacctactggatgaactgggtgaagcagagacccggccagggcctggagtggatcggcatgatccaccccagcgacagcgagaccagactgaaccagaagttcaaggacaaggccaccctgaccgtggacaagagcagcagcaccgcctacatgcagctgagcagccccaccagcgaggacagcgccgtgtactactgcgccagaagcaccatgatcgccaccagagccatggactactggggccagggcaccagcgtgaccgtgagcagcacgcgtatccagaaccctgatcctgccgtgtaccagctgcgggatagcaagagcagcgacaagagcgtgtgtctgttcaccgacttcgacagccagaccaacgtgtcccagagcaaggactccgacgtgtacatcaccgataagtgcgtgctggacatgcggagcatggacttcaagagcaactccgccgtggcctggtccaacaagtccgatttcgcctgcgccaacgccttcaacaacagcattatccccgaggacacattcttcccaagccccgagagcagctgcggctttaccagcgagagctaccagcagggcgtgctgagcgccaccatcctgtacgagatcctgctgggcaaggccaccctgtacgccgtgctggtgtctgccctggtgctgatggctatggtcaagcggaaggacagccgggga

SEQ ID NO: 3975 - DNA, 1878 bp, synthetic construct
  source 1..1878: mol_type = other DNA
atggccttaccagtgaccgccttgctcctgccgctggccttgctgctccacgccgccaggccgcagagcgtgctgacacagcctccatccgtgtctggcgctccaggccagagagtgaccatctcctgtaccggcagcggcagcaacatcggagccccctacgacgtgtcctggtatcagcaactgcctggcaccgcccccaagctgctgatctaccacaacaacaagcggcccagcggcgtgcccgatagattcagcggctctaagagcggcaccagcgccagcctggctatcactggactccaggccgaggacgaggccgactactactgtgccacagtggaagccggcctgagcggctctgtgtttggcggcggaacaaagctgaccgtgctgggagctctcgaggacctgaagaacgtgttcccacctgaggtggccgtgttcgagcctagcgaggccgagatcagccacacccagaaagccaccctcgtgtgcctggctaccggcttctaccccgaccatgtggaactgtcttggtgggtcaacggcaaagaggtgcacagcggcgtgtgtaccgacccccagccactgaaagaacagcccgccctgaacgacagccggtactgcctgagcagcagactgagagtgtccgccaccttctggcagaacccccggaaccacttcagatgccaggtgcagttctacggcctgagcgagaacgacgagtggacccaggacagagccaagcccgtgacccagatcgtgtctgccgaagcctggggcagagccgattgcgacgtgaagctggtggaaaagagcttcgagacagacaccaacctgaacttccagaacctgagcgtgatcggcttcagaatcctgctgctgaaagtggccggctttaacctgctgatgaccctgcggctgtggtccagcagggccaagcgatctggatctggagcaacaaacttctcactactcaaacaagcaggtgacgtggaggagaatcccgggcctactagtatggactggatttggcgcatccttttccttgtcggcgctgctaccggcgcgcattccttcgaacaggtgcaactggtgcagagcggagccgaagtgaagaaacctggggccagcgtgaaggtgtcctgcaaggtgtccggctacaccctgaccgagctgagcattcactgggtgcgccaggcccctggcaagggactggaatggatgggcggcttcgaccccgaagagaacgagatcgtgtacgcccagcggttccagggcagagtgacaatgaccgaggacaccagcaccgacaccgcctacatggaactgagcagcctgcggagcgaggataccgccgtgtactactgcgccatcgtgggcagcttcagccctctgacactgggcctgtggggccagggaactatggtcaccgtgtccagcacgcgtatccagaaccctgatcctgccgtgtaccagctgcgggatagcaagagcagcgacaagagcgtgtgtctgttcaccgacttcgacagccagaccaacgtgtcccagagcaaggactccgacgtgtacatcaccgataagtgcgtgctggacatgcggagcatggacttcaagagcaactccgccgtggcctggtccaacaagtccgatttcgcctgcgccaacgccttcaacaacagcattatccccgaggacacattcttcccaagccccgagagcagctgcggctttaccagcgagagctaccagcagggcgtgctgagcgccaccatcctgtacgagatcctgctgggcaaggccaccctgtacgccgtgctggtgtctgccctggtgctgatggctatggtcaagcggaaggacagccgggga

SEQ ID NO: 3976 - DNA, 1878 bp, synthetic construct
  source 1..1878: mol_type = other DNA
atggccttaccagtgaccgccttgctcctgccgctggccttgctgctccacgccgccaggccgcagagcgtgctgacacagcctccatccgtgtctggcgctccaggccagagagtgaccatctcctgtaccggcagcggcagcaacatcggagccccctacgacgtgtcctggtatcagcaactgcctggcaccgcccccaagctgctgatctaccacaacaacaagcggcccagcggcgtgcccgatagattcagcggctctaagagcggcaccagcgccagcctggctatcactggactccaggccgaggacgaggccgactactactgccagagctacgacagcagcagcatcagcaccatcttcggcggaggcaccaagctgacagtgctgggagctctcgaggacctgaagaacgtgttcccacctgaggtggccgtgttcgagcctagcgaggccgagatcagccacacccagaaagccaccctcgtgtgcctggctaccggcttctaccccgaccatgtggaactgtcttggtgggtcaacggcaaagaggtgcacagcggcgtgtgtaccgacccccagccactgaaagaacagcccgccctgaacgacagccggtactgcctgagcagcagactgagagtgtccgccaccttctggcagaacccccggaaccacttcagatgccaggtgcagttctacggcctgagcgagaacgacgagtggacccaggacagagccaagcccgtgacccagatcgtgtctgccgaagcctggggcagagccgattgcgacgtgaagctggtggaaaagagcttcgagacagacaccaacctgaacttccagaacctgagcgtgatcggcttcagaatcctgctgctgaaagtggccggctttaacctgctgatgaccctgcggctgtggtccagcagggccaagcgatctggatctggagcaacaaacttctcactactcaaacaagcaggtgacgtggaggagaatcccgggcctactagtatggactggatttggcgcatccttttccttgtcggcgctgctaccggcgcgcattccttcgaacaggtgcaactggtgcagagcggagccgaagtgaagaaacctggggccagcgtgaaggtgtcctgcaaggtgtccggctacaccctgaccgagctgagcattcactgggtgcgccaggcccctggcaagggactggaatggatgggcggcttcgaccccgaagagaacgagatcgtgtacgcccagcggttccagggcagagtgacaatgaccgaggacaccagcaccgacaccgcctacatggaactgagcagcctgcggagcgaggataccgccgtgtactactgtgccatcgtgggcagcttcagcggaatcgcctacagaccttggggccagggcacaatggtcaccgtgtctagcacgcgtatccagaaccctgatcctgccgtgtaccagctgcgggatagcaagagcagcgacaagagcgtgtgtctgttcaccgacttcgacagccagaccaacgtgtcccagagcaaggactccgacgtgtacatcaccgataagtgcgtgctggacatgcggagcatggacttcaagagcaactccgccgtggcctggtccaacaagtccgatttcgcctgcgccaacgccttcaacaacagcattatccccgaggacacattcttcccaagccccgagagcagctgcggctttaccagcgagagctaccagcagggcgtgctgagcgccaccatcctgtacgagatcctgctgggcaaggccaccctgtacgccgtgctggtgtctgccctggtgctgatggctatggtcaagcggaaggacagccgggga

SEQ ID NO: 3977 - DNA, 1842 bp, synthetic construct
  source 1..1842: mol_type = other DNA
atggccttaccagtgaccgccttgctcctgccgctggccttgctgctccacgccgccaggccggacatccagatgacccagagccccagcagcctgtctgccagcgtgggcgacagagtgaccatcacctgtagagccagccagggcatcagaaacaacctggcctggtatcagcagaagcccggcaaggcccccaagcggctgatctacgccgccagcaatctccagagcggcgtgcccagcagattcacaggctctggcagcggcaccgagttcaccctgatcgtgtctagcctccagcccgaggacttcgccacctactactgcctccagcaccacagctaccccctgacatctggcggaggcaccaaggtggaactcgaggacctgaagaacgtgttcccacctgaggtggccgtgttcgagcctagcgaggccgagatcagccacacccagaaagccaccctcgtgtgcctggctaccggcttctaccccgaccatgtggaactgtcttggtgggtcaacggcaaagaggtgcacagcggcgtgtgtaccgacccccagccactgaaagaacagcccgccctgaacgacagccggtactgcctgagcagcagactgagagtgtccgccaccttctggcagaacccccggaaccacttcagatgccaggtgcagttctacggcctgagcgagaacgacgagtggacccaggacagagccaagcccgtgacccagatcgtgtctgccgaagcctggggcagagccgattgcgacgtgaagctggtggaaaagagcttcgagacagacaccaacctgaacttccagaacctgagcgtgatcggcttcagaatcctgctgctgaaagtggccggctttaacctgctgatgaccctgcggctgtggtccagcagggccaagcgatctggatctggagcaacaaacttctcactactcaaacaagcaggtgacgtggaggagaatcccgggcctactagtatggactggatttggcgcatccttttccttgtcggcgctgctaccggcgcgcattccttcgaagaggtgcaggtgctggaaagtggcggaggactggtgcagcctggcggctctctgagactgtcttgtgccgccagcggcttcaccttcagcagctacgccatgagctgggtgcgccaggcccctggaaaaggactggaatgggtgtccgccatcagcggctctggcgggtctaccaactacgccgatagcgtgaagggccggttcaccatcagccgggacaacagcaagaacaccctgtacctccagatgaacagcctgcgggccgaggacaccgccgtgtattattgtgccggcagcagcgggtggagcgagtattggggacagggcaccctcgtgaccgtgtcctctacgcgtatccagaaccctgatcctgccgtgtaccagctgcgggatagcaagagcagcgacaagagcgtgtgtctgttcaccgacttcgacagccagaccaacgtgtcccagagcaaggactccgacgtgtacatcaccgataagtgcgtgctggacatgcggagcatggacttcaagagcaactccgccgtggcctggtccaacaagtccgatttcgcctgcgccaacgccttcaacaacagcattatccccgaggacacattcttcccaagccccgagagcagctgcggctttaccagcgagagctaccagcagggcgtgctgagcgccaccatcctgtacgagatcctgctgggcaaggccaccctgtacgccgtgctggtgtctgccctggtgctgatggctatggtcaagcggaaggacagccgggga

SEQ ID NO: 3978 - DNA, 1860 bp, synthetic construct
  source 1..1860: mol_type = other DNA
atggccttaccagtgaccgccttgctcctgccgctggccttgctgctccacgccgccaggccggacgagatccagctggtgcagagcggagccgaagtgaagaagcctggcgagagcctgcggatcagctgcaagggcagcggcttcaacatcgaggactactacatccactgggtgcgccagatgcccggcaagggcctggaatggatgggcagaatcgaccccgagaacgacgagactaagtacggccccatcttccagggccacgtgaccatcagcgccgacaccagcatcaacaccgtgtacctccagtggtccagcctgaaggccagcgacaccgccatgtactactgcgcctttagaggcggcgtgtactggggccagggcaccacagtgacagtgtctagcctcgaggacctgaagaacgtgttcccacctgaggtggccgtgttcgagcctagcgaggccgagatcagccacacccagaaagccaccctcgtgtgcctggctaccggcttctaccccgaccatgtggaactgtcttggtgggtcaacggcaaagaggtgcacagcggcgtgtgtaccgacccccagccactgaaagaacagcccgccctgaacgacagccggtactgcctgagcagcagactgagagtgtccgccaccttctggcagaacccccggaaccacttcagatgccaggtgcagttctacggcctgagcgagaacgacgagtggacccaggacagagccaagcccgtgacccagatcgtgtctgccgaagcctggggcagagccgattgcgacgtgaagctggtggaaaagagcttcgagacagacaccaacctgaacttccagaacctgagcgtgatcggcttcagaatcctgctgctgaaagtggccggctttaacctgctgatgaccctgcggctgtggtccagcagggccaagcgatctggatctggagcaacaaacttctcactactcaaacaagcaggtgacgtggaggagaatcccgggcctactagtatggactggatttggcgcatccttttccttgtcggcgctgctaccggcgcgcattccttcgaagatgtcgtgatgacccagagccccgacagcctggctgtgtctctgggagagagagccaccatcaactgcaagtccagccagtccctgctggacagcgacggcaagacctacctgaactggctccagcagaagcccggccagccccccaagagactgatctccctggtgtccaagctggactccggcgtgcccgatagattttccggctctggcagcggcaccgacttcaccctgacaatcagctcccttcaggccgaggacgtggccgtgtactattgctggcagggcacacacttccccggcacctttggcggaggcaccaaggtggaaatcaagacgcgtatccagaaccctgatcctgccgtgtaccagctgcgggatagcaagagcagcgacaagagcgtgtgtctgttcaccgacttcgacagccagaccaacgtgtcccagagcaaggactccgacgtgtacatcaccgataagtgcgtgctggacatgcggagcatggacttcaagagcaactccgccgtggcctggtccaacaagtccgatttcgcctgcgccaacgccttcaacaacagcattatccccgaggacacattcttcccaagccccgagagcagctgcggctttaccagcgagagctaccagcagggcgtgctgagcgccaccatcctgtacgagatcctgctgggcaaggccaccctgtacgccgtgctggtgtctgccctggtgctgatggctatggtcaagcggaaggacagccgggga

SEQ ID NO: 3979 - DNA, 1881 bp, synthetic construct
  source 1..1881: mol_type = other DNA
atggccttaccagtgaccgccttgctcctgccgctggccttgctgctccacgccgccaggccggacgagcttgtgatgacccagagccccagcagcctgacagtgacagccggcgagaaagtgaccatgagctgcaagagcagccagagcctgctgaacagcggcaaccagaagaactacctgacctggtatcagcagaagcccggccagccccccaagctgctgatctactgggccagcaccagagaaagcggcgtgcccgatagattcaccggctctggcagcggcaccgacttcaccctgacaatcagcagcgtgcaggccgaggacctggccgtgtactactgccagaacgactacagctaccccctgaccttcggagccggcaccaagctggaaatcaagctcgaggacctgaagaacgtgttcccacctgaggtggccgtgttcgagcctagcgaggccgagatcagccacacccagaaagccaccctcgtgtgcctggctaccggcttctaccccgaccatgtggaactgtcttggtgggtcaacggcaaagaggtgcacagcggcgtgtgtaccgacccccagccactgaaagaacagcccgccctgaacgacagccggtactgcctgagcagcagactgagagtgtccgccaccttctggcagaacccccggaaccacttcagatgccaggtgcagttctacggcctgagcgagaacgacgagtggacccaggacagagccaagcccgtgacccagatcgtgtctgccgaagcctggggcagagccgattgcgacgtgaagctggtggaaaagagcttcgagacagacaccaacctgaacttccagaacctgagcgtgatcggcttcagaatcctgctgctgaaagtggccggctttaacctgctgatgaccctgcggctgtggtccagcagggccaagcgatctggatctggagcaacaaacttctcactactcaaacaagcaggtgacgtggaggagaatcccgggcctactagtatggactggatttggcgcatccttttccttgtcggcgctgctaccggcgcgcattccttcgaagaagtgcagctgctggaacagtctggcgccgaacttgtgcggcctggcaccagcgtgaagatcagctgtaaagccagcggctacgccttcaccaactactggctgggctgggtcaagcagaggcctggacacggcctggaatggatcggcgacatctttcccggctccggcaacatccactacaacgagaagttcaagggcaaggccaccctgaccgccgacaagtctagcagcaccgcctacatgcagctgtccagcctgacctttgaggacagcgccgtgtatttctgtgcccggctgcggaactgggacgagcccatggattattggggccagggcaccaccgtgaccgtgtctagtacgcgtatccagaaccctgatcctgccgtgtaccagctgcgggatagcaagagcagcgacaagagcgtgtgtctgttcaccgacttcgacagccagaccaacgtgtcccagagcaaggactccgacgtgtacatcaccgataagtgcgtgctggacatgcggagcatggacttcaagagcaactccgccgtggcctggtccaacaagtccgatttcgcctgcgccaacgccttcaacaacagcattatccccgaggacacattcttcccaagccccgagagcagctgcggctttaccagcgagagctaccagcagggcgtgctgagcgccaccatcctgtacgagatcctgctgggcaaggccaccctgtacgccgtgctggtgtctgccctggtgctgatggctatggtcaagcggaaggacagccgggga

SEQ ID NO: 3980 - DNA, 1884 bp, synthetic construct
  source 1..1884: mol_type = other DNA
atggccttaccagtgaccgccttgctcctgccgctggccttgctgctccacgccgccaggccggacgagctgcagatgacccagagccctagcagcctgtctgccagcgtgggcgacagagtgaccatcacctgtagagccagccagagcatcagcagctacctgaactggtatcagcagaagcccggccagccccccaaactgctgatctactgggccagcaccagagaaagcggcgtgcccgatagattcagcggcagcgagagcggcaccaactacaccctgaccatcagctccctgcagcccgaggacttcgccacctacttttgccagcagagcgacagcctgcccatcacctttggacagggcacccggctggacattcagctcgaggacctgaagaacgtgttcccacctgaggtggccgtgttcgagcctagcgaggccgagatcagccacacccagaaagccaccctcgtgtgcctggctaccggcttctaccccgaccatgtggaactgtcttggtgggtcaacggcaaagaggtgcacagcggcgtgtgtaccgacccccagccactgaaagaacagcccgccctgaacgacagccggtactgcctgagcagcagactgagagtgtccgccaccttctggcagaacccccggaaccacttcagatgccaggtgcagttctacggcctgagcgagaacgacgagtggacccaggacagagccaagcccgtgacccagatcgtgtctgccgaagcctggggcagagccgattgcgacgtgaagctggtggaaaagagcttcgagacagacaccaacctgaacttccagaacctgagcgtgatcggcttcagaatcctgctgctgaaagtggccggctttaacctgctgatgaccctgcggctgtggtccagcagggccaagcgatctggatctggagcaacaaacttctcactactcaaacaagcaggtgacgtggaggagaatcccgggcctactagtatggactggatttggcgcatccttttccttgtcggcgctgctaccggcgcgcattccttcgaagaggtgcaactgctggaatctgggggcggagtggtgcagcctggcagaagcctgagactgagctgtgccgccagcggcttcaccttcagctcctacggaatgcactgggtgcgccaggcccctggcaaaggactggaatgggtggccgtgatctcctacgacggcagcaacaagtactacgccgacagcgtgaagggccggttcaccatcagccgggacaacagcaagaacaccctgtacctgcagatgaacagcctgcgggccgaggacaccgccgtgtactactgcgccaaggatatgggctggggcagcggctggcggccttactactactacggcatggacgtgtggggccagggcaccaccgtgacagtgtcatctacgcgtatccagaaccctgatcctgccgtgtaccagctgcgggatagcaagagcagcgacaagagcgtgtgtctgttcaccgacttcgacagccagaccaacgtgtcccagagcaaggactccgacgtgtacatcaccgataagtgcgtgctggacatgcggagcatggacttcaagagcaactccgccgtggcctggtccaacaagtccgatttcgcctgcgccaacgccttcaacaacagcattatccccgaggacacattcttcccaagccccgagagcagctgcggctttaccagcgagagctaccagcagggcgtgctgagcgccaccatcctgtacgagatcctgctgggcaaggccaccctgtacgccgtgctggtgtctgccctggtgctgatggctatggtcaagcggaaggacagccgggga

SEQ ID NO: 3981 - DNA, 1875 bp, synthetic construct
  source 1..1875: mol_type = other DNA
atggccttaccagtgaccgccttgctcctgccgctggccttgctgctccacgccgccaggccggacgacatccaaatgacacagagtccttctagtttgagtgcgagcgtgggggacagggtgaccattacctgcagggccagccagagcataagctcataccttaattggtaccagcaaaaaccaggtaaggcccctaagctcctgatctacgcggcctcttcacttcaatctggggtcccttcccgcttcagtggctccggcagcggcaccgacttcacgctcactatatcaagtctgcagcctgaggatctcgccacctattactgtcaacaaagttattccacccctttcacctttggaccgggcacgaaagtggatattaagctcgaggacctgaagaacgtgttcccacctgaggtggccgtgttcgagcctagcgaggccgagatcagccacacccagaaagccaccctcgtgtgcctggctaccggcttctaccccgaccatgtggaactgtcttggtgggtcaacggcaaagaggtgcacagcggcgtgtgtaccgacccccagccactgaaagaacagcccgccctgaacgacagccggtactgcctgagcagcagactgagagtgtccgccaccttctggcagaacccccggaaccacttcagatgccaggtgcagttctacggcctgagcgagaacgacgagtggacccaggacagagccaagcccgtgacccagatcgtgtctgccgaagcctggggcagagccgattgcgacgtgaagctggtggaaaagagcttcgagacagacaccaacctgaacttccagaacctgagcgtgatcggcttcagaatcctgctgctgaaagtggccggctttaacctgctgatgaccctgcggctgtggtccagcagggccaagcgatctggatctggagcaacaaacttctcactactcaaacaagcaggtgacgtggaggagaatcccgggcctactagtatggactggatttggcgcatccttttccttgtcggcgctgctaccggcgcgcattccttcgaagtgcacgaggtccagcttgtgcagtccggggcagaggtcaagaagcctggttctagcgtaaaagtgagttgcaaagcctcaggtgggacattttcatcctacgcgatcagttgggttagacaggctcctggtcaagggctggaatggatgggcggaattattccaatcttcggaacagcgaattacgcgcagaagttccagggtagagtaaccatcactgctgacaagtccacctccaccgcatacatggaattgtctagtctccggagcgaggatacggcggtgtattattgtgctacgttcgccctgtttggcttccgcgaacaggctttcgacatctgggggcagggcacgacagtcacggttagtagtacgcgtatccagaaccctgatcctgccgtgtaccagctgcgggatagcaagagcagcgacaagagcgtgtgtctgttcaccgacttcgacagccagaccaacgtgtcccagagcaaggactccgacgtgtacatcaccgataagtgcgtgctggacatgcggagcatggacttcaagagcaactccgccgtggcctggtccaacaagtccgatttcgcctgcgccaacgccttcaacaacagcattatccccgaggacacattcttcccaagccccgagagcagctgcggctttaccagcgagagctaccagcagggcgtgctgagcgccaccatcctgtacgagatcctgctgggcaaggccaccctgtacgccgtgctggtgtctgccctggtgctgatggctatggtcaagcggaaggacagccgggga

SEQ ID NO: 3982 - DNA, 1869 bp, synthetic construct
  source 1..1869: mol_type = other DNA
atggccttaccagtgaccgccttgctcctgccgctggccttgctgctccacgccgccaggccggacatcgtgctgacccagagccctctgagcctggccgtgtctctgggacagcctgccatcatcagctgcaaggccagccagagcgtgtcctttgccggcacctctctgatgcactggtatcaccagaagcccggccagcagcccagactgctgatctacagagccagcaacctggaagccggcgtgcccgatagattttccggcagcggcagcaagaccgacttcaccctgaccatcagccccgtggaagccgaagatgccgccacctactactgccagcagagcagagagtacccctacaccttcggcggaggcaccaagctggaaatcaagaggctcgaggacctgaagaacgtgttcccacctgaggtggccgtgttcgagcctagcgaggccgagatcagccacacccagaaagccaccctcgtgtgcctggctaccggcttctaccccgaccatgtggaactgtcttggtgggtcaacggcaaagaggtgcacagcggcgtgtgtaccgacccccagccactgaaagaacagcccgccctgaacgacagccggtactgcctgagcagcagactgagagtgtccgccaccttctggcagaacccccggaaccacttcagatgccaggtgcagttctacggcctgagcgagaacgacgagtggacccaggacagagccaagcccgtgacccagatcgtgtctgccgaagcctggggcagagccgattgcgacgtgaagctggtggaaaagagcttcgagacagacaccaacctgaacttccagaacctgagcgtgatcggcttcagaatcctgctgctgaaagtggccggctttaacctgctgatgaccctgcggctgtggtccagcagggccaagcgatctggatctggagcaacaaacttctcactactcaaacaagcaggtgacgtggaggagaatcccgggcctactagtatggactggatttggcgcatccttttccttgtcggcgctgctaccggcgcgcattccttcgaacaggtccaactggtgcagagcggagccgaggtcgtgaagcctggcgcttccgtgaagattagctgcaaagccagcggctacacctttaccggctactttatgaactgggtcaagcagagccctggccagagcctggaatggatcggcagaatccacccctacgacggcgacaccttctacaaccagaagttccagggcaaggccaccctgacagtggacaagagcagcaacaccgcccacatggaactgctgagcctgaccagcgaggacttcgccgtgtactactgcaccagatacgacggcagccgggctatggactattggggccagggcaccaccgtgaccgtgtctagtacgcgtatccagaaccctgatcctgccgtgtaccagctgcgggatagcaagagcagcgacaagagcgtgtgtctgttcaccgacttcgacagccagaccaacgtgtcccagagcaaggactccgacgtgtacatcaccgataagtgcgtgctggacatgcggagcatggacttcaagagcaactccgccgtggcctggtccaacaagtccgatttcgcctgcgccaacgccttcaacaacagcattatccccgaggacacattcttcccaagccccgagagcagctgcggctttaccagcgagagctaccagcagggcgtgctgagcgccaccatcctgtacgagatcctgctgggcaaggccaccctgtacgccgtgctggtgtctgccctggtgctgatggctatggtcaagcggaaggacagccgggga

SEQ ID NO: 3983 - DNA, 1860 bp, synthetic construct
  source 1..1860: mol_type = other DNA
atggccttaccagtgaccgccttgctcctgccgctggccttgctgctccacgccgccaggccggacgacgttgtgatgacccagacccccctgagcctgcctgtgacacctggcgaacctgccagcatcagctgtcggagcagccagagcctggtgcacagaaacggcaacacctacctgcactggtatctccagaagcccggccagagccccaagctgctgatccacaaggtgtccaacagattcagcggcgtgcccgacagattctccggcagcggctctggcaccgacttcaccctgaagatcagccgggtggaagccgaggacctgggcgtgtacttctgtagccagagcacccatgtgccccccctgacatttggagccggcaccaagctggaactgaagctcgaggacctgaagaacgtgttcccacctgaggtggccgtgttcgagcctagcgaggccgagatcagccacacccagaaagccaccctcgtgtgcctggctaccggcttctaccccgaccatgtggaactgtcttggtgggtcaacggcaaagaggtgcacagcggcgtgtgtaccgacccccagccactgaaagaacagcccgccctgaacgacagccggtactgcctgagcagcagactgagagtgtccgccaccttctggcagaacccccggaaccacttcagatgccaggtgcagttctacggcctgagcgagaacgacgagtggacccaggacagagccaagcccgtgacccagatcgtgtctgccgaagcctggggcagagccgattgcgacgtgaagctggtggaaaagagcttcgagacagacaccaacctgaacttccagaacctgagcgtgatcggcttcagaatcctgctgctgaaagtggccggctttaacctgctgatgaccctgcggctgtggtccagcagggccaagcgatctggatctggagcaacaaacttctcactactcaaacaagcaggtgacgtggaggagaatcccgggcctactagtatggactggatttggcgcatccttttccttgtcggcgctgctaccggcgcgcattccttcgaagaagtgcagctggtgcagtctggcgctgaggtggaaaagcctggggccagcgtgaagattagctgcaaggccagcggcagcagcttcaccggctacaacatgaactgggtgcgccagaacatcggcaagagcctggaatggatcggagccatcgacccctactacggcggcaccagctacaaccagaagttcaagggcagagccaccctgaccgtggacaagagcaccagcaccgcctacatgcacctgaagtccctgcggagcgaggacaccgccgtgtactactgtgtgtccggcatggaatattggggccagggcaccagcgtgaccgtgtctagtacgcgtatccagaaccctgatcctgccgtgtaccagctgcgggatagcaagagcagcgacaagagcgtgtgtctgttcaccgacttcgacagccagaccaacgtgtcccagagcaaggactccgacgtgtacatcaccgataagtgcgtgctggacatgcggagcatggacttcaagagcaactccgccgtggcctggtccaacaagtccgatttcgcctgcgccaacgccttcaacaacagcattatccccgaggacacattcttcccaagccccgagagcagctgcggctttaccagcgagagctaccagcagggcgtgctgagcgccaccatcctgtacgagatcctgctgggcaaggccaccctgtacgccgtgctggtgtctgccctggtgctgatggctatggtcaagcggaaggacagccgggga

SEQ ID NO: 3984 - DNA, 1854 bp, synthetic construct
  source 1..1854: mol_type = other DNA
atggccttaccagtgaccgccttgctcctgccgctggccttgctgctccacgccgccaggccggacgagatcgtgatgacccagacccctgccaccctgtctgtgtctgccggcgagagagtgaccattacctgcaaggccagccagagcgtgtccaacgacgtgacctggtatcagcagaagcccggccaggcccccagactgctgatctacagcgccagcaacagatacagcggcgtgcccgccagattttccggcagcggctacggcaccgagttcaccttcaccatcagcagcgtgcagagcgaggacttcgccgtgtacttctgtcagcaagactacagcagcttcggccagggcaccaagctggaaatcaagaggctcgaggacctgaagaacgtgttcccacctgaggtggccgtgttcgagcctagcgaggccgagatcagccacacccagaaagccaccctcgtgtgcctggctaccggcttctaccccgaccatgtggaactgtcttggtgggtcaacggcaaagaggtgcacagcggcgtgtgtaccgacccccagccactgaaagaacagcccgccctgaacgacagccggtactgcctgagcagcagactgagagtgtccgccaccttctggcagaacccccggaaccacttcagatgccaggtgcagttctacggcctgagcgagaacgacgagtggacccaggacagagccaagcccgtgacccagatcgtgtctgccgaagcctggggcagagccgattgcgacgtgaagctggtggaaaagagcttcgagacagacaccaacctgaacttccagaacctgagcgtgatcggcttcagaatcctgctgctgaaagtggccggctttaacctgctgatgaccctgcggctgtggtccagcagggccaagcgatctggatctggagcaacaaacttctcactactcaaacaagcaggtgacgtggaggagaatcccgggcctactagtatggactggatttggcgcatccttttccttgtcggcgctgctaccggcgcgcattccttcgaacaggtgcagctggtggaatctggacctggcgtggtgcagcctggcagaagcctgagaatcagctgtgccgtgtccggcttcagcgtgaccaactacggcgtgcactgggtgcgccagccacctggaaaaggactggaatggctgggcgtgatctgggctggcggcatcaccaactacaacagcgccttcatgtcccggctgaccatctccaaggacaacagcaagaacaccgtgtacctccagatgaacagcctgcgggccgaggacaccgccatgtactactgtgcttccagaggcggccactacggctacgccctggattattggggccagggaaccctcgtgaccgtgtcctctacgcgtatccagaaccctgatcctgccgtgtaccagctgcgggatagcaagagcagcgacaagagcgtgtgtctgttcaccgacttcgacagccagaccaacgtgtcccagagcaaggactccgacgtgtacatcaccgataagtgcgtgctggacatgcggagcatggacttcaagagcaactccgccgtggcctggtccaacaagtccgatttcgcctgcgccaacgccttcaacaacagcattatccccgaggacacattcttcccaagccccgagagcagctgcggctttaccagcgagagctaccagcagggcgtgctgagcgccaccatcctgtacgagatcctgctgggcaaggccaccctgtacgccgtgctggtgtctgccctggtgctgatggctatggtcaagcggaaggacagccgggga

SEQ ID NO: 3985 - DNA, 1860 bp, synthetic construct
  source 1..1860: mol_type = other DNA
atggccttaccagtgaccgccttgctcctgccgctggccttgctgctccacgccgccaggccggacatccagatgacccagaccgccagcagcctgcctgcctctctgggcgacagagtgaccatctcctgtagcgccagccaggacatcagcaactacctgaactggtatcagcagaaacccgacggcaccgtgaagctgctgatcttctacagcagcaacctgcacagcggcgtgcccagcagattttctggcggcggaagcggcaccgactacagcctgaccatcagcaatctggaacccgaggacattgccacctacttttgccaccagtacagcaagctgccctggacctttggcggaggcaccaagctggaaatcaagagactcgaggacctgaagaacgtgttcccacctgaggtggccgtgttcgagcctagcgaggccgagatcagccacacccagaaagccaccctcgtgtgcctggctaccggcttctaccccgaccatgtggaactgtcttggtgggtcaacggcaaagaggtgcacagcggcgtgtgtaccgacccccagccactgaaagaacagcccgccctgaacgacagccggtactgcctgagcagcagactgagagtgtccgccaccttctggcagaacccccggaaccacttcagatgccaggtgcagttctacggcctgagcgagaacgacgagtggacccaggacagagccaagcccgtgacccagatcgtgtctgccgaagcctggggcagagccgattgcgacgtgaagctggtggaaaagagcttcgagacagacaccaacctgaacttccagaacctgagcgtgatcggcttcagaatcctgctgctgaaagtggccggctttaacctgctgatgaccctgcggctgtggtccagcagggccaagcgatctggatctggagcaacaaacttctcactactcaaacaagcaggtgacgtggaggagaatcccgggcctactagtatggactggatttggcgcatccttttccttgtcggcgctgctaccggcgcgcattccttcgaagaagtgaccctggtggaaagcggcggagacttcgtgaagcctggcggctctctgaaggtgtcctgtgccgccagcggcttcgcctttagccactacgccatgagctgggtgcgccagacccctgccaagagactggaatgggtggcctacatcagcagcggcggctccggcacctactactccgatagcgtgaagggccggttcaccatcagccgggacaacgccaagaacaccctgtacctccagatgcggagcctgcggagcgaggacagcgccatgtatttctgcaccagagtgaagctgggcacctattacttcgactcttggggccagggcaccaccctgaccgtgtcatctacgcgtatccagaaccctgatcctgccgtgtaccagctgcgggatagcaagagcagcgacaagagcgtgtgtctgttcaccgacttcgacagccagaccaacgtgtcccagagcaaggactccgacgtgtacatcaccgataagtgcgtgctggacatgcggagcatggacttcaagagcaactccgccgtggcctggtccaacaagtccgatttcgcctgcgccaacgccttcaacaacagcattatccccgaggacacattcttcccaagccccgagagcagctgcggctttaccagcgagagctaccagcagggcgtgctgagcgccaccatcctgtacgagatcctgctgggcaaggccaccctgtacgccgtgctggtgtctgccctggtgctgatggctatggtcaagcggaaggacagccgggga

SEQ ID NO: 3986 - DNA, 1866 bp, synthetic construct
  source 1..1866: mol_type = other DNA
atggccttaccagtgaccgccttgctcctgccgctggccttgctgctccacgccgccaggccgcagttcgtgctgacccagagcccttctgcctctgctgccctgggagcctctgccaagctgacctgtacactgagcagcgcccacaagacctacaccatcgactggtatcagcagcagaagggaaaggcccccagatacctgatccaagtgaagtccgacggcacctacacaaaggccaccggcgtgcccgatagattcagcggcagtagcagcggagccgatagatacctgattatccccagcgtgcaggccgacgacgaggccgattactactgcggcaccgattacaccggcggctacgtgttcggcggaggcacacaactgaccgtgacactcgaggacctgaagaacgtgttcccacctgaggtggccgtgttcgagcctagcgaggccgagatcagccacacccagaaagccaccctcgtgtgcctggctaccggcttctaccccgaccatgtggaactgtcttggtgggtcaacggcaaagaggtgcacagcggcgtgtgtaccgacccccagccactgaaagaacagcccgccctgaacgacagccggtactgcctgagcagcagactgagagtgtccgccaccttctggcagaacccccggaaccacttcagatgccaggtgcagttctacggcctgagcgagaacgacgagtggacccaggacagagccaagcccgtgacccagatcgtgtctgccgaagcctggggcagagccgattgcgacgtgaagctggtggaaaagagcttcgagacagacaccaacctgaacttccagaacctgagcgtgatcggcttcagaatcctgctgctgaaagtggccggctttaacctgctgatgaccctgcggctgtggtccagcagggccaagcgatctggatctggagcaacaaacttctcactactcaaacaagcaggtgacgtggaggagaatcccgggcctactagtatggactggatttggcgcatccttttccttgtcggcgctgctaccggcgcgcattccttcgaagagcaactgaaagagtctggcggcggactgttcaagcccaccgataccctgaccctgacctgcaccgtgtccggcttcagcctgagctactacggcgtgaactgggtgcgccaggcccctggcaatggcctggaatggatcggcacaatcggcggcagcggcgacacctactatgcctcttgggccaagtccagaagcaccatcatcagaaacaccaacgagaacaccgtgaccctgaagatgaccagcctgacagccgccgacaccgccacctacttttgcgtcagatacgccaacatcggctacgagtatttcaacgtgtggggacccggcaccctcgtgaccgtgtcatctacgcgtatccagaaccctgatcctgccgtgtaccagctgcgggatagcaagagcagcgacaagagcgtgtgtctgttcaccgacttcgacagccagaccaacgtgtcccagagcaaggactccgacgtgtacatcaccgataagtgcgtgctggacatgcggagcatggacttcaagagcaactccgccgtggcctggtccaacaagtccgatttcgcctgcgccaacgccttcaacaacagcattatccccgaggacacattcttcccaagccccgagagcagctgcggctttaccagcgagagctaccagcagggcgtgctgagcgccaccatcctgtacgagatcctgctgggcaaggccaccctgtacgccgtgctggtgtctgccctggtgctgatggctatggtcaagcggaaggacagccgggga

SEQ ID NO: 3987 - DNA, 1881 bp, synthetic construct
  source 1..1881: mol_type = other DNA
atggccttaccagtgaccgccttgctcctgccgctggccttgctgctccacgccgccaggccgcagttcgtgctgacccagagcccttctgtgtctgccgccctgggagcctctgccaagctgacctgtacactgagcagcgcccacaagacctacaccatcgactggtatcagcagcagcagggcgaggcccccagatacctgatgcaagtgaagtccgacggcagctacaccaagggcaccggcgtgcccgatagattcagcggcagtagcagcggagccgatagatacctgattatccccagcgtgcaggccgacgacgaggccggatatgtgtgcggcgctgacgacaatggcggctacgtgttcggcggaggcacccaactgacagtgacactcgaggacctgaagaacgtgttcccacctgaggtggccgtgttcgagcctagcgaggccgagatcagccacacccagaaagccaccctcgtgtgcctggctaccggcttctaccccgaccatgtggaactgtcttggtgggtcaacggcaaagaggtgcacagcggcgtgtgtaccgacccccagccactgaaagaacagcccgccctgaacgacagccggtactgcctgagcagcagactgagagtgtccgccaccttctggcagaacccccggaaccacttcagatgccaggtgcagttctacggcctgagcgagaacgacgagtggacccaggacagagccaagcccgtgacccagatcgtgtctgccgaagcctggggcagagccgattgcgacgtgaagctggtggaaaagagcttcgagacagacaccaacctgaacttccagaacctgagcgtgatcggcttcagaatcctgctgctgaaagtggccggctttaacctgctgatgaccctgcggctgtggtccagcagggccaagcgatctggatctggagcaacaaacttctcactactcaaacaagcaggtgacgtggaggagaatcccgggcctactagtatggactggatttggcgcatccttttccttgtcggcgctgctaccggcgcgcattccttcgaacagagcgtgaaagagtctgagggcggcctgttcaagcccaccgataccctgaccctgacctgcaccgtgtccggcttcagcctgagcagacacgccctgacatgggtgcgccaggcccctggaaatggcctggaatggatcggagccatcgacaacgccggcaccacctactatgcctcttgggccaagtccagaagcaccatcacccggaacaccgacctgcacaccgtgaccctgaagatgaccagcctgaccgccagcgacaccgccacctacttttgcgccagagtgttctacgacatcaacagcggctactacctggacggcatggacctgtggggacctggcacacttgtgaccgtgtccagcacgcgtatccagaaccctgatcctgccgtgtaccagctgcgggatagcaagagcagcgacaagagcgtgtgtctgttcaccgacttcgacagccagaccaacgtgtcccagagcaaggactccgacgtgtacatcaccgataagtgcgtgctggacatgcggagcatggacttcaagagcaactccgccgtggcctggtccaacaagtccgatttcgcctgcgccaacgccttcaacaacagcattatccccgaggacacattcttcccaagccccgagagcagctgcggctttaccagcgagagctaccagcagggcgtgctgagcgccaccatcctgtacgagatcctgctgggcaaggccaccctgtacgccgtgctggtgtctgccctggtgctgatggctatggtcaagcggaaggacagccgggga

SEQ ID NO: 3988 - DNA, 1863 bp, synthetic construct
  source 1..1863: mol_type = other DNA
atggccttaccagtgaccgccttgctcctgccgctggccttgctgctccacgccgccaggccggacatccagatgacccagagccccagcagcctgtctgccagcgtgggcgacagagtgaccatcacctgtagagccagccagggcatcagctcttggctggcctggtatcagcagaagcccgagaaggcccccaagagcctgatctacgccgcctctagtctccagagcggcgtgcccagcagattttctggcagcggctccggcaccgacttcaccctgacaatcagctccctccagcccgaggacttcgccacctactactgccagcagtacaacagctacccccccacctttggcggaggcaccaaggtggaaatcaagctcgaggacctgaagaacgtgttcccacctgaggtggccgtgttcgagcctagcgaggccgagatcagccacacccagaaagccaccctcgtgtgcctggctaccggcttctaccccgaccatgtggaactgtcttggtgggtcaacggcaaagaggtgcacagcggcgtgtgtaccgacccccagccactgaaagaacagcccgccctgaacgacagccggtactgcctgagcagcagactgagagtgtccgccaccttctggcagaacccccggaaccacttcagatgccaggtgcagttctacggcctgagcgagaacgacgagtggacccaggacagagccaagcccgtgacccagatcgtgtctgccgaagcctggggcagagccgattgcgacgtgaagctggtggaaaagagcttcgagacagacaccaacctgaacttccagaacctgagcgtgatcggcttcagaatcctgctgctgaaagtggccggctttaacctgctgatgaccctgcggctgtggtccagcagggccaagcgatctggatctggagcaacaaacttctcactactcaaacaagcaggtgacgtggaggagaatcccgggcctactagtatggactggatttggcgcatccttttccttgtcggcgctgctaccggcgcgcattccttcgaagaagtgcaactggtggaatcaggcggcggactggtgcagcctggcgagtctctgagactgagctgtgtggcctccggcttcaccttcagccggtacaagatgaactgggtgcgccaggcccctggcaagggactggaatgggtgtcctacatcagccgcagcggcagagacatctactacgccgacagcgtgaagggccggttcaccatcagcagagacaacgccaagaacagcctgtacctccagatgaactccctgcgggacgaggacaccgccgtgtactactgtgccggaaccgtgaccacctattactacttcggcatggacgtgtggggccacggcaccaccgtgacagtgtcatctacgcgtatccagaaccctgatcctgccgtgtaccagctgcgggatagcaagagcagcgacaagagcgtgtgtctgttcaccgacttcgacagccagaccaacgtgtcccagagcaaggactccgacgtgtacatcaccgataagtgcgtgctggacatgcggagcatggacttcaagagcaactccgccgtggcctggtccaacaagtccgatttcgcctgcgccaacgccttcaacaacagcattatccccgaggacacattcttcccaagccccgagagcagctgcggctttaccagcgagagctaccagcagggcgtgctgagcgccaccatcctgtacgagatcctgctgggcaaggccaccctgtacgccgtgctggtgtctgccctggtgctgatggctatggtcaagcggaaggacagccgggga

SEQ ID NO: 3989 - DNA, 1866 bp, synthetic construct
  source 1..1866: mol_type = other DNA
atggccttaccagtgaccgccttgctcctgccgctggccttgctgctccacgccgccaggccggacatccagatgacccagagccccagcagcctgtctgccagcgtgggcgacagagtgaccatcacctgtagagccagccagggcatcagctcttggctggcctggtatcagcagaagcccgagaaggcccccaagagcctgatctacgccgcctctagtctccagagcggcgtgcccagcagattttctggcagcggctccggcaccgacttcaccctgacaatcagctccctccagcccgaggacttcgccacctactactgccagcagtacaacagctaccctcccacctttggcggaggcaccaaggtggaaatcaagctcgaggacctgaagaacgtgttcccacctgaggtggccgtgttcgagcctagcgaggccgagatcagccacacccagaaagccaccctcgtgtgcctggctaccggcttctaccccgaccatgtggaactgtcttggtgggtcaacggcaaagaggtgcacagcggcgtgtgtaccgacccccagccactgaaagaacagcccgccctgaacgacagccggtactgcctgagcagcagactgagagtgtccgccaccttctggcagaacccccggaaccacttcagatgccaggtgcagttctacggcctgagcgagaacgacgagtggacccaggacagagccaagcccgtgacccagatcgtgtctgccgaagcctggggcagagccgattgcgacgtgaagctggtggaaaagagcttcgagacagacaccaacctgaacttccagaacctgagcgtgatcggcttcagaatcctgctgctgaaagtggccggctttaacctgctgatgaccctgcggctgtggtccagcagggccaagcgatctggatctggagcaacaaacttctcactactcaaacaagcaggtgacgtggaggagaatcccgggcctactagtatggactggatttggcgcatccttttccttgtcggcgctgctaccggcgcgcattccttcgaagaagtgcaactggtggaatccgggggaggctctgtgcagcctggcgagtctctgagactgagctgtgtggcctccggcttcaccttcagccggtacaagatgaactgggtgcgccaggcccctggcaagggactggaatgggtgtcctacatcagccgcagcggcagagacatctactacgccgacagcgtgaagggccggttcaccatcagcagagacaacgccaagaacagcctgtacctccagatgaactccctgcgggacgaggacaccgccgtgtactactgtgccggaaccgtgaccacctattactacgacttcggcatggacgtgtggggccagggcacaaccgtgacagtgtctagcacgcgtatccagaaccctgatcctgccgtgtaccagctgcgggatagcaagagcagcgacaagagcgtgtgtctgttcaccgacttcgacagccagaccaacgtgtcccagagcaaggactccgacgtgtacatcaccgataagtgcgtgctggacatgcggagcatggacttcaagagcaactccgccgtggcctggtccaacaagtccgatttcgcctgcgccaacgccttcaacaacagcattatccccgaggacacattcttcccaagccccgagagcagctgcggctttaccagcgagagctaccagcagggcgtgctgagcgccaccatcctgtacgagatcctgctgggcaaggccaccctgtacgccgtgctggtgtctgccctggtgctgatggctatggtcaagcggaaggacagccgggga

SEQ ID NO: 3990 - DNA, 1860 bp, synthetic construct
  source 1..1860: mol_type = other DNA
atggccttaccagtgaccgccttgctcctgccgctggccttgctgctccacgccgccaggccgcagtctgtgctgacacagcctccatctgcctctggcacacctggacagagagtgaccatcagctgtagcggcagcagaagcaacgtcggcggcaactacgtgttctggtatcagcaggtcccaggcgctacccctaagctgctgatctacagaagcaatcagcggcctagcggcgtgcccgatagatttgccggaagcaagagcggcagctctgccagccttgccatctctggactgagaagcgaggacgaggccgactactactgtgccacctgggatgatagcctgagcggcttcgtgtttggcaccggcaccaaagtgacagtgcttggtctcgaggacctgaagaacgtgttcccacctgaggtggccgtgttcgagcctagcgaggccgagatcagccacacccagaaagccaccctcgtgtgcctggctaccggcttctaccccgaccatgtggaactgtcttggtgggtcaacggcaaagaggtgcacagcggcgtgtgtaccgacccccagccactgaaagaacagcccgccctgaacgacagccggtactgcctgagcagcagactgagagtgtccgccaccttctggcagaacccccggaaccacttcagatgccaggtgcagttctacggcctgagcgagaacgacgagtggacccaggacagagccaagcccgtgacccagatcgtgtctgccgaagcctggggcagagccgattgcgacgtgaagctggtggaaaagagcttcgagacagacaccaacctgaacttccagaacctgagcgtgatcggcttcagaatcctgctgctgaaagtggccggctttaacctgctgatgaccctgcggctgtggtccagcagggccaagcgatctggatctggagcaacaaacttctcactactcaaacaagcaggtgacgtggaggagaatcccgggcctactagtatggactggatttggcgcatccttttccttgtcggcgctgctaccggcgcgcattccttcgaagttcagctggttgaatctggcggcggactggttaagcctggcggatctctgagactgtcttgtgccgccagcggcttcaccttcagcgattactacatgagctggatcagacaggcccctggcaaaggactggaatgggtgtcctacatcagcagcagcggctccaccatctactacgccgatagcgtgaagggcagattcaccatcagccgggacaacgccaagaacagcctgtacctccagatgaactccctgagagccgaggacaccgccgtgtactattgcgccagaggctacggcaaagcctacgatcaatggggccagggcacactggtcaccgtttcttctacgcgtatccagaaccctgatcctgccgtgtaccagctgcgggatagcaagagcagcgacaagagcgtgtgtctgttcaccgacttcgacagccagaccaacgtgtcccagagcaaggactccgacgtgtacatcaccgataagtgcgtgctggacatgcggagcatggacttcaagagcaactccgccgtggcctggtccaacaagtccgatttcgcctgcgccaacgccttcaacaacagcattatccccgaggacacattcttcccaagccccgagagcagctgcggctttaccagcgagagctaccagcagggcgtgctgagcgccaccatcctgtacgagatcctgctgggcaaggccaccctgtacgccgtgctggtgtctgccctggtgctgatggctatggtcaagcggaaggacagccgggga

SEQ ID NO: 3991 - DNA, 1857 bp, synthetic construct
  source 1..1857: mol_type = other DNA
atggccttaccagtgaccgccttgctcctgccgctggccttgctgctccacgccgccaggccgcagtctgtggtcacacagccacctagcatgtctgccgctccaggccagcaagtgaccatctcttgtagcggcggcaacagcaacatcgagcggaactacgtgtcctggtatctgcaactgcctggcacagcccctaagctggtcatcttcgacaacgacagacggcccagcggcatccccgatagattttctggcagcaagagcggcaccagcgccacactgggaattaccggacttcagacaggcgacgaggccgactactactgtggcacatgggactctagcctgagaggctgggttttcggcggaggcacaaagctgacagtgcttggtctcgaggacctgaagaacgtgttcccacctgaggtggccgtgttcgagcctagcgaggccgagatcagccacacccagaaagccaccctcgtgtgcctggctaccggcttctaccccgaccatgtggaactgtcttggtgggtcaacggcaaagaggtgcacagcggcgtgtgtaccgacccccagccactgaaagaacagcccgccctgaacgacagccggtactgcctgagcagcagactgagagtgtccgccaccttctggcagaacccccggaaccacttcagatgccaggtgcagttctacggcctgagcgagaacgacgagtggacccaggacagagccaagcccgtgacccagatcgtgtctgccgaagcctggggcagagccgattgcgacgtgaagctggtggaaaagagcttcgagacagacaccaacctgaacttccagaacctgagcgtgatcggcttcagaatcctgctgctgaaagtggccggctttaacctgctgatgaccctgcggctgtggtccagcagggccaagcgatctggatctggagcaacaaacttctcactactcaaacaagcaggtgacgtggaggagaatcccgggcctactagtatggactggatttggcgcatccttttccttgtcggcgctgctaccggcgcgcattccttcgaagtgcagctcgttgagtctggcggcggactgattcaacctggcggaagcctgagactgagctgtgccgcttccggcttcaccttcagcaactacgccatgaactgggttcgacaggcccctggcaaaggactggaatgggtgtccaccatcaacggcagaggcagcagcaccatctacgccgattctgtgaagggcagattcaccatcagccgggacaacagcaagaacaccctgtacctccagatgaactccctgagagccgaggacaccgccacctattactgtgcccggtacatcagcagaggactgggcgattcttggggccagggcacactggttacagtgacgcgtatccagaaccctgatcctgccgtgtaccagctgcgggatagcaagagcagcgacaagagcgtgtgtctgttcaccgacttcgacagccagaccaacgtgtcccagagcaaggactccgacgtgtacatcaccgataagtgcgtgctggacatgcggagcatggacttcaagagcaactccgccgtggcctggtccaacaagtccgatttcgcctgcgccaacgccttcaacaacagcattatccccgaggacacattcttcccaagccccgagagcagctgcggctttaccagcgagagctaccagcagggcgtgctgagcgccaccatcctgtacgagatcctgctgggcaaggccaccctgtacgccgtgctggtgtctgccctggtgctgatggctatggtcaagcggaaggacagccgggga

SEQ ID NO: 3992 - DNA, 1860 bp, synthetic construct
  source 1..1860: mol_type = other DNA
atggccttaccagtgaccgccttgctcctgccgctggccttgctgctccacgccgccaggccggacgtcgtgatgacccagacccctctgagcctgcctgtgtccctgggcgatcaggccagcatcagctgtagaagcagccagagcctggtgcacagcaacggcaacacctacctgcactggtatctccagaagcccggccagagccccaagctgctgatctacaaggtgtccaacagattcagcggcgtgcccgacagattctccggcagcggctctggcaccgacttcaccctgaagatcagccgggtggaagccgaggacctgggcgtgtacttctgtagccagaacacccccgtgccccccaagtttggcagcggcaccaagctggaaatcaagctcgaggacctgaagaacgtgttcccacctgaggtggccgtgttcgagcctagcgaggccgagatcagccacacccagaaagccaccctcgtgtgcctggctaccggcttctaccccgaccatgtggaactgtcttggtgggtcaacggcaaagaggtgcacagcggcgtgtgtaccgacccccagccactgaaagaacagcccgccctgaacgacagccggtactgcctgagcagcagactgagagtgtccgccaccttctggcagaacccccggaaccacttcagatgccaggtgcagttctacggcctgagcgagaacgacgagtggacccaggacagagccaagcccgtgacccagatcgtgtctgccgaagcctggggcagagccgattgcgacgtgaagctggtggaaaagagcttcgagacagacaccaacctgaacttccagaacctgagcgtgatcggcttcagaatcctgctgctgaaagtggccggctttaacctgctgatgaccctgcggctgtggtccagcagggccaagcgatctggatctggagcaacaaacttctcactactcaaacaagcaggtgacgtggaggagaatcccgggcctactagtatggactggatttggcgcatccttttccttgtcggcgctgctaccggcgcgcattccttcgaacaggtgcagctccagcagtctggcgctgaactcgtgcggcctggcgcttctgtgaagctgtcttgcaaggccagcggctacaccttcaacgactacgagatgcactgggtcaagcagacccctgtgcacggcctgaagtggatcggagccctggaacccaagaccggcgataccgcctacagccagaagttcaagggcaaggccaccctgaccgccgacaagagcagcagcacagcctacatggaactgcggagcctgaccagcgaggacagcgccgtgtactactgcaccagctgctactactacacctacagcggccagggcaccctcgtgacagtgtctgctacgcgtatccagaaccctgatcctgccgtgtaccagctgcgggatagcaagagcagcgacaagagcgtgtgtctgttcaccgacttcgacagccagaccaacgtgtcccagagcaaggactccgacgtgtacatcaccgataagtgcgtgctggacatgcggagcatggacttcaagagcaactccgccgtggcctggtccaacaagtccgatttcgcctgcgccaacgccttcaacaacagcattatccccgaggacacattcttcccaagccccgagagcagctgcggctttaccagcgagagctaccagcagggcgtgctgagcgccaccatcctgtacgagatcctgctgggcaaggccaccctgtacgccgtgctggtgtctgccctggtgctgatggctatggtcaagcggaaggacagccgggga

SEQ ID NO: 3993 - DNA, 1857 bp, synthetic construct
  source 1..1857: mol_type = other DNA
atggccttaccagtgaccgccttgctcctgccgctggccttgctgctccacgccgccaggccggacatccaactgacccagagccccagcagcctgtctgcctctgtgggcgacagagtgaccatcacctgtagagccagccagggcatcagaaacgacctgggctggtatcagcagaagcccggcaaggcccccaagcggctgatctatgctgccagctccctccagaatggcgtgcccagcagattttccggcagcggctctggcaccgagttcaccctgaccatcagctccctccagcccgaggacttcgccacctactactgcctccagcacaacacctaccccgccttcggccagggcaccaaggtggaaatcaagagactcgaggacctgaagaacgtgttcccacctgaggtggccgtgttcgagcctagcgaggccgagatcagccacacccagaaagccaccctcgtgtgcctggctaccggcttctaccccgaccatgtggaactgtcttggtgggtcaacggcaaagaggtgcacagcggcgtgtgtaccgacccccagccactgaaagaacagcccgccctgaacgacagccggtactgcctgagcagcagactgagagtgtccgccaccttctggcagaacccccggaaccacttcagatgccaggtgcagttctacggcctgagcgagaacgacgagtggacccaggacagagccaagcccgtgacccagatcgtgtctgccgaagcctggggcagagccgattgcgacgtgaagctggtggaaaagagcttcgagacagacaccaacctgaacttccagaacctgagcgtgatcggcttcagaatcctgctgctgaaagtggccggctttaacctgctgatgaccctgcggctgtggtccagcagggccaagcgatctggatctggagcaacaaacttctcactactcaaacaagcaggtgacgtggaggagaatcccgggcctactagtatggactggatttggcgcatccttttccttgtcggcgctgctaccggcgcgcattccttcgaacaggtgcaactccaggaatctggccctggcctcgtgaagcctagccagaccctgagcctgacctgtaccgtgtctggcggcagcatcagcagcttcaactactactggtcctggatcagacaccaccctggcaagggcctggaatggatcggctacatctactacagcggcagcacctacagcaaccccagcctgaagtcccgcgtgaccatctccgtggacaccagcaagaaccagtttagcctgaccctgtccagcgtgacagccgccgataccgccgtgtactactgcgccagaggctacaactggaactacttcgactactggggccagggaaccctcgtgaccgtgtctagtacgcgtatccagaaccctgatcctgccgtgtaccagctgcgggatagcaagagcagcgacaagagcgtgtgtctgttcaccgacttcgacagccagaccaacgtgtcccagagcaaggactccgacgtgtacatcaccgataagtgcgtgctggacatgcggagcatggacttcaagagcaactccgccgtggcctggtccaacaagtccgatttcgcctgcgccaacgccttcaacaacagcattatccccgaggacacattcttcccaagccccgagagcagctgcggctttaccagcgagagctaccagcagggcgtgctgagcgccaccatcctgtacgagatcctgctgggcaaggccaccctgtacgccgtgctggtgtctgccctggtgctgatggctatggtcaagcggaaggacagccgggga

SEQ ID NO: 3994 - DNA, 1863 bp, synthetic construct
  source 1..1863: mol_type = other DNA
atggccttaccagtgaccgccttgctcctgccgctggccttgctgctccacgccgccaggccggacgacatcgtgctgacccagagccccgccagcctggccgtgagcctgggccagagcgtgaccatcagctgcagagccagcgagagcgtggagtactacggcaccagcctgatgcagtggtaccagcagaagcccggccagccccccaagctgctgatctacgccaccagcaacgtggagagcggcgtgcccgccagattcagcggcagcggcagcggcaccgacttcagcctgaacatccaccccgtggaggaggacgacatcgccatgtacttctgccagcagagcagaaagctgcccagcaccttcggcggcggcaccaagctggagatcaagctcgaggacctgaagaacgtgttcccacctgaggtggccgtgttcgagcctagcgaggccgagatcagccacacccagaaagccaccctcgtgtgcctggctaccggcttctaccccgaccatgtggaactgtcttggtgggtcaacggcaaagaggtgcacagcggcgtgtgtaccgacccccagccactgaaagaacagcccgccctgaacgacagccggtactgcctgagcagcagactgagagtgtccgccaccttctggcagaacccccggaaccacttcagatgccaggtgcagttctacggcctgagcgagaacgacgagtggacccaggacagagccaagcccgtgacccagatcgtgtctgccgaagcctggggcagagccgattgcgacgtgaagctggtggaaaagagcttcgagacagacaccaacctgaacttccagaacctgagcgtgatcggcttcagaatcctgctgctgaaagtggccggctttaacctgctgatgaccctgcggctgtggtccagcagggccaagcgatctggatctggagcaacaaacttctcactactcaaacaagcaggtgacgtggaggagaatcccgggcctactagtatggactggatttggcgcatccttttccttgtcggcgctgctaccggcgcgcattccttcgaagacgtgagactgcaggagagcggccccggccaggtgaagcccagccagaccgtgagcctgacctgcagcgtgaccggctacagcatcaccaacggcaaccactggtggaactggatcagacaggtgagcggcagcaagctggagtggatcggctacatcagcagcagcggcagcaccgacagcaaccccagcctgaagagcagaatcagcatcaccagagacaccagcaagaaccagctgttcctgcagctgaacagcgtgaccaccgaggacatcgccacctactactgcgccagaggctactacttcgactactggggccagggcaccaccctgaccgtgagcagcacgcgtatccagaaccctgatcctgccgtgtaccagctgcgggatagcaagagcagcgacaagagcgtgtgtctgttcaccgacttcgacagccagaccaacgtgtcccagagcaaggactccgacgtgtacatcaccgataagtgcgtgctggacatgcggagcatggacttcaagagcaactccgccgtggcctggtccaacaagtccgatttcgcctgcgccaacgccttcaacaacagcattatccccgaggacacattcttcccaagccccgagagcagctgcggctttaccagcgagagctaccagcagggcgtgctgagcgccaccatcctgtacgagatcctgctgggcaaggccaccctgtacgccgtgctggtgtctgccctggtgctgatggctatggtcaagcggaaggacagccgggga

SEQ ID NO: 3995 - DNA, 1860 bp, synthetic construct
  source 1..1860: mol_type = other DNA
atggccttaccagtgaccgccttgctcctgccgctggccttgctgctccacgccgccaggccggacatccagatgacccagagccccagcagcctgtctgccagcgtgggcgacagagtgaccatcacctgtagagccagccaggacgtgaacaccgccgtggcctggtatcagcagaagcctggcaaggcccccaagctgctgatctacagcgccagcttcctggaaagcggcgtgcccagcagattcagcggaagcagaagcggcaccgacttcaccctgaccatcagctccctccagcccgaggacttcgccacctactactgccagcagcactacaccacccctcccaccttcggccagaccaaggtggaaatcaagagactcgaggacctgaagaacgtgttcccacctgaggtggccgtgttcgagcctagcgaggccgagatcagccacacccagaaagccaccctcgtgtgcctggctaccggcttctaccccgaccatgtggaactgtcttggtgggtcaacggcaaagaggtgcacagcggcgtgtgtaccgacccccagccactgaaagaacagcccgccctgaacgacagccggtactgcctgagcagcagactgagagtgtccgccaccttctggcagaacccccggaaccacttcagatgccaggtgcagttctacggcctgagcgagaacgacgagtggacccaggacagagccaagcccgtgacccagatcgtgtctgccgaagcctggggcagagccgattgcgacgtgaagctggtggaaaagagcttcgagacagacaccaacctgaacttccagaacctgagcgtgatcggcttcagaatcctgctgctgaaagtggccggctttaacctgctgatgaccctgcggctgtggtccagcagggccaagcgatctggatctggagcaacaaacttctcactactcaaacaagcaggtgacgtggaggagaatcccgggcctactagtatggactggatttggcgcatccttttccttgtcggcgctgctaccggcgcgcattccttcgaagaagtgcaactggtggaatctggcggcggactggtgcagcctggcggatctctgagactgagctgtgccgccagcggcttcaacatcaaggacacctacatccactgggtgcgccaggcccctggaaagggactggaatgggtggcccggatctaccccaccaacggctacaccagatacgccgacagcgtgaagggccggttcaccatcagcgccgacaccagcaagaataccgcctacctccagatgaacagcctgcgggccgaggataccgccgtgtactactgctcaagatggggaggcgacggcttctacgctatggacgtgtggggccagggcacccttgtgaccgtgtcatctacgcgtatccagaaccctgatcctgccgtgtaccagctgcgggatagcaagagcagcgacaagagcgtgtgtctgttcaccgacttcgacagccagaccaacgtgtcccagagcaaggactccgacgtgtacatcaccgataagtgcgtgctggacatgcggagcatggacttcaagagcaactccgccgtggcctggtccaacaagtccgatttcgcctgcgccaacgccttcaacaacagcattatccccgaggacacattcttcccaagccccgagagcagctgcggctttaccagcgagagctaccagcagggcgtgctgagcgccaccatcctgtacgagatcctgctgggcaaggccaccctgtacgccgtgctggtgtctgccctggtgctgatggctatggtcaagcggaaggacagccgggga

SEQ ID NO: 3996 - DNA, 1857 bp, synthetic construct
  source 1..1857: mol_type = other DNA
atggccttaccagtgaccgccttgctcctgccgctggccttgctgctccacgccgccaggccggaccagagcgtgctgacacagcctcctagcgtgtcagtggcccctggcaagaccgccagaatcccctgcgagggcaactacatcggcagcagcaacgtgcactggtatcagcagaagcccggccaggctcccgtgctcgtgatccacttcgacagcgacagacccagcggcatccccgacagattcagcggcagcaacagcggcaacatggctaccctgaccatcagcagagtggaagccggggacgaggccgactactactgtcaagtgtgggagaaccacggctgggtgttcggcggaggcaccaagctgacagtgctgtctctcgaggacctgaagaacgtgttcccacctgaggtggccgtgttcgagcctagcgaggccgagatcagccacacccagaaagccaccctcgtgtgcctggctaccggcttctaccccgaccatgtggaactgtcttggtgggtcaacggcaaagaggtgcacagcggcgtgtgtaccgacccccagccactgaaagaacagcccgccctgaacgacagccggtactgcctgagcagcagactgagagtgtccgccaccttctggcagaacccccggaaccacttcagatgccaggtgcagttctacggcctgagcgagaacgacgagtggacccaggacagagccaagcccgtgacccagatcgtgtctgccgaagcctggggcagagccgattgcgacgtgaagctggtggaaaagagcttcgagacagacaccaacctgaacttccagaacctgagcgtgatcggcttcagaatcctgctgctgaaagtggccggctttaacctgctgatgaccctgcggctgtggtccagcagggccaagcgatctggatctggagcaacaaacttctcactactcaaacaagcaggtgacgtggaggagaatcccgggcctactagtatggactggatttggcgcatccttttccttgtcggcgctgctaccggcgcgcattccttcgaagaggtgcaactggtggaaacaggcggcggactggtgcagcctggcgagtctctgagactgagctgtgccgccagcggcttcaccttcagcgactacgagatgaactgggtgcgccaggcccctggaaagggcctggaatgggtgtcctacatcagcagctccggcagcaccatctactacgccgacagcgtgaagggccggtttaccatctaccgggacaacgccaagaacagcctgtacctccagatgaactccctgcgggccgaggacaccgccctgtactattgtgccagagcctggggcgtgggaccccctgattattggggacagggcaccctcgtgaccgtgtcctctacgcgtatccagaaccctgatcctgccgtgtaccagctgcgggatagcaagagcagcgacaagagcgtgtgtctgttcaccgacttcgacagccagaccaacgtgtcccagagcaaggactccgacgtgtacatcaccgataagtgcgtgctggacatgcggagcatggacttcaagagcaactccgccgtggcctggtccaacaagtccgatttcgcctgcgccaacgccttcaacaacagcattatccccgaggacacattcttcccaagccccgagagcagctgcggctttaccagcgagagctaccagcagggcgtgctgagcgccaccatcctgtacgagatcctgctgggcaaggccaccctgtacgccgtgctggtgtctgccctggtgctgatggctatggtcaagcggaaggacagccgggga

SEQ ID NO: 3997 - DNA, 1881 bp, synthetic construct
  source 1..1881: mol_type = other DNA
atggccttaccagtgaccgccttgctcctgccgctggccttgctgctccacgccgccaggccggacatccagatgacccagagccccagcagcctgtctgccagcgtgggcgataccgtgaccatcacctgtcaggccaacggctacctgaactggtatcagcagcggagaggcaaggcccccaagctgctgatctacgacggcagcaagctggaaagaggcgtgcccagcagattcagcggcagaagatggggccaggagtacaacctgaccatcaacaacctccagcccgaggatattgccacatacttttgccaggtgtacgagttcgtggtgcccggcacacggctggacctgaagagaacagtggctgctcctctcgaggacctgaagaacgtgttcccacctgaggtggccgtgttcgagcctagcgaggccgagatcagccacacccagaaagccaccctcgtgtgcctggctaccggcttctaccccgaccatgtggaactgtcttggtgggtcaacggcaaagaggtgcacagcggcgtgtgtaccgacccccagccactgaaagaacagcccgccctgaacgacagccggtactgcctgagcagcagactgagagtgtccgccaccttctggcagaacccccggaaccacttcagatgccaggtgcagttctacggcctgagcgagaacgacgagtggacccaggacagagccaagcccgtgacccagatcgtgtctgccgaagcctggggcagagccgattgcgacgtgaagctggtggaaaagagcttcgagacagacaccaacctgaacttccagaacctgagcgtgatcggcttcagaatcctgctgctgaaagtggccggctttaacctgctgatgaccctgcggctgtggtccagcagggccaagcgatctggatctggagcaacaaacttctcactactcaaacaagcaggtgacgtggaggagaatcccgggcctactagtatggactggatttggcgcatccttttccttgtcggcgctgctaccggcgcgcattccttcgaacaggtgcagctgctccagtctggcgctgccgtgacaaagcctggcgcttctgtgcgggtgtcctgtgaagccagcggctacaacatccgggactacttcatccactggtggcggcaggctccaggccagggactccagtgggtgggatggatcaaccccaagaccggccagcccaacaaccccagacagttccagggcagagtgtccctgaccagacacgccagctgggacttcgacaccttcagcttctacatggatctgaaggccctgcggagcgacgataccgccgtgtacttctgcgccagacagagaagcgactactgggatttcgacgtgtggggcagcggcacccaagtgacagtgtctagcgccagcaccaagggacccacgcgtatccagaaccctgatcctgccgtgtaccagctgcgggatagcaagagcagcgacaagagcgtgtgtctgttcaccgacttcgacagccagaccaacgtgtcccagagcaaggactccgacgtgtacatcaccgataagtgcgtgctggacatgcggagcatggacttcaagagcaactccgccgtggcctggtccaacaagtccgatttcgcctgcgccaacgccttcaacaacagcattatccccgaggacacattcttcccaagccccgagagcagctgcggctttaccagcgagagctaccagcagggcgtgctgagcgccaccatcctgtacgagatcctgctgggcaaggccaccctgtacgccgtgctggtgtctgccctggtgctgatggctatggtcaagcggaaggacagccgggga

SEQ ID NO: 3998 - DNA, 1899 bp, synthetic construct
  source 1..1899: mol_type = other DNA
atggccttaccagtgaccgccttgctcctgccgctggccttgctgctccacgccgccaggccgcagtctgccctgacacagcctcctagcgcctctggctctcccggccagagcatcaccatcagctgtaccggcaccagcaacaacttcgtgtcctggtatcagcagcacgccggcaaggcccccaagctcgtgatctacgacgtgaacaagcggcccagcggcgtgcccgatagattcagcggcagcaagagcggcaacaccgccagcctgacagtgtctggcctccagaccgatgacgaggccgtgtactactgcggcagcctcgtgggcaactgggacgtgatctttggcggaggcaccaagctgaccgtgctgctcgaggacctgaagaacgtgttcccacctgaggtggccgtgttcgagcctagcgaggccgagatcagccacacccagaaagccaccctcgtgtgcctggctaccggcttctaccccgaccatgtggaactgtcttggtgggtcaacggcaaagaggtgcacagcggcgtgtgtaccgacccccagccactgaaagaacagcccgccctgaacgacagccggtactgcctgagcagcagactgagagtgtccgccaccttctggcagaacccccggaaccacttcagatgccaggtgcagttctacggcctgagcgagaacgacgagtggacccaggacagagccaagcccgtgacccagatcgtgtctgccgaagcctggggcagagccgattgcgacgtgaagctggtggaaaagagcttcgagacagacaccaacctgaacttccagaacctgagcgtgatcggcttcagaatcctgctgctgaaagtggccggctttaacctgctgatgaccctgcggctgtggtccagcagggccaagcgatctggatctggagcaacaaacttctcactactcaaacaagcaggtgacgtggaggagaatcccgggcctactagtatggactggatttggcgcatccttttccttgtcggcgctgctaccggcgcgcattccttcgaacagccccagctccaggaatctggccccacactggtggaagccagcgagacactgagcctgacctgtgccgtgtccggcgattctaccgccgcctgcaatagcttctggggctgggtgcgccagcctcctggaaagggactggaatgggtgggaagcctgagccactgcgccagctattggaaccggggctggacctaccacaaccccagcctgaagtccagactgaccctggccctggacacccccaagaacctggtgttcctgaagctgaacagcgtgacagccgccgacaccgccacctactactgtgccagatttggcggcgaggtgctgcggtacaccgactggcctaaacctgcctgggtggacctgtggggcagaggaacactcgtgaccgtgtccagcacgcgtatccagaaccctgatcctgccgtgtaccagctgcgggatagcaagagcagcgacaagagcgtgtgtctgttcaccgacttcgacagccagaccaacgtgtcccagagcaaggactccgacgtgtacatcaccgataagtgcgtgctggacatgcggagcatggacttcaagagcaactccgccgtggcctggtccaacaagtccgatttcgcctgcgccaacgccttcaacaacagcattatccccgaggacacattcttcccaagccccgagagcagctgcggctttaccagcgagagctaccagcagggcgtgctgagcgccaccatcctgtacgagatcctgctgggcaaggccaccctgtacgccgtgctggtgtctgccctggtgctgatggctatggtcaagcggaaggacagccgggga

SEQ ID NO: 3999 - DNA, 1854 bp, synthetic construct
  source 1..1854: mol_type = other DNA
atggccttaccagtgaccgccttgctcctgccgctggccttgctgctccacgccgccaggccggagatcgtgctgacacagagccctggcaccctgagcctgtctccaggcgagacagccatcatcagctgccggacaagccagtacggcagcctggcctggtatcagcagaggccaggacaggcccccagactcgtgatctacagcggcagcacaagagccgccggaatccccgatagattcagcggctccagatggggacccgactacaacctgaccatcagcaacctggaaagcggcgacttcggcgtgtactactgccagcagtacgagttcttcggccagggcaccaaggtgcaggtggacatcaaaagactcgaggacctgaagaacgtgttcccacctgaggtggccgtgttcgagcctagcgaggccgagatcagccacacccagaaagccaccctcgtgtgcctggctaccggcttctaccccgaccatgtggaactgtcttggtgggtcaacggcaaagaggtgcacagcggcgtgtgtaccgacccccagccactgaaagaacagcccgccctgaacgacagccggtactgcctgagcagcagactgagagtgtccgccaccttctggcagaacccccggaaccacttcagatgccaggtgcagttctacggcctgagcgagaacgacgagtggacccaggacagagccaagcccgtgacccagatcgtgtctgccgaagcctggggcagagccgattgcgacgtgaagctggtggaaaagagcttcgagacagacaccaacctgaacttccagaacctgagcgtgatcggcttcagaatcctgctgctgaaagtggccggctttaacctgctgatgaccctgcggctgtggtccagcagggccaagcgatctggatctggagcaacaaacttctcactactcaaacaagcaggtgacgtggaggagaatcccgggcctactagtatggactggatttggcgcatccttttccttgtcggcgctgctaccggcgcgcattccttcgaacaggtgcagctggtgcagtctggcggccagatgaagaaacccggcgagagcatgagaatcagctgtcgggcctccggctacgagttcatcgactgcaccctgaactggatcagactggcccctggcaagcggcctgagtggatgggatggctgaagcctagaggcggagccgtgaactacgccagacctctccagggcagagtgaccatgaccagggacgtgtacagcgataccgccttcctggaactgcggagcctgaccgtggatgataccgccgtgtacttctgcaccagaggcaagaactgcgattacaactgggacttcgagcactggggcagaggcacccctgtgatcgtgtctagcacgcgtatccagaaccctgatcctgccgtgtaccagctgcgggatagcaagagcagcgacaagagcgtgtgtctgttcaccgacttcgacagccagaccaacgtgtcccagagcaaggactccgacgtgtacatcaccgataagtgcgtgctggacatgcggagcatggacttcaagagcaactccgccgtggcctggtccaacaagtccgatttcgcctgcgccaacgccttcaacaacagcattatccccgaggacacattcttcccaagccccgagagcagctgcggctttaccagcgagagctaccagcagggcgtgctgagcgccaccatcctgtacgagatcctgctgggcaaggccaccctgtacgccgtgctggtgtctgccctggtgctgatggctatggtcaagcggaaggacagccgggga

SEQ ID NO: 4000 - DNA, 1884 bp, synthetic construct
  source 1..1884: mol_type = other DNA
atggccttaccagtgaccgccttgctcctgccgctggccttgctgctccacgccgccaggccggagctggtgctgacacagagccctggcaccctgtctctgtctgccggcgaaagagccaccctgagctgtagagccagccagagcgtgtcctctggcagcctggcttggtatcagcagaagccaggccaggcccccagactgctgatctacggcgcttctaccagagccaccggcatccccgatagattcagcggctctggctccggcaccgacttcaccctgacaatcggcagactggaacccgaggacctggccgtgtactactgccagcagtacggcaccagcccctacacattcggccagggcaccaagctggaaatcctcgaggacctgaagaacgtgttcccacctgaggtggccgtgttcgagcctagcgaggccgagatcagccacacccagaaagccaccctcgtgtgcctggctaccggcttctaccccgaccatgtggaactgtcttggtgggtcaacggcaaagaggtgcacagcggcgtgtgtaccgacccccagccactgaaagaacagcccgccctgaacgacagccggtactgcctgagcagcagactgagagtgtccgccaccttctggcagaacccccggaaccacttcagatgccaggtgcagttctacggcctgagcgagaacgacgagtggacccaggacagagccaagcccgtgacccagatcgtgtctgccgaagcctggggcagagccgattgcgacgtgaagctggtggaaaagagcttcgagacagacaccaacctgaacttccagaacctgagcgtgatcggcttcagaatcctgctgctgaaagtggccggctttaacctgctgatgaccctgcggctgtggtccagcagggccaagcgatctggatctggagcaacaaacttctcactactcaaacaagcaggtgacgtggaggagaatcccgggcctactagtatggactggatttggcgcatccttttccttgtcggcgctgctaccggcgcgcattccttcgaactggaacagagcggagccgaagtgaagaaacccggcagcagcgtgcaggtgtcctgcaaagcaagcggcggcaccttctctatgtacggcttcaactgggtgcgccaggctcctggacacggcctggaatggatgggcggcatcatccccatcttcggcacctccaactacgcccagaaattccggggcagagtgaccttcaccgccgaccaggccacaagcaccgcctacatggaactgaccaacctgcggagcgacgacaccgccgtgtattattgcgccagagacttcggccccgactgggaggatggcgacagctacgatggcagcggcagaggcttcttcgacttctggggccagggaacccttgtgaccgtgtcctcaacgcgtatccagaaccctgatcctgccgtgtaccagctgcgggatagcaagagcagcgacaagagcgtgtgtctgttcaccgacttcgacagccagaccaacgtgtcccagagcaaggactccgacgtgtacatcaccgataagtgcgtgctggacatgcggagcatggacttcaagagcaactccgccgtggcctggtccaacaagtccgatttcgcctgcgccaacgccttcaacaacagcattatccccgaggacacattcttcccaagccccgagagcagctgcggctttaccagcgagagctaccagcagggcgtgctgagcgccaccatcctgtacgagatcctgctgggcaaggccaccctgtacgccgtgctggtgtctgccctggtgctgatggctatggtcaagcggaaggacagccgggga

SEQ ID NO: 4001 - DNA, 1824 bp, synthetic construct
  source 1..1824: mol_type = other DNA
atggccttaccagtgaccgccttgctcctgccgctggccttgctgctccacgccgccaggccggacatccagatgacccagagccccagcagcctgtctgccagcgtgggcgacagagtgaccatcacctgtcaggccagccaggacatcaacaactacctgaactggtatcagcagaagcccggcaaggcccccaagctgctgatctacgacgccagcaatctgcagaccggcgtgcccagcagattttccggctctggcagcggcaccgacttcaccttcaccatcgaggacattgccacctactactgccagcagtacaccttcggccctggcaccaaggtggacatcaaactcgaggacctgaagaacgtgttcccacctgaggtggccgtgttcgagcctagcgaggccgagatcagccacacccagaaagccaccctcgtgtgcctggctaccggcttctaccccgaccatgtggaactgtcttggtgggtcaacggcaaagaggtgcacagcggcgtgtgtaccgacccccagccactgaaagaacagcccgccctgaacgacagccggtactgcctgagcagcagactgagagtgtccgccaccttctggcagaacccccggaaccacttcagatgccaggtgcagttctacggcctgagcgagaacgacgagtggacccaggacagagccaagcccgtgacccagatcgtgtctgccgaagcctggggcagagccgattgcgacgtgaagctggtggaaaagagcttcgagacagacaccaacctgaacttccagaacctgagcgtgatcggcttcagaatcctgctgctgaaagtggccggctttaacctgctgatgaccctgcggctgtggtccagcagggccaagcgatctggatctggagcaacaaacttctcactactcaaacaagcaggtgacgtggaggagaatcccgggcctactagtatggactggatttggcgcatccttttccttgtcggcgctgctaccggcgcgcattccttcgaagaagtgcaactgctggaatctggcggcggactggtgcagcctggcggatctctgagactgagctgtgccgccagcggcttcacctttagctggtacagcatgacctgggtgcgccaggcccctggcaaaggactggaatgggtgtccagcatcgtgccctggggcgatttcacccagtacgccgatagcgtgaagggccggttcaccatcagccgggacaacagcaagaacaccctgtacctgcagatgaacagcctgcgggccgaggacaccgccgtgtactattgtgccaagggacctggctggggcagcttcgatctgtggggcagaggaacccttgtgaccgtgtccagcacgcgtatccagaaccctgatcctgccgtgtaccagctgcgggatagcaagagcagcgacaagagcgtgtgtctgttcaccgacttcgacagccagaccaacgtgtcccagagcaaggactccgacgtgtacatcaccgataagtgcgtgctggacatgcggagcatggacttcaagagcaactccgccgtggcctggtccaacaagtccgatttcgcctgcgccaacgccttcaacaacagcattatccccgaggacacattcttcccaagccccgagagcagctgcggctttaccagcgagagctaccagcagggcgtgctgagcgccaccatcctgtacgagatcctgctgggcaaggccaccctgtacgccgtgctggtgtctgccctggtgctgatggctatggtcaagcggaaggacagccgggga

SEQ ID NO: 4002 - DNA, 1854 bp, synthetic construct
  source 1..1854: mol_type = other DNA
atggccttaccagtgaccgccttgctcctgccgctggccttgctgctccacgccgccaggccggacatccagatgacccagagccccagcagcctgtctgccagcgtgggcgacagagtgaccatcacctgtaccgccagcctgagcgtgtccagcacctacctgcactggtatcagcagaagcccggcagcagccccaagctgtggatctacagcaccagcaacctggcctccggcgtgcccagcagattttctggcagcggctctggcaccagctacaccctgaccatcagctccctccagcccgaggacttcgccacctactactgccaccagtaccacagaagccccctgacctttggcggaggcaccaaggtggaaatcaagagactcgaggacctgaagaacgtgttcccacctgaggtggccgtgttcgagcctagcgaggccgagatcagccacacccagaaagccaccctcgtgtgcctggctaccggcttctaccccgaccatgtggaactgtcttggtgggtcaacggcaaagaggtgcacagcggcgtgtgtaccgacccccagccactgaaagaacagcccgccctgaacgacagccggtactgcctgagcagcagactgagagtgtccgccaccttctggcagaacccccggaaccacttcagatgccaggtgcagttctacggcctgagcgagaacgacgagtggacccaggacagagccaagcccgtgacccagatcgtgtctgccgaagcctggggcagagccgattgcgacgtgaagctggtggaaaagagcttcgagacagacaccaacctgaacttccagaacctgagcgtgatcggcttcagaatcctgctgctgaaagtggccggctttaacctgctgatgaccctgcggctgtggtccagcagggccaagcgatctggatctggagcaacaaacttctcactactcaaacaagcaggtgacgtggaggagaatcccgggcctactagtatggactggatttggcgcatccttttccttgtcggcgctgctaccggcgcgcattccttcgaagaagtgcaactggtggaatctggcggcggactggtgcagcctggcggatctctgagactgagctgtgccgccagcggcttcagcctgaccaaatacggcgtgcactgggtgcgccaggcccctggaaaaggactggaatgggtgggagtgaagtgggctggcggctccaccgactacaacagcgccctgatgagccggttcaccatcagcaaggacaacgccaagaacagcctgtacctccagatgaactccctgcgggccgaggacaccgccgtgtactactgtgccagagatcaccgggacgctatggactactggggccagggaacactcgtgaccgtgtcctctacgcgtatccagaaccctgatcctgccgtgtaccagctgcgggatagcaagagcagcgacaagagcgtgtgtctgttcaccgacttcgacagccagaccaacgtgtcccagagcaaggactccgacgtgtacatcaccgataagtgcgtgctggacatgcggagcatggacttcaagagcaactccgccgtggcctggtccaacaagtccgatttcgcctgcgccaacgccttcaacaacagcattatccccgaggacacattcttcccaagccccgagagcagctgcggctttaccagcgagagctaccagcagggcgtgctgagcgccaccatcctgtacgagatcctgctgggcaaggccaccctgtacgccgtgctggtgtctgccctggtgctgatggctatggtcaagcggaaggacagccgggga

SEQ ID NO: 4003 - DNA, 1866 bp, synthetic construct
  source 1..1866: mol_type = other DNA
atggccttaccagtgaccgccttgctcctgccgctggccttgctgctccacgccgccaggccggacatccagatgacccagagccccagcagcctgtctgccagcgtgggcgacagagtgaccatcacatgcaaggccagccaggacgtgggaacagccgtggcctggtatcagcagaagcctggcaaggcccccaagctgctgatctacagcgccagctacagatccaccggcgtgcccagcagattttccggctctggcagcggcaccgacttcaccctgaccatctctagcctccagcccgaggacttcgccacctactactgccagcaccactactccgccccctggacatttggcggaggcaccaaggtggaaatcaagctcgaggacctgaagaacgtgttcccacctgaggtggccgtgttcgagcctagcgaggccgagatcagccacacccagaaagccaccctcgtgtgcctggctaccggcttctaccccgaccatgtggaactgtcttggtgggtcaacggcaaagaggtgcacagcggcgtgtgtaccgacccccagccactgaaagaacagcccgccctgaacgacagccggtactgcctgagcagcagactgagagtgtccgccaccttctggcagaacccccggaaccacttcagatgccaggtgcagttctacggcctgagcgagaacgacgagtggacccaggacagagccaagcccgtgacccagatcgtgtctgccgaagcctggggcagagccgattgcgacgtgaagctggtggaaaagagcttcgagacagacaccaacctgaacttccagaacctgagcgtgatcggcttcagaatcctgctgctgaaagtggccggctttaacctgctgatgaccctgcggctgtggtccagcagggccaagcgatctggatctggagcaacaaacttctcactactcaaacaagcaggtgacgtggaggagaatcccgggcctactagtatggactggatttggcgcatccttttccttgtcggcgctgctaccggcgcgcattccttcgaagaagtgcaactggtggaatcaggcggcggactggtgcagcctggcggatctctgagactgagctgtgccgccagcggcttcaccttcagcagaaacggcatgagctgggtgcgccaggcccctggaaaaggactggaatgggtggcaaccgtgtccagcggcggcagctacatctactacgccgacagcgtgaagggccggttcaccatctccagagacaacgccaagaacagcctgtacctccagatgaactccctgcgggccgaggacaccgccgtgtactattgtgccagacagggcaccaccgccctggctaccagattcttcgatgtgtggggccagggcaccctcgtgaccgtgtcatctacgcgtatccagaaccctgatcctgccgtgtaccagctgcgggatagcaagagcagcgacaagagcgtgtgtctgttcaccgacttcgacagccagaccaacgtgtcccagagcaaggactccgacgtgtacatcaccgataagtgcgtgctggacatgcggagcatggacttcaagagcaactccgccgtggcctggtccaacaagtccgatttcgcctgcgccaacgccttcaacaacagcattatccccgaggacacattcttcccaagccccgagagcagctgcggctttaccagcgagagctaccagcagggcgtgctgagcgccaccatcctgtacgagatcctgctgggcaaggccaccctgtacgccgtgctggtgtctgccctggtgctgatggctatggtcaagcggaaggacagccgggga

SEQ ID NO: 4004 - DNA, 1854 bp, synthetic construct
  source 1..1854: mol_type = other DNA
atggccttaccagtgaccgccttgctcctgccgctggccttgctgctccacgccgccaggccggacatccagatgacccagagcccccctagcctgtctgcctctgtgggcggcaaagtgaccatcacatgcaaggccagccaggacatcgaccgctacatggcctggtatcaggacaagcccggcaagggacccaagctgctgatccacgataccagcaccctccagcccggcatccccagcagattttctggcagcggctccggcagagactacagcttcagcatcagcaacctggaacccgaggacattgccacctactactgcctccagtacgacaacctgtggaccttcggcggaggcaccaagctggaaatcaagagactcgaggacctgaagaacgtgttcccacctgaggtggccgtgttcgagcctagcgaggccgagatcagccacacccagaaagccaccctcgtgtgcctggctaccggcttctaccccgaccatgtggaactgtcttggtgggtcaacggcaaagaggtgcacagcggcgtgtgtaccgacccccagccactgaaagaacagcccgccctgaacgacagccggtactgcctgagcagcagactgagagtgtccgccaccttctggcagaacccccggaaccacttcagatgccaggtgcagttctacggcctgagcgagaacgacgagtggacccaggacagagccaagcccgtgacccagatcgtgtctgccgaagcctggggcagagccgattgcgacgtgaagctggtggaaaagagcttcgagacagacaccaacctgaacttccagaacctgagcgtgatcggcttcagaatcctgctgctgaaagtggccggctttaacctgctgatgaccctgcggctgtggtccagcagggccaagcgatctggatctggagcaacaaacttctcactactcaaacaagcaggtgacgtggaggagaatcccgggcctactagtatggactggatttggcgcatccttttccttgtcggcgctgctaccggcgcgcattccttcgaacaggtgcaactggtgcagagcggagccgagcttgtgaagcctggcgcttccgtgaagatgagctgcaaagccagcggctacatcttcaccaactacaacatccactgggtcaagaagtccccaggccagggcctggaatggatcggagccatctaccccggaaacggcgacgccccttacagccagaagttccaggacagagccaccctgaccgccgacaccagcagcagcaccacctacatggaactgagcagcctgaccagcgaggacagcgccgtgtactattgcgtgcgggccaactgggatgtggccttcgcctattggggccagggcacactggtgtccgtgtcctctacgcgtatccagaaccctgatcctgccgtgtaccagctgcgggatagcaagagcagcgacaagagcgtgtgtctgttcaccgacttcgacagccagaccaacgtgtcccagagcaaggactccgacgtgtacatcaccgataagtgcgtgctggacatgcggagcatggacttcaagagcaactccgccgtggcctggtccaacaagtccgatttcgcctgcgccaacgccttcaacaacagcattatccccgaggacacattcttcccaagccccgagagcagctgcggctttaccagcgagagctaccagcagggcgtgctgagcgccaccatcctgtacgagatcctgctgggcaaggccaccctgtacgccgtgctggtgtctgccctggtgctgatggctatggtcaagcggaaggacagccgggga

SEQ ID NO: 4005 - DNA, 1857 bp, synthetic construct
  source 1..1857: mol_type = other DNA
atggccttaccagtgaccgccttgctcctgccgctggccttgctgctccacgccgccaggccggacatccagatgacccagagccctgccagcctgtctgcctctgtgggcgagacagtgaccatcacctgtcgggtgtccggcaacatccacaactacctggcctggtatcagcagaagcagggcaagagcccccaactgctggtgtacaacgccaagaccctggccgatggcgtgcccagcagattttctggctctggcagcggcacccagtacagcctgaagatcaacagcctccagcccgaggacttcggcagctactactgccagcacttctggtccaacccctacaccttcggcggaggcaccaagctggaaatcaagctcgaggacctgaagaacgtgttcccacctgaggtggccgtgttcgagcctagcgaggccgagatcagccacacccagaaagccaccctcgtgtgcctggctaccggcttctaccccgaccatgtggaactgtcttggtgggtcaacggcaaagaggtgcacagcggcgtgtgtaccgacccccagccactgaaagaacagcccgccctgaacgacagccggtactgcctgagcagcagactgagagtgtccgccaccttctggcagaacccccggaaccacttcagatgccaggtgcagttctacggcctgagcgagaacgacgagtggacccaggacagagccaagcccgtgacccagatcgtgtctgccgaagcctggggcagagccgattgcgacgtgaagctggtggaaaagagcttcgagacagacaccaacctgaacttccagaacctgagcgtgatcggcttcagaatcctgctgctgaaagtggccggctttaacctgctgatgaccctgcggctgtggtccagcagggccaagcgatctggatctggagcaacaaacttctcactactcaaacaagcaggtgacgtggaggagaatcccgggcctactagtatggactggatttggcgcatccttttccttgtcggcgctgctaccggcgcgcattccttcgaacaggtgcaactccagcagtctggcgcttccgtgaaggtgtcctgcaaggccagcgaactcgtgcggcctggcacaggctacgccttcaccaattacctgatcgagtgggtcaagcagaggcccggacagggcctggaatggatcggagtgattaacccaggcagcggcggcaccaactacaacgagaagttcaagggcaaggccaccctgaccgccgacaagagcagcagcacagcctacatgcaactgagcagcctgaccagcgacgacagcgccgtgtacttctgcgcccggtacagaagctacgactggtacttcgacgtgtggggagccggcaccaccgtgacagtgtcatctacgcgtatccagaaccctgatcctgccgtgtaccagctgcgggatagcaagagcagcgacaagagcgtgtgtctgttcaccgacttcgacagccagaccaacgtgtcccagagcaaggactccgacgtgtacatcaccgataagtgcgtgctggacatgcggagcatggacttcaagagcaactccgccgtggcctggtccaacaagtccgatttcgcctgcgccaacgccttcaacaacagcattatccccgaggacacattcttcccaagccccgagagcagctgcggctttaccagcgagagctaccagcagggcgtgctgagcgccaccatcctgtacgagatcctgctgggcaaggccaccctgtacgccgtgctggtgtctgccctggtgctgatggctatggtcaagcggaaggacagccgggga

SEQ ID NO: 4006 - DNA, 1854 bp, synthetic construct
  source 1..1854: mol_type = other DNA
atggccttaccagtgaccgccttgctcctgccgctggccttgctgctccacgccgccaggccggacatccagatgacccagagcttcagcagcctgagcgccagcgtgggcgacagagtgaccatcacctgtagagccagccaggacatcagcaactacctgaactggtatcagcagaagcccggcaaggcccccaagctgctgatctactacaccagcagactgcacagcggcgtgcccagcagattttctggcagcggctccggcaccgactacaccctgacaatcagctccctgcagcccgaggacttcgctacctacttctgtcagcaaggcaacaccctgccctggacctttggcggaggcaccaagctggaaatcaagagactcgaggacctgaagaacgtgttcccacctgaggtggccgtgttcgagcctagcgaggccgagatcagccacacccagaaagccaccctcgtgtgcctggctaccggcttctaccccgaccatgtggaactgtcttggtgggtcaacggcaaagaggtgcacagcggcgtgtgtaccgacccccagccactgaaagaacagcccgccctgaacgacagccggtactgcctgagcagcagactgagagtgtccgccaccttctggcagaacccccggaaccacttcagatgccaggtgcagttctacggcctgagcgagaacgacgagtggacccaggacagagccaagcccgtgacccagatcgtgtctgccgaagcctggggcagagccgattgcgacgtgaagctggtggaaaagagcttcgagacagacaccaacctgaacttccagaacctgagcgtgatcggcttcagaatcctgctgctgaaagtggccggctttaacctgctgatgaccctgcggctgtggtccagcagggccaagcgatctggatctggagcaacaaacttctcactactcaaacaagcaggtgacgtggaggagaatcccgggcctactagtatggactggatttggcgcatccttttccttgtcggcgctgctaccggcgcgcattccttcgaagaagtgcaactggtgcagtccggcggagggctggtgcagagcggaggatctctgagactgagctgcagagccagcggctacaccttcacccggtactggatgctgtgggtgcgccagaggccaggcaagggactggaatgggtggccgagatcaacccccggaacgaccggaccaactacaacgagaagttcaagacccggttcaccatcagcgtggacagaagcaagaacaccctgtacctgcagatggacagcctgcgggccgaggataccgccgtgtacttttgtgctctgggaggcggctacgctatggactactggggccagggaacccttgtgaccgtgtcctctacgcgtatccagaaccctgatcctgccgtgtaccagctgcgggatagcaagagcagcgacaagagcgtgtgtctgttcaccgacttcgacagccagaccaacgtgtcccagagcaaggactccgacgtgtacatcaccgataagtgcgtgctggacatgcggagcatggacttcaagagcaactccgccgtggcctggtccaacaagtccgatttcgcctgcgccaacgccttcaacaacagcattatccccgaggacacattcttcccaagccccgagagcagctgcggctttaccagcgagagctaccagcagggcgtgctgagcgccaccatcctgtacgagatcctgctgggcaaggccaccctgtacgccgtgctggtgtctgccctggtgctgatggctatggtcaagcggaaggacagccgggga

SEQ ID NO: 4007 - DNA, 1857 bp, synthetic construct
  source 1..1857: mol_type = other DNA
atggccttaccagtgaccgccttgctcctgccgctggccttgctgctccacgccgccaggccggacatccagatgacacagtctccggcgtcactgtccgcctccgtgggggagactgtgactattatttgtagggcatcagttaacatctactcttatttggcctggtaccagcagaagcaaggcaagagtcctcagctgctggtgtataatgcgaagatcctggcagagggcgtgccgagccggttctccggcagcggctcaggtacccaattttccctcaagatcaattcactgcagccagaggactttggcagttactattgtcaacaccactacggcacattcactttcgggtccggtacaaaattggagattaagcgactcgaggacctgaagaacgtgttcccacctgaggtggccgtgttcgagcctagcgaggccgagatcagccacacccagaaagccaccctcgtgtgcctggctaccggcttctaccccgaccatgtggaactgtcttggtgggtcaacggcaaagaggtgcacagcggcgtgtgtaccgacccccagccactgaaagaacagcccgccctgaacgacagccggtactgcctgagcagcagactgagagtgtccgccaccttctggcagaacccccggaaccacttcagatgccaggtgcagttctacggcctgagcgagaacgacgagtggacccaggacagagccaagcccgtgacccagatcgtgtctgccgaagcctggggcagagccgattgcgacgtgaagctggtggaaaagagcttcgagacagacaccaacctgaacttccagaacctgagcgtgatcggcttcagaatcctgctgctgaaagtggccggctttaacctgctgatgaccctgcggctgtggtccagcagggccaagcgatctggatctggagcaacaaacttctcactactcaaacaagcaggtgacgtggaggagaatcccgggcctactagtatggactggatttggcgcatccttttccttgtcggcgctgctaccggcgcgcattccttcgaacaggtacagttgaaagaaagcgggcctggactggtagcgccttcccaatctctctccatcacgtgcaccatctctggcttctccctgacttcctatggagttcactgggtgaggcagccccccggcaagggactggaatggctggtcgtcatctggtccgacgggtccacaacctacaactccgctctgaaaagtcggctctctatttctaaagataatagcaagagccaggtgtttctgaaaatgaactctctgcagaccgatgatacggccatttactactgcgcttcacactatggctcaaccttggcattcgcttcctggggccacggaacactggtgaccgtttccgcagccacgcgtatccagaaccctgatcctgccgtgtaccagctgcgggatagcaagagcagcgacaagagcgtgtgtctgttcaccgacttcgacagccagaccaacgtgtcccagagcaaggactccgacgtgtacatcaccgataagtgcgtgctggacatgcggagcatggacttcaagagcaactccgccgtggcctggtccaacaagtccgatttcgcctgcgccaacgccttcaacaacagcattatccccgaggacacattcttcccaagccccgagagcagctgcggctttaccagcgagagctaccagcagggcgtgctgagcgccaccatcctgtacgagatcctgctgggcaaggccaccctgtacgccgtgctggtgtctgccctggtgctgatggctatggtcaagcggaaggacagccgggga

SEQ ID NO: 4008 - DNA, 1881 bp, synthetic construct
  source 1..1881: mol_type = other DNA
atggccttaccagtgaccgccttgctcctgccgctggccttgctgctccacgccgccaggccggacattgtgatgacccagtctcacaaattcatgtccacatcagtaggagacagggtcagcgtcacctgcaaggccagtcagaatgtgggtaataatgtagcctggtatcaacagaaaccagggcaatctcctaaagtactgatttactcggcatcctaccggtacagtggagtccctgatcgcttcacaggcagtggatctgggacagatttcactctcaccatcagtaatgtgcagtctgaagacttggcagagtatttctgtcagcaatataacacctatccattcacgttcggctcggggacaaagttggaaataaaactcgaggacctgaagaacgtgttcccacctgaggtggccgtgttcgagcctagcgaggccgagatcagccacacccagaaagccaccctcgtgtgcctggctaccggcttctaccccgaccatgtggaactgtcttggtgggtcaacggcaaagaggtgcacagcggcgtgtgtaccgacccccagccactgaaagaacagcccgccctgaacgacagccggtactgcctgagcagcagactgagagtgtccgccaccttctggcagaacccccggaaccacttcagatgccaggtgcagttctacggcctgagcgagaacgacgagtggacccaggacagagccaagcccgtgacccagatcgtgtctgccgaagcctggggcagagccgattgcgacgtgaagctggtggaaaagagcttcgagacagacaccaacctgaacttccagaacctgagcgtgatcggcttcagaatcctgctgctgaaagtggccggctttaacctgctgatgaccctgcggctgtggtccagcagggccaagcgatctggatctggagcaacaaacttctcactactcaaacaagcaggtgacgtggaggagaatcccgggcctactagtatggactggatttggcgcatccttttccttgtcggcgctgctaccggcgcgcattccttcgaagaggtacagctggaggaaagcggtggaggactggtgcaacctggagggtctatgaagctctcttgcgtagcttctgggttcacgttctccaattactggatgaactgggtgcggcagtcccccgagaaaggcctggaatgggtagcagaaattcggttcaagtcccataactatgctacacactttgccgagtctgtcaaaggccggttcactattagtcgagacgacagcaagtcttcagtctacctgcagatgaataacttgcgggcagaggacacaggtatctactactgcaccaggagaatcggcaactccgactatgactggtggtactttgacgtctggggagcaggcaccagcgtgacggtgagttcagcctcaacgcgtatccagaaccctgatcctgccgtgtaccagctgcgggatagcaagagcagcgacaagagcgtgtgtctgttcaccgacttcgacagccagaccaacgtgtcccagagcaaggactccgacgtgtacatcaccgataagtgcgtgctggacatgcggagcatggacttcaagagcaactccgccgtggcctggtccaacaagtccgatttcgcctgcgccaacgccttcaacaacagcattatccccgaggacacattcttcccaagccccgagagcagctgcggctttaccagcgagagctaccagcagggcgtgctgagcgccaccatcctgtacgagatcctgctgggcaaggccaccctgtacgccgtgctggtgtctgccctggtgctgatggctatggtcaagcggaaggacagccgggga

SEQ ID NO: 4009 - DNA, 1860 bp, synthetic construct
  source 1..1860: mol_type = other DNA
atggccttaccagtgaccgccttgctcctgccgctggccttgctgctccacgccgccaggccggaccagatcgtgctgacccagtcccccgctattatgtccgcatcaccgggcgaaaaagtgacgatctcctgtagcgcttcatctagcgtctcctacatgtattggtatcaacagaaacctgggtctagcccaaagccgtggatctacagaaccagtaaccttgccagtggggtgccagcccgcttcagcggtagtggcagtggaacttcctatagcctcacaataagcaacatggaggctgaagatgccgctgcctattactgccagcagtaccacagttacccaaccacgttcggcgggggaactaagctcgaagtaaaactcgaggacctgaagaacgtgttcccacctgaggtggccgtgttcgagcctagcgaggccgagatcagccacacccagaaagccaccctcgtgtgcctggctaccggcttctaccccgaccatgtggaactgtcttggtgggtcaacggcaaagaggtgcacagcggcgtgtgtaccgacccccagccactgaaagaacagcccgccctgaacgacagccggtactgcctgagcagcagactgagagtgtccgccaccttctggcagaacccccggaaccacttcagatgccaggtgcagttctacggcctgagcgagaacgacgagtggacccaggacagagccaagcccgtgacccagatcgtgtctgccgaagcctggggcagagccgattgcgacgtgaagctggtggaaaagagcttcgagacagacaccaacctgaacttccagaacctgagcgtgatcggcttcagaatcctgctgctgaaagtggccggctttaacctgctgatgaccctgcggctgtggtccagcagggccaagcgatctggatctggagcaacaaacttctcactactcaaacaagcaggtgacgtggaggagaatcccgggcctactagtatggactggatttggcgcatccttttccttgtcggcgctgctaccggcgcgcattccttcgaagaggtgcagctggtggaatctgggggcggcctggtccaacctaagggatcactcaagctctcttgtgcggccagcggattctctttcaatacctatgctatgaattgggtgagacaggcgcccggaaagggcctcgaatggatagcccatatccggtcaaaatcaaacaatttcgcaacctactatgcggactccgtgaaggaccgattttccatctcccgagatgcctccgagaatattctgttcctgcagatgaataacctcaagacagaggacaccgccatgtactactgtgtgcgccagggcggtgactttcccatggattactgggggcaggggaccagcgtgaccgtgagctctacgcgtatccagaaccctgatcctgccgtgtaccagctgcgggatagcaagagcagcgacaagagcgtgtgtctgttcaccgacttcgacagccagaccaacgtgtcccagagcaaggactccgacgtgtacatcaccgataagtgcgtgctggacatgcggagcatggacttcaagagcaactccgccgtggcctggtccaacaagtccgatttcgcctgcgccaacgccttcaacaacagcattatccccgaggacacattcttcccaagccccgagagcagctgcggctttaccagcgagagctaccagcagggcgtgctgagcgccaccatcctgtacgagatcctgctgggcaaggccaccctgtacgccgtgctggtgtctgccctggtgctgatggctatggtcaagcggaaggacagccgggga

SEQ ID NO: 4010 - DNA, 1857 bp, synthetic construct
  source 1..1857: mol_type = other DNA
atggccttaccagtgaccgccttgctcctgccgctggccttgctgctccacgccgccaggccggacgacatccagatgacccagagcagcagcagcttcagcgtgagcctgggcgacagagtgaccatcacctgcatggccagcgaggacatctacatcagactggcctggtaccagcagaagcccggcaacgcccccagactgctgatcagcgccgccaccagcctggagaccggcgtgcccagcagattcagcggcagcggcagcggcaaggactacaccctgagcatcaccagcctgcagaccgaggacgtgggcacctactactgccagcagtactggagcagcccctggaccttcggcggcggcaccaagctggagatcaacctcgaggacctgaagaacgtgttcccacctgaggtggccgtgttcgagcctagcgaggccgagatcagccacacccagaaagccaccctcgtgtgcctggctaccggcttctaccccgaccatgtggaactgtcttggtgggtcaacggcaaagaggtgcacagcggcgtgtgtaccgacccccagccactgaaagaacagcccgccctgaacgacagccggtactgcctgagcagcagactgagagtgtccgccaccttctggcagaacccccggaaccacttcagatgccaggtgcagttctacggcctgagcgagaacgacgagtggacccaggacagagccaagcccgtgacccagatcgtgtctgccgaagcctggggcagagccgattgcgacgtgaagctggtggaaaagagcttcgagacagacaccaacctgaacttccagaacctgagcgtgatcggcttcagaatcctgctgctgaaagtggccggctttaacctgctgatgaccctgcggctgtggtccagcagggccaagcgatctggatctggagcaacaaacttctcactactcaaacaagcaggtgacgtggaggagaatcccgggcctactagtatggactggatttggcgcatccttttccttgtcggcgctgctaccggcgcgcattccttcgaagacgtgcagctgcaggagagcggccccggcctggtgaagcccagccagagcctgagcctgacctgcaccgtgaccggctacagcatcaccagcgactacacctggaactggatcagacagttccccggcaacaagctggagtggatgggctacatcacctacagcggcagcaccagctacaaccccagcctgaagagcagaaacagcatcaccagagacaccagcaagaaccagttcttcctgcagctgaacagcgtgaccaccgaggacaccgccacctactactgcgccagactgggcagaagatacacaatggactactggggccagggcaccagcgtgaccgtgagcagcacgcgtatccagaaccctgatcctgccgtgtaccagctgcgggatagcaagagcagcgacaagagcgtgtgtctgttcaccgacttcgacagccagaccaacgtgtcccagagcaaggactccgacgtgtacatcaccgataagtgcgtgctggacatgcggagcatggacttcaagagcaactccgccgtggcctggtccaacaagtccgatttcgcctgcgccaacgccttcaacaacagcattatccccgaggacacattcttcccaagccccgagagcagctgcggctttaccagcgagagctaccagcagggcgtgctgagcgccaccatcctgtacgagatcctgctgggcaaggccaccctgtacgccgtgctggtgtctgccctggtgctgatggctatggtcaagcggaaggacagccgggga

SEQ ID NO: 4011 - DNA, 1866 bp, synthetic construct
  source 1..1866: mol_type = other DNA
atggccttaccagtgaccgccttgctcctgccgctggccttgctgctccacgccgccaggccggacgacatccagatgacccagagccccagcagcctgtctgccagcgtgggcgacagagtgaccatcacctgtagagccagccagagcatcagcagctacctgaactggtatcagcagaagcccggcaaggcccccaaactgctgatctacgacgccagcaacctggaaaccggcgtgcccagcagattttccggcagcggctctggcaccgacttcaccttcaccatcagctccctccagcccgaggacattgccacctactactgccagcagtacgacaacctgcccctgacctttggcggaggcaccaaggtggacatcaagagactcgaggacctgaagaacgtgttcccacctgaggtggccgtgttcgagcctagcgaggccgagatcagccacacccagaaagccaccctcgtgtgcctggctaccggcttctaccccgaccatgtggaactgtcttggtgggtcaacggcaaagaggtgcacagcggcgtgtgtaccgacccccagccactgaaagaacagcccgccctgaacgacagccggtactgcctgagcagcagactgagagtgtccgccaccttctggcagaacccccggaaccacttcagatgccaggtgcagttctacggcctgagcgagaacgacgagtggacccaggacagagccaagcccgtgacccagatcgtgtctgccgaagcctggggcagagccgattgcgacgtgaagctggtggaaaagagcttcgagacagacaccaacctgaacttccagaacctgagcgtgatcggcttcagaatcctgctgctgaaagtggccggctttaacctgctgatgaccctgcggctgtggtccagcagggccaagcgatctggatctggagcaacaaacttctcactactcaaacaagcaggtgacgtggaggagaatcccgggcctactagtatggactggatttggcgcatccttttccttgtcggcgctgctaccggcgcgcattccttcgaacaggtgcaactggtggaatctggcggcggagtggtgcagcctggcagaagcctgagactgagctgtgccgccagcggcttcacctttagcagctacgccatgcactgggtgcgccaggcccctggaaaaggcctggaatgggtggccgtgatctcctacgacggctccaacaagtattacgccgacagcgtgaagggccggttcaccatctccagagacaacagcaagaacaccctgtacctccagatgaacagcctgcgggccgaggacaccgccgtgtactattgtgccagggctcacaacagcagctcttggagcttcgactactggggccagggcaccctcgtgaccgtgtcatctacgcgtatccagaaccctgatcctgccgtgtaccagctgcgggatagcaagagcagcgacaagagcgtgtgtctgttcaccgacttcgacagccagaccaacgtgtcccagagcaaggactccgacgtgtacatcaccgataagtgcgtgctggacatgcggagcatggacttcaagagcaactccgccgtggcctggtccaacaagtccgatttcgcctgcgccaacgccttcaacaacagcattatccccgaggacacattcttcccaagccccgagagcagctgcggctttaccagcgagagctaccagcagggcgtgctgagcgccaccatcctgtacgagatcctgctgggcaaggccaccctgtacgccgtgctggtgtctgccctggtgctgatggctatggtcaagcggaaggacagccgggga

SEQ ID NO: 4012 - DNA, 1893 bp, synthetic construct
  source 1..1893: mol_type = other DNA
atggccttaccagtgaccgccttgctcctgccgctggccttgctgctccacgccgccaggccggacgacgtcgtgatgacccagagccctctgagcctgcctgtgtccctgggcgatcaggccagcatctcctgcagatccagccagagactggtgcacagcaacggcaacacctacctgcactggtatctgcagaagcccggccagagccccaagctgctgatctaccgggtgtccaacagattccccggcgtgcccgatagattcagcggctctggcagcggcaccgacttcaccctgaagatcagccgggtggaagccgaggacctgggcatctatttctgcagccagagcacccacgtgccctacacctttggcggaggcaccaagctggaaatcaagcggctcgaggacctgaagaacgtgttcccacctgaggtggccgtgttcgagcctagcgaggccgagatcagccacacccagaaagccaccctcgtgtgcctggctaccggcttctaccccgaccatgtggaactgtcttggtgggtcaacggcaaagaggtgcacagcggcgtgtgtaccgacccccagccactgaaagaacagcccgccctgaacgacagccggtactgcctgagcagcagactgagagtgtccgccaccttctggcagaacccccggaaccacttcagatgccaggtgcagttctacggcctgagcgagaacgacgagtggacccaggacagagccaagcccgtgacccagatcgtgtctgccgaagcctggggcagagccgattgcgacgtgaagctggtggaaaagagcttcgagacagacaccaacctgaacttccagaacctgagcgtgatcggcttcagaatcctgctgctgaaagtggccggctttaacctgctgatgaccctgcggctgtggtccagcagggccaagcgatctggatctggagcaacaaacttctcactactcaaacaagcaggtgacgtggaggagaatcccgggcctactagtatggactggatttggcgcatccttttccttgtcggcgctgctaccggcgcgcattccttcgaagaagtgcggctgcagcagtctggccccgacctgattaagcctggggccagcgtgaagatgagctgcaaggccagcggctacaccttcaccggctacgtgatgcactgggtcaagcagaggccaggccagggcctggaatggatcggcttcatcaacccctacaacgacgacatccagagcaacgagcggttccggggcaaggccaccctgaccagcgataagagcagcaccaccgcctacatggaactgagcagcctgacctccgaggacagcgccgtgtactactgtgctaggggagccggctacaacttcgacggggcctacagattcttcgacttttggggccagggcaccacactgaccgtgtcctctacgcgtatccagaaccctgatcctgccgtgtaccagctgcgggatagcaagagcagcgacaagagcgtgtgtctgttcaccgacttcgacagccagaccaacgtgtcccagagcaaggactccgacgtgtacatcaccgataagtgcgtgctggacatgcggagcatggacttcaagagcaactccgccgtggcctggtccaacaagtccgatttcgcctgcgccaacgccttcaacaacagcattatccccgaggacacattcttcccaagccccgagagcagctgcggctttaccagcgagagctaccagcagggcgtgctgagcgccaccatcctgtacgagatcctgctgggcaaggccaccctgtacgccgtgctggtgtctgccctggtgctgatggctatggtcaagcggaaggacagccgggga

SEQ ID NO: 4013 - DNA, 1866 bp, synthetic construct
  source 1..1866: mol_type = other DNA
atggccttaccagtgaccgccttgctcctgccgctggccttgctgctccacgccgccaggccggacagctacgagctgacccagcctcctagcgtgtccgtgtctcctggacagaccgccaccatctcttgcagcggcgatcaactgggcgggaagtacggccactggtatcagaagaagcccggccagagccccgtgctggtgctgtaccaggacagaaaacggcctgccggcatccccgagagattcagcggaagcagcagcggcaacaccatcaccctgaccatcagcggcacccaggccgtggatgaggccgactactactgccaggcttgggacaccaatctgggcggcgtgttcggcggaggcaccaaagtgacagtgctgggacagctcgaggacctgaagaacgtgttcccacctgaggtggccgtgttcgagcctagcgaggccgagatcagccacacccagaaagccaccctcgtgtgcctggctaccggcttctaccccgaccatgtggaactgtcttggtgggtcaacggcaaagaggtgcacagcggcgtgtgtaccgacccccagccactgaaagaacagcccgccctgaacgacagccggtactgcctgagcagcagactgagagtgtccgccaccttctggcagaacccccggaaccacttcagatgccaggtgcagttctacggcctgagcgagaacgacgagtggacccaggacagagccaagcccgtgacccagatcgtgtctgccgaagcctggggcagagccgattgcgacgtgaagctggtggaaaagagcttcgagacagacaccaacctgaacttccagaacctgagcgtgatcggcttcagaatcctgctgctgaaagtggccggctttaacctgctgatgaccctgcggctgtggtccagcagggccaagcgatctggatctggagcaacaaacttctcactactcaaacaagcaggtgacgtggaggagaatcccgggcctactagtatggactggatttggcgcatccttttccttgtcggcgctgctaccggcgcgcattccttcgaacaggtgcaactggtggaaagcggagccgaagtgaagaaacctggggccagcgtgaaggtgtcctgcaaggccagcggctacacctttaccggctactacatgcactgggtgcgccaggctccaggccagggactggaatggatgggccggatcaaccccaatagcggcggcaccaactacgcccagaaattccagggcagagtgaccatgaccagagacaccagcatcagcaccgcctacatggaactgagccggctgagaagcgacgacaccgccgtgtactactgcgccagccctagaggcagaggcagcgccttcgatatttggggccagggcacactcgtgaccgtgtcctctacgcgtatccagaaccctgatcctgccgtgtaccagctgcgggatagcaagagcagcgacaagagcgtgtgtctgttcaccgacttcgacagccagaccaacgtgtcccagagcaaggactccgacgtgtacatcaccgataagtgcgtgctggacatgcggagcatggacttcaagagcaactccgccgtggcctggtccaacaagtccgatttcgcctgcgccaacgccttcaacaacagcattatccccgaggacacattcttcccaagccccgagagcagctgcggctttaccagcgagagctaccagcagggcgtgctgagcgccaccatcctgtacgagatcctgctgggcaaggccaccctgtacgccgtgctggtgtctgccctggtgctgatggctatggtcaagcggaaggacagccgggga

SEQ ID NO: 4014 - DNA, 1875 bp, synthetic construct
  source 1..1875: mol_type = other DNA
atggccttaccagtgaccgccttgctcctgccgctggccttgctgctccacgccgccaggccggacaacttcatgctgacccagccccacagcgtgtccgagagccctggcaagaccgtgaccatctcctgcaccagaagcagcggctctatcgccagcaaatacgtgcagtggtatcagcagaggcccggcagcagccctaccaccgtgatctacgaggacaaccagaggcctagcggcgtgcccgatagattcagcggcagcatcgacaccagcagcaacagcgccagcctgaccatcagcggcctgagaacagaggacgaggccgactactactgccacagctacgacagcaacaaccactccgtgttcggcggaggcaccaaagtgacagtgctgggacagctcgaggacctgaagaacgtgttcccacctgaggtggccgtgttcgagcctagcgaggccgagatcagccacacccagaaagccaccctcgtgtgcctggctaccggcttctaccccgaccatgtggaactgtcttggtgggtcaacggcaaagaggtgcacagcggcgtgtgtaccgacccccagccactgaaagaacagcccgccctgaacgacagccggtactgcctgagcagcagactgagagtgtccgccaccttctggcagaacccccggaaccacttcagatgccaggtgcagttctacggcctgagcgagaacgacgagtggacccaggacagagccaagcccgtgacccagatcgtgtctgccgaagcctggggcagagccgattgcgacgtgaagctggtggaaaagagcttcgagacagacaccaacctgaacttccagaacctgagcgtgatcggcttcagaatcctgctgctgaaagtggccggctttaacctgctgatgaccctgcggctgtggtccagcagggccaagcgatctggatctggagcaacaaacttctcactactcaaacaagcaggtgacgtggaggagaatcccgggcctactagtatggactggatttggcgcatccttttccttgtcggcgctgctaccggcgcgcattccttcgaagaagtgcaactggtggaaagcgggggaggcgtggtgcagccaggcggatctctgagactgagctgtgccgccagcggcttcaccttcagcagctacgccatgagctgggtgcgccaggcccctggaaaaggcctggaatgggtgtccgccatctctggctctggcggcagcacctactacgccgatagcgtgaagggccggttcagcatcagccgggacaacagcaagaacaccctgtacctccagatgaacagcctgcgggccgaggacaccgccgtgtactactgtgccagaaccagaagctccggggccttcgacatctggggccagggaacactcgtgaccgtgtcctctacgcgtatccagaaccctgatcctgccgtgtaccagctgcgggatagcaagagcagcgacaagagcgtgtgtctgttcaccgacttcgacagccagaccaacgtgtcccagagcaaggactccgacgtgtacatcaccgataagtgcgtgctggacatgcggagcatggacttcaagagcaactccgccgtggcctggtccaacaagtccgatttcgcctgcgccaacgccttcaacaacagcattatccccgaggacacattcttcccaagccccgagagcagctgcggctttaccagcgagagctaccagcagggcgtgctgagcgccaccatcctgtacgagatcctgctgggcaaggccaccctgtacgccgtgctggtgtctgccctggtgctgatggctatggtcaagcggaaggacagccgggga

SEQ ID NO: 4015 - DNA, 1860 bp, synthetic construct
  source 1..1860: mol_type = other DNA
atggccttaccagtgaccgccttgctcctgccgctggccttgctgctccacgccgccaggccggacatccagatgaaccagagccccagcagcctgagcgccagcctgggcgataccatcaccatcacctgtcacgccagccagaacatcaacgtgtggctgagctggtatcagcagaagcccggcaacatccccaagctgctgatctacaaggccagcaacctgcacaccggcgtgcccagcagattttctggcagcggctctggcaccggcttcaccattaccatcagctccctccagcccgaggacattgccacctactactgccagcagggccagagctacccctggacatttggcggaggcaccaagctggaaatcaagagactcgaggacctgaagaacgtgttcccacctgaggtggccgtgttcgagcctagcgaggccgagatcagccacacccagaaagccaccctcgtgtgcctggctaccggcttctaccccgaccatgtggaactgtcttggtgggtcaacggcaaagaggtgcacagcggcgtgtgtaccgacccccagccactgaaagaacagcccgccctgaacgacagccggtactgcctgagcagcagactgagagtgtccgccaccttctggcagaacccccggaaccacttcagatgccaggtgcagttctacggcctgagcgagaacgacgagtggacccaggacagagccaagcccgtgacccagatcgtgtctgccgaagcctggggcagagccgattgcgacgtgaagctggtggaaaagagcttcgagacagacaccaacctgaacttccagaacctgagcgtgatcggcttcagaatcctgctgctgaaagtggccggctttaacctgctgatgaccctgcggctgtggtccagcagggccaagcgatctggatctggagcaacaaacttctcactactcaaacaagcaggtgacgtggaggagaatcccgggcctactagtatggactggatttggcgcatccttttccttgtcggcgctgctaccggcgcgcattccttcgaagaagtgcaactccagcagagcggcccagagcttgtgaagcctggcgcttccgtgaagattagctgcaaagccagcggctacagcttcaccggctacttcatgaactgggtcaagcagagccacggcaagagcctggagtacatcggcagattcaacccctacaacggcgagacactgtacaaccagaagttcaagggcaaggccaccctgaccgtggacaagagcagcagcaccgtgcacatggaactgctgagcgtgaccagcgaggacagcgccgtgtactactgtggcagaagcggcaacgacgacgctatggactattggggccagggcaccagcgtgaccgtgtctagtgctacgcgtatccagaaccctgatcctgccgtgtaccagctgcgggatagcaagagcagcgacaagagcgtgtgtctgttcaccgacttcgacagccagaccaacgtgtcccagagcaaggactccgacgtgtacatcaccgataagtgcgtgctggacatgcggagcatggacttcaagagcaactccgccgtggcctggtccaacaagtccgatttcgcctgcgccaacgccttcaacaacagcattatccccgaggacacattcttcccaagccccgagagcagctgcggctttaccagcgagagctaccagcagggcgtgctgagcgccaccatcctgtacgagatcctgctgggcaaggccaccctgtacgccgtgctggtgtctgccctggtgctgatggctatggtcaagcggaaggacagccgggga

SEQ ID NO: 4016 - DNA, 1863 bp, synthetic construct
  source 1..1863: mol_type = other DNA
atggccttaccagtgaccgccttgctcctgccgctggccttgctgctccacgccgccaggccggagatcgtgctgacacagagccctgccaccctgtctctgagccctggcgaaagagccaccctgagctgtagagccagccagagcgtgcggagctacctggcctggtatcagcagaagcctggacaggcccccagactgctgatctacgacgccagcaatcgggccacaggcatccccgccagattttctggctctggcagcggcaccgacttcaccctgacaatcagcagcctggaacccgaggacttcgccgtgtactactgccagcagcggagcaactggccccctacctttggacagggcaccaaggtggaaatcaagctcgaggacctgaagaacgtgttcccacctgaggtggccgtgttcgagcctagcgaggccgagatcagccacacccagaaagccaccctcgtgtgcctggctaccggcttctaccccgaccatgtggaactgtcttggtgggtcaacggcaaagaggtgcacagcggcgtgtgtaccgacccccagccactgaaagaacagcccgccctgaacgacagccggtactgcctgagcagcagactgagagtgtccgccaccttctggcagaacccccggaaccacttcagatgccaggtgcagttctacggcctgagcgagaacgacgagtggacccaggacagagccaagcccgtgacccagatcgtgtctgccgaagcctggggcagagccgattgcgacgtgaagctggtggaaaagagcttcgagacagacaccaacctgaacttccagaacctgagcgtgatcggcttcagaatcctgctgctgaaagtggccggctttaacctgctgatgaccctgcggctgtggtccagcagggccaagcgatctggatctggagcaacaaacttctcactactcaaacaagcaggtgacgtggaggagaatcccgggcctactagtatggactggatttggcgcatccttttccttgtcggcgctgctaccggcgcgcattccttcgaacaactccaggtgcaggaatctggccccggactcgtgaagcccagcgagacactgagcctgacctgtaccgtgtccggcggcagcatcagcaacagctacttctcctggggctggatcagacagccccctggcaagggcctggaatggatcggcagcttctactacggcgagaaaacctactacaaccccagcctgaagtccagagccaccatcagcatcgacaccagcaagagccagttctccctgaagctgagcagcgtgacagccgccgacaccgccgtgtattattgccccagaggccccaccatgatccggggcgtgatcgactcttggggccagggaacactcgtgaccgtgtcctctacgcgtatccagaaccctgatcctgccgtgtaccagctgcgggatagcaagagcagcgacaagagcgtgtgtctgttcaccgacttcgacagccagaccaacgtgtcccagagcaaggactccgacgtgtacatcaccgataagtgcgtgctggacatgcggagcatggacttcaagagcaactccgccgtggcctggtccaacaagtccgatttcgcctgcgccaacgccttcaacaacagcattatccccgaggacacattcttcccaagccccgagagcagctgcggctttaccagcgagagctaccagcagggcgtgctgagcgccaccatcctgtacgagatcctgctgggcaaggccaccctgtacgccgtgctggtgtctgccctggtgctgatggctatggtcaagcggaaggacagccgggga

SEQ ID NO: 4017 - DNA, 1890 bp, synthetic construct
  source 1..1890: mol_type = other DNA
atggccttaccagtgaccgccttgctcctgccgctggccttgctgctccacgccgccaggccggacatcgtgatgacccagacccccctgagcctgcctgtgacacctggcgagcctgccagcatctcctgcagaagcagcagaagcctgctggacagcgacgacggcaacacctacctggactggtatctgcagaaacccggccagagcccccaactgctgatctacaccctgagctacagagccagcggcgtgcccgatagattttccggctctggcagcggcaccgacttcaccctgaagatcagccgggtggaagccgaggacgtgggcgtgtactactgtatgcagcgggtggaatttcccatcaccttcggccagggcaccagactggaaatcaagagactcgaggacctgaagaacgtgttcccacctgaggtggccgtgttcgagcctagcgaggccgagatcagccacacccagaaagccaccctcgtgtgcctggctaccggcttctaccccgaccatgtggaactgtcttggtgggtcaacggcaaagaggtgcacagcggcgtgtgtaccgacccccagccactgaaagaacagcccgccctgaacgacagccggtactgcctgagcagcagactgagagtgtccgccaccttctggcagaacccccggaaccacttcagatgccaggtgcagttctacggcctgagcgagaacgacgagtggacccaggacagagccaagcccgtgacccagatcgtgtctgccgaagcctggggcagagccgattgcgacgtgaagctggtggaaaagagcttcgagacagacaccaacctgaacttccagaacctgagcgtgatcggcttcagaatcctgctgctgaaagtggccggctttaacctgctgatgaccctgcggctgtggtccagcagggccaagcgatctggatctggagcaacaaacttctcactactcaaacaagcaggtgacgtggaggagaatcccgggcctactagtatggactggatttggcgcatccttttccttgtcggcgctgctaccggcgcgcattccttcgaacaggtgcaactggtggaatctggcgggggagtggtgcagcctggcagatccctgagactgagctgtgccgccagcggcttcatcttcagcagatacggaatgcactgggtgcgccaggcccctggcaagggactgaaatgggtggccgtgatttggtacgacggcagcaacaagctgtacgccgacagcgtgaagggccggttcaccatcagcagagacaacagcaagaacaccctgtacctgcagatgaacagcctgcgggccgaggacaccgccgtgtactattgcgccagagactactacgacaacagccggcaccactggggcttcgactattggggccagggaacccttgtgaccgtgtcctctacgcgtatccagaaccctgatcctgccgtgtaccagctgcgggatagcaagagcagcgacaagagcgtgtgtctgttcaccgacttcgacagccagaccaacgtgtcccagagcaaggactccgacgtgtacatcaccgataagtgcgtgctggacatgcggagcatggacttcaagagcaactccgccgtggcctggtccaacaagtccgatttcgcctgcgccaacgccttcaacaacagcattatccccgaggacacattcttcccaagccccgagagcagctgcggctttaccagcgagagctaccagcagggcgtgctgagcgccaccatcctgtacgagatcctgctgggcaaggccaccctgtacgccgtgctggtgtctgccctggtgctgatggctatggtcaagcggaaggacagccgggga

SEQ ID NO: 4018 - DNA, 1860 bp, synthetic construct
  source 1..1860: mol_type = other DNA
atggccttaccagtgaccgccttgctcctgccgctggccttgctgctccacgccgccaggccggagatccagatgacccagagccccagcagcatgtctgccagcctgggcgacaccatcaccatcacatgccaggccacccaggacatcttcaagaacctgaactggtatcagcagaagcccggcaagccccccagcctgctgatctactatgccaccgaactggccgagggcgtgcccagcagattttctggcagcggcagcggctccgactacagcctgaccatcagcaacctggaaagcgaggacttcgccgcctactactgcctccagttcttcgagttcccattcaccttcggctccggcaccaagctggaaatgaagctcgaggacctgaagaacgtgttcccacctgaggtggccgtgttcgagcctagcgaggccgagatcagccacacccagaaagccaccctcgtgtgcctggctaccggcttctaccccgaccatgtggaactgtcttggtgggtcaacggcaaagaggtgcacagcggcgtgtgtaccgacccccagccactgaaagaacagcccgccctgaacgacagccggtactgcctgagcagcagactgagagtgtccgccaccttctggcagaacccccggaaccacttcagatgccaggtgcagttctacggcctgagcgagaacgacgagtggacccaggacagagccaagcccgtgacccagatcgtgtctgccgaagcctggggcagagccgattgcgacgtgaagctggtggaaaagagcttcgagacagacaccaacctgaacttccagaacctgagcgtgatcggcttcagaatcctgctgctgaaagtggccggctttaacctgctgatgaccctgcggctgtggtccagcagggccaagcgatctggatctggagcaacaaacttctcactactcaaacaagcaggtgacgtggaggagaatcccgggcctactagtatggactggatttggcgcatccttttccttgtcggcgctgctaccggcgcgcattccttcgaacaggtgcaactccagcagtctggcgctgagcttgtgcggcctggcacctctgtgaaggtgtcctgtaaagccagcggctacgtgttcaccaactactggatcgagtggatcaagcagcggccaggccagggcctggaatggatcggcgtgatgaatccaggcagcggcgagacaacctacaacgagaagttcaagggcaaggccaccctgaccgccgacaagagcagcagcacagcctacatgcaactgtcctccctgaccagcgtggacagcgccgtgtacttctgcgccagggaccacgaccgggactactacgctatggactactggggccagggcaccagcgtgaccgtgtcatctacgcgtatccagaaccctgatcctgccgtgtaccagctgcgggatagcaagagcagcgacaagagcgtgtgtctgttcaccgacttcgacagccagaccaacgtgtcccagagcaaggactccgacgtgtacatcaccgataagtgcgtgctggacatgcggagcatggacttcaagagcaactccgccgtggcctggtccaacaagtccgatttcgcctgcgccaacgccttcaacaacagcattatccccgaggacacattcttcccaagccccgagagcagctgcggctttaccagcgagagctaccagcagggcgtgctgagcgccaccatcctgtacgagatcctgctgggcaaggccaccctgtacgccgtgctggtgtctgccctggtgctgatggctatggtcaagcggaaggacagccgggga

SEQ ID NO: 4019 - DNA, 1851 bp, synthetic construct
  source 1..1851: mol_type = other DNA
atggccttaccagtgaccgccttgctcctgccgctggccttgctgctccacgccgccaggccggacatcctgctgacacagagccccgccatcctgtccgtgtctccaggcgagagagtgtcctttagctgccgggccagccagaacatcggcaccagcatccactggtatcagcagcggaccaacggcagccccagactgctgattaagtacgccagcgagtccgtgtccggcatccccagcagattttctggcagcggctccggcaccgacttcaccctgagcatcaacagcgtggaaagcgaggacattgccgactactactgccagcacaccaatagctggcccaccacctttggcggaggcaccaagctggaaatcaagagactcgaggacctgaagaacgtgttcccacctgaggtggccgtgttcgagcctagcgaggccgagatcagccacacccagaaagccaccctcgtgtgcctggctaccggcttctaccccgaccatgtggaactgtcttggtgggtcaacggcaaagaggtgcacagcggcgtgtgtaccgacccccagccactgaaagaacagcccgccctgaacgacagccggtactgcctgagcagcagactgagagtgtccgccaccttctggcagaacccccggaaccacttcagatgccaggtgcagttctacggcctgagcgagaacgacgagtggacccaggacagagccaagcccgtgacccagatcgtgtctgccgaagcctggggcagagccgattgcgacgtgaagctggtggaaaagagcttcgagacagacaccaacctgaacttccagaacctgagcgtgatcggcttcagaatcctgctgctgaaagtggccggctttaacctgctgatgaccctgcggctgtggtccagcagggccaagcgatctggatctggagcaacaaacttctcactactcaaacaagcaggtgacgtggaggagaatcccgggcctactagtatggactggatttggcgcatccttttccttgtcggcgctgctaccggcgcgcattccttcgaacaggtgcaactccagcagtccgacgccgagcttgtgaagcctggcgcttccgtgaagattagctgcaaggccagcggctacaccttcaccgaccacgccattcactgggtcaagcagaagcccgagcagggcctggaatggatcggctacttcagccccggcaacggcgacatcaagtacaacgagaagttcaagggcaaggccaccctgaccgccgacaagagcagcagcacagcctacatgcaactgaacagcctgaccagcgaggactccgccgtgtacttctgcaagcggagctacggcaactacgactactggggccagggcaccacactgaccgtgtctagtacgcgtatccagaaccctgatcctgccgtgtaccagctgcgggatagcaagagcagcgacaagagcgtgtgtctgttcaccgacttcgacagccagaccaacgtgtcccagagcaaggactccgacgtgtacatcaccgataagtgcgtgctggacatgcggagcatggacttcaagagcaactccgccgtggcctggtccaacaagtccgatttcgcctgcgccaacgccttcaacaacagcattatccccgaggacacattcttcccaagccccgagagcagctgcggctttaccagcgagagctaccagcagggcgtgctgagcgccaccatcctgtacgagatcctgctgggcaaggccaccctgtacgccgtgctggtgtctgccctggtgctgatggctatggtcaagcggaaggacagccgggga

SEQ ID NO: 4020 - DNA, 1866 bp, synthetic construct
  source 1..1866: mol_type = other DNA
atggccttaccagtgaccgccttgctcctgccgctggccttgctgctccacgccgccaggccggacatcgtgatgacccagagccccgatagcctggccgtgtctctgggagagagagccaccatcaactgcaagagcagccagagcctgctgaacagcggcgaccagaagaactacctgacctggtatcagcagaagcccggccagccccccaagctgctgatctactgggccagcaccagagaaagcggcgtgcccgatagattcagcggcagcggaagtggcaccgacttcaccctgaccatcagttctcttcaggccgaggacgtggccgtgtactactgccagaacgactacagctaccccctgaccttcggccagggcaccaaggtggaaatcaagctcgaggacctgaagaacgtgttcccacctgaggtggccgtgttcgagcctagcgaggccgagatcagccacacccagaaagccaccctcgtgtgcctggctaccggcttctaccccgaccatgtggaactgtcttggtgggtcaacggcaaagaggtgcacagcggcgtgtgtaccgacccccagccactgaaagaacagcccgccctgaacgacagccggtactgcctgagcagcagactgagagtgtccgccaccttctggcagaacccccggaaccacttcagatgccaggtgcagttctacggcctgagcgagaacgacgagtggacccaggacagagccaagcccgtgacccagatcgtgtctgccgaagcctggggcagagccgattgcgacgtgaagctggtggaaaagagcttcgagacagacaccaacctgaacttccagaacctgagcgtgatcggcttcagaatcctgctgctgaaagtggccggctttaacctgctgatgaccctgcggctgtggtccagcagggccaagcgatctggatctggagcaacaaacttctcactactcaaacaagcaggtgacgtggaggagaatcccgggcctactagtatggactggatttggcgcatccttttccttgtcggcgctgctaccggcgcgcattccttcgaacaggtgcagctggtgcagtctggggccgaagtgaagaaaaccggcagcagcgtgaaggtgtcctgcaaggccagcggctacacctttaccgaccacgccattcacgtgtggcggcaggctccaggacaggccctggaatggatgggccacttcagccccggcaacaccgacatcaagtacaacgacaagttcaagggcagagtgaccctgaccgtggaccgcagcatgagcaccgcctacatggaactgagcagcctgcggagcgaggacaccgccatgtactattgcaagaccagcaccttctttttcgactactggggccagggaacaatggtcaccgtgtccagcacgcgtatccagaaccctgatcctgccgtgtaccagctgcgggatagcaagagcagcgacaagagcgtgtgtctgttcaccgacttcgacagccagaccaacgtgtcccagagcaaggactccgacgtgtacatcaccgataagtgcgtgctggacatgcggagcatggacttcaagagcaactccgccgtggcctggtccaacaagtccgatttcgcctgcgccaacgccttcaacaacagcattatccccgaggacacattcttcccaagccccgagagcagctgcggctttaccagcgagagctaccagcagggcgtgctgagcgccaccatcctgtacgagatcctgctgggcaaggccaccctgtacgccgtgctggtgtctgccctggtgctgatggctatggtcaagcggaaggacagccgggga

SEQ ID NO: 4021 - DNA, 1863 bp, synthetic construct
  source 1..1863: mol_type = other DNA
atggccttaccagtgaccgccttgctcctgccgctggccttgctgctccacgccgccaggccggacatccagatgacccagagccccagcagcctgtctgccagcgtgggcgacagagtgaccatcacatgcaaggccagccaggacgtgtccattgccgtggcctggtatcagcagaagcccggcaaggcccccaaggtgctgatctacagcgccagctacagatacaccggcgtgcccgacagattcagcggctctggcagcggcaccgacttcaccttcaccatcagctccctccagcccgaggatattgccgtgtactactgccagcagcactacatcacccccctgacctttggcggaggcaccaaggtggaaatcaagctcgaggacctgaagaacgtgttcccacctgaggtggccgtgttcgagcctagcgaggccgagatcagccacacccagaaagccaccctcgtgtgcctggctaccggcttctaccccgaccatgtggaactgtcttggtgggtcaacggcaaagaggtgcacagcggcgtgtgtaccgacccccagccactgaaagaacagcccgccctgaacgacagccggtactgcctgagcagcagactgagagtgtccgccaccttctggcagaacccccggaaccacttcagatgccaggtgcagttctacggcctgagcgagaacgacgagtggacccaggacagagccaagcccgtgacccagatcgtgtctgccgaagcctggggcagagccgattgcgacgtgaagctggtggaaaagagcttcgagacagacaccaacctgaacttccagaacctgagcgtgatcggcttcagaatcctgctgctgaaagtggccggctttaacctgctgatgaccctgcggctgtggtccagcagggccaagcgatctggatctggagcaacaaacttctcactactcaaacaagcaggtgacgtggaggagaatcccgggcctactagtatggactggatttggcgcatccttttccttgtcggcgctgctaccggcgcgcattccttcgaacagatccaactggtgcagagcggccacgaagtgaagaaacctggggccagcgtgaaggtgtcctgcaaagccagcggctacacctttaccaactacggcatgaactgggtgcgccaggcccctggacagggcctggaatggatgggctggatcaacaccaagaccggcgagcccacctacgccgaagagttcaagggcagattcgtgttcagcctggaaaccagcgcctccaccgcctacctccagatcagctctctgaaggccgaggacaccgccatgtacttttgcggcagaggcggctacggcagcagctactggtacttcgatgtgtggggccagggcaccaccgtgaccgtgtcatctacgcgtatccagaaccctgatcctgccgtgtaccagctgcgggatagcaagagcagcgacaagagcgtgtgtctgttcaccgacttcgacagccagaccaacgtgtcccagagcaaggactccgacgtgtacatcaccgataagtgcgtgctggacatgcggagcatggacttcaagagcaactccgccgtggcctggtccaacaagtccgatttcgcctgcgccaacgccttcaacaacagcattatccccgaggacacattcttcccaagccccgagagcagctgcggctttaccagcgagagctaccagcagggcgtgctgagcgccaccatcctgtacgagatcctgctgggcaaggccaccctgtacgccgtgctggtgtctgccctggtgctgatggctatggtcaagcggaaggacagccgggga

SEQ ID NO: 4022 - DNA, 1869 bp, synthetic construct
  source 1..1869: mol_type = other DNA
atggccttaccagtgaccgccttgctcctgccgctggccttgctgctccacgccgccaggccggacatcgtgatgacccagagccccgatagcctggccgtgtctctgggagagagagccaccatcaactgccgggccagcaagagcgtgtccaccagcggctacagctacatgcactggtatcagcagaagcccggccagccccccaagctgctgatctacctggcctccaacctggaaagcggcgtgcccgatagattcagcggcagcggctctggcaccgacttcaccctgaccatcagttctcttcaggccgaggacgtggccgtgtactactgccagcacagcagagagctgccctacaccttcggccagggcaccaagctggaaatcaagctcgaggacctgaagaacgtgttcccacctgaggtggccgtgttcgagcctagcgaggccgagatcagccacacccagaaagccaccctcgtgtgcctggctaccggcttctaccccgaccatgtggaactgtcttggtgggtcaacggcaaagaggtgcacagcggcgtgtgtaccgacccccagccactgaaagaacagcccgccctgaacgacagccggtactgcctgagcagcagactgagagtgtccgccaccttctggcagaacccccggaaccacttcagatgccaggtgcagttctacggcctgagcgagaacgacgagtggacccaggacagagccaagcccgtgacccagatcgtgtctgccgaagcctggggcagagccgattgcgacgtgaagctggtggaaaagagcttcgagacagacaccaacctgaacttccagaacctgagcgtgatcggcttcagaatcctgctgctgaaagtggccggctttaacctgctgatgaccctgcggctgtggtccagcagggccaagcgatctggatctggagcaacaaacttctcactactcaaacaagcaggtgacgtggaggagaatcccgggcctactagtatggactggatttggcgcatccttttccttgtcggcgctgctaccggcgcgcattccttcgaacaggtgcaactccaggaatctggccctggccttgtgaagcccagcgagacactgagcctgacctgtaccgtgtccggcggcagcatcagctcttacggcgtgcactggattcggcagcctccaggcaagggcctggaatggatcggcgtgatctggacctccggcgtgaccgactacaacagcgccctgatgggcagagtgaccatctccgtggacaccagcaagaaccagttcagcctgaagctgagcagcgtgacagccgccgataccgccgtgtattattgcgccagagatggcgactacgaccgctacacaatggactactggggccagggaacccttgtgaccgtgtcctctacgcgtatccagaaccctgatcctgccgtgtaccagctgcgggatagcaagagcagcgacaagagcgtgtgtctgttcaccgacttcgacagccagaccaacgtgtcccagagcaaggactccgacgtgtacatcaccgataagtgcgtgctggacatgcggagcatggacttcaagagcaactccgccgtggcctggtccaacaagtccgatttcgcctgcgccaacgccttcaacaacagcattatccccgaggacacattcttcccaagccccgagagcagctgcggctttaccagcgagagctaccagcagggcgtgctgagcgccaccatcctgtacgagatcctgctgggcaaggccaccctgtacgccgtgctggtgtctgccctggtgctgatggctatggtcaagcggaaggacagccgggga

SEQ ID NO: 4023 - DNA, 1869 bp, synthetic construct
  source 1..1869: mol_type = other DNA
atggccttaccagtgaccgccttgctcctgccgctggccttgctgctccacgccgccaggccggacatccagatgacccagagccccagcagcctgtctgccagcgtgggcgacagagtgaccatcacctgtagagccagccagagcatcggcaccagcctgcactggtatcagcagaagcctggcaaggcccccaagctgctgattaagttcgccagcagactgcagagcggcgtgcccagcagattttctggcagcggctccggcaccgacttcaccctgacaatcagctccctgcagcccgaggacttcgccacctactactgccagcagagccccggcttccctccaacctttggacagggcaccaagctggaaatcaagcggctcgaggacctgaagaacgtgttcccacctgaggtggccgtgttcgagcctagcgaggccgagatcagccacacccagaaagccaccctcgtgtgcctggctaccggcttctaccccgaccatgtggaactgtcttggtgggtcaacggcaaagaggtgcacagcggcgtgtgtaccgacccccagccactgaaagaacagcccgccctgaacgacagccggtactgcctgagcagcagactgagagtgtccgccaccttctggcagaacccccggaaccacttcagatgccaggtgcagttctacggcctgagcgagaacgacgagtggacccaggacagagccaagcccgtgacccagatcgtgtctgccgaagcctggggcagagccgattgcgacgtgaagctggtggaaaagagcttcgagacagacaccaacctgaacttccagaacctgagcgtgatcggcttcagaatcctgctgctgaaagtggccggctttaacctgctgatgaccctgcggctgtggtccagcagggccaagcgatctggatctggagcaacaaacttctcactactcaaacaagcaggtgacgtggaggagaatcccgggcctactagtatggactggatttggcgcatccttttccttgtcggcgctgctaccggcgcgcattccttcgaacaggtgcaactggtggaatctggcggcggacttgtgaagccaggcggcagcctgagactgagctgtgccgccagcggcttcagcatcaccaccagcggctactactggacctggatcagacagttccccggcaagggcctggaatggatgggctacatcggctacaacagcaagacctactacaaccccgccctgaagtcccggatcaccatcagcagagacaacgccaagaacagcctgtacctgcagatgaactccctgagagccgaggataccgccgtgtactactgcgccagatccctgtacggcggctacaaggacgccttcgatagctggggccagggaacccttgtgaccgtgtctagcacgcgtatccagaaccctgatcctgccgtgtaccagctgcgggatagcaagagcagcgacaagagcgtgtgtctgttcaccgacttcgacagccagaccaacgtgtcccagagcaaggactccgacgtgtacatcaccgataagtgcgtgctggacatgcggagcatggacttcaagagcaactccgccgtggcctggtccaacaagtccgatttcgcctgcgccaacgccttcaacaacagcattatccccgaggacacattcttcccaagccccgagagcagctgcggctttaccagcgagagctaccagcagggcgtgctgagcgccaccatcctgtacgagatcctgctgggcaaggccaccctgtacgccgtgctggtgtctgccctggtgctgatggctatggtcaagcggaaggacagccgggga

SEQ ID NO: 4024 - DNA, 1884 bp, synthetic construct
  source 1..1884: mol_type = other DNA
atggccttaccagtgaccgccttgctcctgccgctggccttgctgctccacgccgccaggccggacgagatcgtgctgacccagagccctctgagcctgcctgtgacacctggcgagcctgccagcatctcctgtagaagcagccagagcctgctgcacagcatcggctacaactacctggactggtatctccagaagcccggccagagcccccaactgctgatctacctgggcagcaacagagccagcggcgtgcccgatagattttccggcagcggctccggcaccgacttcaccctgaagatcagccgggtggaagccgaggacgtgggcgtgtactactgtatgcaggccctccagacccccctgacctttggcggaggcaccaaggtggaaatcaagcggctcgaggacctgaagaacgtgttcccacctgaggtggccgtgttcgagcctagcgaggccgagatcagccacacccagaaagccaccctcgtgtgcctggctaccggcttctaccccgaccatgtggaactgtcttggtgggtcaacggcaaagaggtgcacagcggcgtgtgtaccgacccccagccactgaaagaacagcccgccctgaacgacagccggtactgcctgagcagcagactgagagtgtccgccaccttctggcagaacccccggaaccacttcagatgccaggtgcagttctacggcctgagcgagaacgacgagtggacccaggacagagccaagcccgtgacccagatcgtgtctgccgaagcctggggcagagccgattgcgacgtgaagctggtggaaaagagcttcgagacagacaccaacctgaacttccagaacctgagcgtgatcggcttcagaatcctgctgctgaaagtggccggctttaacctgctgatgaccctgcggctgtggtccagcagggccaagcgatctggatctggagcaacaaacttctcactactcaaacaagcaggtgacgtggaggagaatcccgggcctactagtatggactggatttggcgcatccttttccttgtcggcgctgctaccggcgcgcattccttcgaagaagtgcaactggtggaaagcggaggcggcgtggtgcagcctggaagaagcctgagactgagctgtgccgccagcggcttcaccttccggtcctacggaatgcactgggtgcgccaggcccctggcaaaggactggaatgggtggccgtgatctcctacgacggctccaacaagtactacaccgacagcgtgaacggcagattcaccatcagcagagacaacagcaagaacaccctgtacctccagatgaacagcctgcgggccgaggacaccgccgtgtactattgtgctagaggcggaggctactacgagacaagcggccctgattactggggccagggcacactcgtgaccgtgtctagtacgcgtatccagaaccctgatcctgccgtgtaccagctgcgggatagcaagagcagcgacaagagcgtgtgtctgttcaccgacttcgacagccagaccaacgtgtcccagagcaaggactccgacgtgtacatcaccgataagtgcgtgctggacatgcggagcatggacttcaagagcaactccgccgtggcctggtccaacaagtccgatttcgcctgcgccaacgccttcaacaacagcattatccccgaggacacattcttcccaagccccgagagcagctgcggctttaccagcgagagctaccagcagggcgtgctgagcgccaccatcctgtacgagatcctgctgggcaaggccaccctgtacgccgtgctggtgtctgccctggtgctgatggctatggtcaagcggaaggacagccgggga

SEQ ID NO: 4025 - DNA, 1878 bp, synthetic construct
  source 1..1878: mol_type = other DNA
atggccttaccagtgaccgccttgctcctgccgctggccttgctgctccacgccgccaggccggacgacgtcgtgatgacccagagccctctgagcctgcctgtgacacctggcgagcctgccagcatctcctgtagaagcagccagagcctgctgcacagcatcggctacaactacctgcactggtttctccagaagcccggccagagcccccaactgctgatctacctgggcagcaacagagccagcggcgtgcccgatagattttccggcagcggctccggcaccgacttcaccctgaagatcagccgggtggaagccgaggacgtgggcgtgtactactgtatgcaggccctccagacccctcccacctttggacagggcaccagactggaaatcaagcggctcgaggacctgaagaacgtgttcccacctgaggtggccgtgttcgagcctagcgaggccgagatcagccacacccagaaagccaccctcgtgtgcctggctaccggcttctaccccgaccatgtggaactgtcttggtgggtcaacggcaaagaggtgcacagcggcgtgtgtaccgacccccagccactgaaagaacagcccgccctgaacgacagccggtactgcctgagcagcagactgagagtgtccgccaccttctggcagaacccccggaaccacttcagatgccaggtgcagttctacggcctgagcgagaacgacgagtggacccaggacagagccaagcccgtgacccagatcgtgtctgccgaagcctggggcagagccgattgcgacgtgaagctggtggaaaagagcttcgagacagacaccaacctgaacttccagaacctgagcgtgatcggcttcagaatcctgctgctgaaagtggccggctttaacctgctgatgaccctgcggctgtggtccagcagggccaagcgatctggatctggagcaacaaacttctcactactcaaacaagcaggtgacgtggaggagaatcccgggcctactagtatggactggatttggcgcatccttttccttgtcggcgctgctaccggcgcgcattccttcgaacaactccaactccaggaaagcggccctggcctcgtgaagcctagcggcacactgagcctgacatgtgccgtgtctggcggcagcatcagcagcagcaactggtggtcttgggtgcgccagcctcctggcaagggcctggaatggatcggcgaaatctaccacagcggcagcaccaactacaaccccagcctgaagtccagagtgaccatcagcgtggacaagagcaagaaccagttctccctgaagctgagcagcgtgacagccgccgataccgccgtgtactattgcgtgggcagcccctacggcgactacgtgctggattattggggccagggcaccctcgtgaccgtgtctagtacgcgtatccagaaccctgatcctgccgtgtaccagctgcgggatagcaagagcagcgacaagagcgtgtgtctgttcaccgacttcgacagccagaccaacgtgtcccagagcaaggactccgacgtgtacatcaccgataagtgcgtgctggacatgcggagcatggacttcaagagcaactccgccgtggcctggtccaacaagtccgatttcgcctgcgccaacgccttcaacaacagcattatccccgaggacacattcttcccaagccccgagagcagctgcggctttaccagcgagagctaccagcagggcgtgctgagcgccaccatcctgtacgagatcctgctgggcaaggccaccctgtacgccgtgctggtgtctgccctggtgctgatggctatggtcaagcggaaggacagccgggga

SEQ ID NO: 4026 - DNA, 1872 bp, synthetic construct
  source 1..1872: mol_type = other DNA
atggccttaccagtgaccgccttgctcctgccgctggccttgctgctccacgccgccaggccggacgagatcgtgctgacacagagccctggcaccctgagcctgtctctgggagagagagccacactgagctgtcgggccagccagtctatcagcagcagcttcctggcctggtatcagcagaagcccggccaggcccctaagctgctgatctacgccgccagcacaagagccaccggcatccccgatagattcagcggctctggcagcggcaccgacttcaccctgaccatcagcagactggaacccgaggacttcgccgtgtactactgccagcagtacggcagaagcctgagcttcggcggaggcaccaaggtggaagtgaagctcgaggacctgaagaacgtgttcccacctgaggtggccgtgttcgagcctagcgaggccgagatcagccacacccagaaagccaccctcgtgtgcctggctaccggcttctaccccgaccatgtggaactgtcttggtgggtcaacggcaaagaggtgcacagcggcgtgtgtaccgacccccagccactgaaagaacagcccgccctgaacgacagccggtactgcctgagcagcagactgagagtgtccgccaccttctggcagaacccccggaaccacttcagatgccaggtgcagttctacggcctgagcgagaacgacgagtggacccaggacagagccaagcccgtgacccagatcgtgtctgccgaagcctggggcagagccgattgcgacgtgaagctggtggaaaagagcttcgagacagacaccaacctgaacttccagaacctgagcgtgatcggcttcagaatcctgctgctgaaagtggccggctttaacctgctgatgaccctgcggctgtggtccagcagggccaagcgatctggatctggagcaacaaacttctcactactcaaacaagcaggtgacgtggaggagaatcccgggcctactagtatggactggatttggcgcatccttttccttgtcggcgctgctaccggcgcgcattccttcgaacaggtgcaactccagcagtctggccccggactcgtgaagcctagccagacactgagcctgacctgcgccatcagcggcgatagcgtgtccggcaatagcgccacctggaactggatcagacagagcccatctcggggcctggaatggctgggccggacctactaccgcagcaagtggaaccacgactacgccgagagcgtgaagtcccggatcaccatcaaccccgacaccagcaagaaccagttctccttgcaactgaacagcgtgacccccgaggacacagccgtgtattattgcgccagaggcgacagcagctcttggtacgccttcgactattggggccagggcaccctcgtgaccgtgtctagtacgcgtatccagaaccctgatcctgccgtgtaccagctgcgggatagcaagagcagcgacaagagcgtgtgtctgttcaccgacttcgacagccagaccaacgtgtcccagagcaaggactccgacgtgtacatcaccgataagtgcgtgctggacatgcggagcatggacttcaagagcaactccgccgtggcctggtccaacaagtccgatttcgcctgcgccaacgccttcaacaacagcattatccccgaggacacattcttcccaagccccgagagcagctgcggctttaccagcgagagctaccagcagggcgtgctgagcgccaccatcctgtacgagatcctgctgggcaaggccaccctgtacgccgtgctggtgtctgccctggtgctgatggctatggtcaagcggaaggacagccgggga

SEQ ID NO: 4027 - DNA, 1869 bp, synthetic construct
  source 1..1869: mol_type = other DNA
atggccttaccagtgaccgccttgctcctgccgctggccttgctgctccacgccgccaggccggaccagagcgtcgtgacacagcctcctagcgtgtcagtggcccctggcaagaccgccagaatcacctgtggccggaacaacatcggcagcaagagcgtgcactggtatcagcagaagcccggccaggctcctgtgctggtggtgtacgacgacagcgacagacccagcggcatccccgagagattcagcggcagcaactccggcaataccgccaccctgaccatcagcagagtggaagccggcgacgaggccgactactactgccaagtgtgggacagcagcagcgatcacgtggtgtttggcggaggcaccaagctgacagtgctgggtctcgaggacctgaagaacgtgttcccacctgaggtggccgtgttcgagcctagcgaggccgagatcagccacacccagaaagccaccctcgtgtgcctggctaccggcttctaccccgaccatgtggaactgtcttggtgggtcaacggcaaagaggtgcacagcggcgtgtgtaccgacccccagccactgaaagaacagcccgccctgaacgacagccggtactgcctgagcagcagactgagagtgtccgccaccttctggcagaacccccggaaccacttcagatgccaggtgcagttctacggcctgagcgagaacgacgagtggacccaggacagagccaagcccgtgacccagatcgtgtctgccgaagcctggggcagagccgattgcgacgtgaagctggtggaaaagagcttcgagacagacaccaacctgaacttccagaacctgagcgtgatcggcttcagaatcctgctgctgaaagtggccggctttaacctgctgatgaccctgcggctgtggtccagcagggccaagcgatctggatctggagcaacaaacttctcactactcaaacaagcaggtgacgtggaggagaatcccgggcctactagtatggactggatttggcgcatccttttccttgtcggcgctgctaccggcgcgcattccttcgaagtgcaactggtgcagtctggcggaggggtcatgcggcctggcggatctctgagactgtcttgtgccgccagcggcttcaccttcgacgactacggcatgagctgggtgcgccaggcccctggaaaaggcctggaatgggtgtccggcatcaactggaatggcggcagcaccggctacgccgattctgtgcggggcagattcaccatcagccgggacaacgccaagaacagcctgtacctgcagatgaactccctgcgggccgaggacaccgccctgtactattgcgccagagagcggggctacggctaccacgaccctcacgattattggggccagggcacccttgttaccgtgtcctctacgcgtatccagaaccctgatcctgccgtgtaccagctgcgggatagcaagagcagcgacaagagcgtgtgtctgttcaccgacttcgacagccagaccaacgtgtcccagagcaaggactccgacgtgtacatcaccgataagtgcgtgctggacatgcggagcatggacttcaagagcaactccgccgtggcctggtccaacaagtccgatttcgcctgcgccaacgccttcaacaacagcattatccccgaggacacattcttcccaagccccgagagcagctgcggctttaccagcgagagctaccagcagggcgtgctgagcgccaccatcctgtacgagatcctgctgggcaaggccaccctgtacgccgtgctggtgtctgccctggtgctgatggctatggtcaagcggaaggacagccgggga

SEQ ID NO: 4028 - DNA, 1908 bp, synthetic construct
  source 1..1908: mol_type = other DNA
atggccttaccagtgaccgccttgctcctgccgctggccttgctgctccacgccgccaggccggaacagaaactcatcagtgaagaagacctggaattccaggctgtcgtgacacagcctcctagcgcctctggcacaccaggccagagagtgaccatctcctgtagcggcagcagcagcaacatcggcagcaacaccgtgaactggtatcagcaggtgcccggcaccgctcccaagctgctgatctacagcaacaaccagcggcccagcggcgtgcccgatagattttctggcagcaagagcggcaccagcgccagcctggctatctctggactccagtccgaggacgaggccgactactattgcgccgcctgggacgatagcctgaacggctgggtgttcggcggaggcaccaagctgacagtgctgctcgaggacctgaagaacgtgttcccacctgaggtggccgtgttcgagcctagcgaggccgagatcagccacacccagaaagccaccctcgtgtgcctggctaccggcttctaccccgaccatgtggaactgtcttggtgggtcaacggcaaagaggtgcacagcggcgtgtgtaccgacccccagccactgaaagaacagcccgccctgaacgacagccggtactgcctgagcagcagactgagagtgtccgccaccttctggcagaacccccggaaccacttcagatgccaggtgcagttctacggcctgagcgagaacgacgagtggacccaggacagagccaagcccgtgacccagatcgtgtctgccgaagcctggggcagagccgattgcgacgtgaagctggtggaaaagagcttcgagacagacaccaacctgaacttccagaacctgagcgtgatcggcttcagaatcctgctgctgaaagtggccggctttaacctgctgatgaccctgcggctgtggtccagcagggccaagcgatctggatctggagcaacaaacttctcactactcaaacaagcaggtgacgtggaggagaatcccgggcctactagtatggactggatttggcgcatccttttccttgtcggcgctgctaccggcgcgcattccttcgaacagatgcaactggtgcagagcggagccgaagtgaaagagcctggcgagagcctgcggatctcctgcaagggcagcggctacagcttcaccaatttctggatctcttgggtgcgccagatgcccggcaagggcctggaatggatgggcagagtggaccccggctactcctacagcacctacagccctagcttccagggccacgtgaccatcagcgccgacaagagcaccagcaccgcctacctccagtggaacagcctgaaggccagcgacaccgccatgtactactgcgccagagtgcagtacagcggctattacgattggttcgacccctggggccagggcacactcgtgacagtgtcaagcacgcgtatccagaaccctgatcctgccgtgtaccagctgcgggatagcaagagcagcgacaagagcgtgtgtctgttcaccgacttcgacagccagaccaacgtgtcccagagcaaggactccgacgtgtacatcaccgataagtgcgtgctggacatgcggagcatggacttcaagagcaactccgccgtggcctggtccaacaagtccgatttcgcctgcgccaacgccttcaacaacagcattatccccgaggacacattcttcccaagccccgagagcagctgcggctttaccagcgagagctaccagcagggcgtgctgagcgccaccatcctgtacgagatcctgctgggcaaggccaccctgtacgccgtgctggtgtctgccctggtgctgatggctatggtcaagcggaaggacagccgggga

SEQ ID NO: 4029 - DNA, 1890 bp, synthetic construct
  source 1..1890: mol_type = other DNA
atggccttaccagtgaccgccttgctcctgccgctggccttgctgctccacgccgccaggccggaacagaaactcatcagtgaagaagacctggaattcgacatccagatgacccagagccccagcacactgagcgccagcgtgggcgacagagtgaccatcacctgtcgggccagccagaacatcaacaagtggctggcctggtatcagcagaggcccggaaaagccccccagctgctgatctacaaggccagcagcctggaaagcggcgtgcccagcagattttctggcagcggctctggcaccgagtacaccctgaccatcagctccctccagcccgacgacttcgccacctactactgccagcagtacaacagctacgccaccttcggccagggcaccaaggtggaaatcaagagactcgaggacctgaagaacgtgttcccacctgaggtggccgtgttcgagcctagcgaggccgagatcagccacacccagaaagccaccctcgtgtgcctggctaccggcttctaccccgaccatgtggaactgtcttggtgggtcaacggcaaagaggtgcacagcggcgtgtgtaccgacccccagccactgaaagaacagcccgccctgaacgacagccggtactgcctgagcagcagactgagagtgtccgccaccttctggcagaacccccggaaccacttcagatgccaggtgcagttctacggcctgagcgagaacgacgagtggacccaggacagagccaagcccgtgacccagatcgtgtctgccgaagcctggggcagagccgattgcgacgtgaagctggtggaaaagagcttcgagacagacaccaacctgaacttccagaacctgagcgtgatcggcttcagaatcctgctgctgaaagtggccggctttaacctgctgatgaccctgcggctgtggtccagcagggccaagcgatctggatctggagcaacaaacttctcactactcaaacaagcaggtgacgtggaggagaatcccgggcctactagtatggactggatttggcgcatccttttccttgtcggcgctgctaccggcgcgcattccttcgaacaggtgcagctggtgcagtctggggccgaagtgaagaagcctggcgagagcctgaagatcagctgcaagggctccggctacaacttctctaacaagtggatcggctgggtgcgccagctgcctggcagaggactggaatggatcgccatcatctaccccggctacagcgacatcacctacagccccagcttccagggccgcgtgacaatcagcgccgacaccagcatcaacaccgcctacctgcactggcacagcctgaaggccagcgacaccgccatgtactactgcgtgcggcatacagccctggctggcttcgattattggggcctgggcaccctcgtgaccgtgtctagtacgcgtatccagaaccctgatcctgccgtgtaccagctgcgggatagcaagagcagcgacaagagcgtgtgtctgttcaccgacttcgacagccagaccaacgtgtcccagagcaaggactccgacgtgtacatcaccgataagtgcgtgctggacatgcggagcatggacttcaagagcaactccgccgtggcctggtccaacaagtccgatttcgcctgcgccaacgccttcaacaacagcattatccccgaggacacattcttcccaagccccgagagcagctgcggctttaccagcgagagctaccagcagggcgtgctgagcgccaccatcctgtacgagatcctgctgggcaaggccaccctgtacgccgtgctggtgtctgccctggtgctgatggctatggtcaagcggaaggacagccgggga

SEQ ID NO: 4030 - DNA, 1863 bp, synthetic construct
  source 1..1863: mol_type = other DNA
atggccttaccagtgaccgccttgctcctgccgctggccttgctgctccacgccgccaggccgatcgtgctgacacagagccctgcttctctggccgtgtctctgggacagagagccaccatcagctgtagagccagcgagagcgtggacaactacggcaacaccttcatgcactggtatcagcagaagcccggccagcctcctaagctgctgatctacagagccagcaacctggaaagcggcatccccgccagattttctggcagcggcagcagaaccgacttcaccctgaccatcaatcccgtggaagccgacgacgtggcaacctactactgccagcagagcaacgaggaccctcctacatttggagccggcaccaagctggaactgaaactcgaggacctgaagaacgtgttcccacctgaggtggccgtgttcgagcctagcgaggccgagatcagccacacccagaaagccaccctcgtgtgcctggctaccggcttctaccccgaccatgtggaactgtcttggtgggtcaacggcaaagaggtgcacagcggcgtgtgtaccgacccccagccactgaaagaacagcccgccctgaacgacagccggtactgcctgagcagcagactgagagtgtccgccaccttctggcagaacccccggaaccacttcagatgccaggtgcagttctacggcctgagcgagaacgacgagtggacccaggacagagccaagcccgtgacccagatcgtgtctgccgaagcctggggcagagccgattgcgacgtgaagctggtggaaaagagcttcgagacagacaccaacctgaacttccagaacctgagcgtgatcggcttcagaatcctgctgctgaaagtggccggctttaacctgctgatgaccctgcggctgtggtccagcagggccaagcgatctggatctggagcaacaaacttctcactactcaaacaagcaggtgacgtggaggagaatcccgggcctactagtatggactggatttggcgcatccttttccttgtcggcgctgctaccggcgcgcattccttcgaacagattcagctggtgcagtctggccccgagctgaagaaacctggcgagacagtgaagatcagctgcaaggccagcggctacatcttcaccaattacggcatgaactgggtcaagcaggcccctggcaagagcttcaagtggatgggctggatcaacacctacaccggcgagagcacatacagcgccgacttcaagggcagattcgccttcagcctggaaaccagcgccagcacagcctacctgcacatcaacgacctgaagaacgaggacaccgccacctacttttgcgccagaagcggcggctacgaccctatggattattggggccagggcaccagcgtgaccgtttcttctacgcgtatccagaaccctgatcctgccgtgtaccagctgcgggatagcaagagcagcgacaagagcgtgtgtctgttcaccgacttcgacagccagaccaacgtgtcccagagcaaggactccgacgtgtacatcaccgataagtgcgtgctggacatgcggagcatggacttcaagagcaactccgccgtggcctggtccaacaagtccgatttcgcctgcgccaacgccttcaacaacagcattatccccgaggacacattcttcccaagccccgagagcagctgcggctttaccagcgagagctaccagcagggcgtgctgagcgccaccatcctgtacgagatcctgctgggcaaggccaccctgtacgccgtgctggtgtctgccctggtgctgatggctatggtcaagcggaaggacagccgggga

SEQ ID NO: 4031 - DNA, 1860 bp, synthetic construct
  source 1..1860: mol_type = other DNA
atggccttaccagtgaccgccttgctcctgccgctggccttgctgctccacgccgccaggccggagatcgtgctgacacagagccctggcaccctgagcctgtctccaggcgaaagagccacactgagctgtcgggccagccagagcgtgtccaatacctacctggcctggtatcaccagaggcccggacaggctccccggctgctgatctatggcgcttctagcagagccaccggcatccccgatagattcagcggctctggcagcggcaccgacttcgccctgacaatcagctccctggaacccgaggacttcgccgtgtactactgccagcagtacagcaactcctggaccttcggccagggcaccaaggtggaaatcaagagactcgaggacctgaagaacgtgttcccacctgaggtggccgtgttcgagcctagcgaggccgagatcagccacacccagaaagccaccctcgtgtgcctggctaccggcttctaccccgaccatgtggaactgtcttggtgggtcaacggcaaagaggtgcacagcggcgtgtgtaccgacccccagccactgaaagaacagcccgccctgaacgacagccggtactgcctgagcagcagactgagagtgtccgccaccttctggcagaacccccggaaccacttcagatgccaggtgcagttctacggcctgagcgagaacgacgagtggacccaggacagagccaagcccgtgacccagatcgtgtctgccgaagcctggggcagagccgattgcgacgtgaagctggtggaaaagagcttcgagacagacaccaacctgaacttccagaacctgagcgtgatcggcttcagaatcctgctgctgaaagtggccggctttaacctgctgatgaccctgcggctgtggtccagcagggccaagcgatctggatctggagcaacaaacttctcactactcaaacaagcaggtgacgtggaggagaatcccgggcctactagtatggactggatttggcgcatccttttccttgtcggcgctgctaccggcgcgcattccttcgaacaggtgcaactggtggaatctggcgggggagtggtgcagcctggcagaagcctgagactgtcttgtgccgccagcggcttcaccttcagcagctacgacatgcactgggtgcgccaggcccctggcaaaggactggaatgggtggccgtgatctcctacgacggcaccaacgagtattacgccgacagcgtgaagggccggttcaccatctccagagacaccagcaagaacaccctgtacctccagatgaacagcctgcgggccgaggacacagccgtgtattattgcgccagagagcggtacttcgactggtccttcgactactggggccagggaaccctggtgtccgtgtctagtacgcgtatccagaaccctgatcctgccgtgtaccagctgcgggatagcaagagcagcgacaagagcgtgtgtctgttcaccgacttcgacagccagaccaacgtgtcccagagcaaggactccgacgtgtacatcaccgataagtgcgtgctggacatgcggagcatggacttcaagagcaactccgccgtggcctggtccaacaagtccgatttcgcctgcgccaacgccttcaacaacagcattatccccgaggacacattcttcccaagccccgagagcagctgcggctttaccagcgagagctaccagcagggcgtgctgagcgccaccatcctgtacgagatcctgctgggcaaggccaccctgtacgccgtgctggtgtctgccctggtgctgatggctatggtcaagcggaaggacagccgggga

SEQ ID NO: 4032 - DNA, 1857 bp, synthetic construct
  source 1..1857: mol_type = other DNA
atggccttaccagtgaccgccttgctcctgccgctggccttgctgctccacgccgccaggccggagctgacacaggaccctgctgtgtctgttgccctgggccagacagtgcggattacctgtcaaggcgacagcctgagaagcaactacgccaactggtatcagcagaagcccggacaggctcccgtgctggttatctacggccagaacaacagacccagcggcatccccgatagattcagcggctctagctctggcaataccgccagcctgacaatcactggcgctcaggctgccgatgaggccgactactactgcgatagcagagtgtccaccggcaatcacgtggtgtttggcggcggaacaaagctgacagtgctcggacaactcgaggacctgaagaacgtgttcccacctgaggtggccgtgttcgagcctagcgaggccgagatcagccacacccagaaagccaccctcgtgtgcctggctaccggcttctaccccgaccatgtggaactgtcttggtgggtcaacggcaaagaggtgcacagcggcgtgtgtaccgacccccagccactgaaagaacagcccgccctgaacgacagccggtactgcctgagcagcagactgagagtgtccgccaccttctggcagaacccccggaaccacttcagatgccaggtgcagttctacggcctgagcgagaacgacgagtggacccaggacagagccaagcccgtgacccagatcgtgtctgccgaagcctggggcagagccgattgcgacgtgaagctggtggaaaagagcttcgagacagacaccaacctgaacttccagaacctgagcgtgatcggcttcagaatcctgctgctgaaagtggccggctttaacctgctgatgaccctgcggctgtggtccagcagggccaagcgatctggatctggagcaacaaacttctcactactcaaacaagcaggtgacgtggaggagaatcccgggcctactagtatggactggatttggcgcatccttttccttgtcggcgctgctaccggcgcgcattccttcgaagaagttcagctggtgcagagcggagccgaagtgaagaaacctggggcctctgtgaaggtgtcctgcaaggcttccggctacacctttaccagctacgccatgcactgggtccgacaggcacctggacaacggcttgaatggatgggctggatcaacgccggcaacggcaacaccaagtacagccagaaattccagggccgcgtgaccatcaccagagatacaagcgccagcaccgcctacatggaactgtctagcctgagatccgaggacaccgccgtgtactactgtgccagagacatcagctacggcagcttcgactattggggccagggcacactggtcaccgttagctctacgcgtatccagaaccctgatcctgccgtgtaccagctgcgggatagcaagagcagcgacaagagcgtgtgtctgttcaccgacttcgacagccagaccaacgtgtcccagagcaaggactccgacgtgtacatcaccgataagtgcgtgctggacatgcggagcatggacttcaagagcaactccgccgtggcctggtccaacaagtccgatttcgcctgcgccaacgccttcaacaacagcattatccccgaggacacattcttcccaagccccgagagcagctgcggctttaccagcgagagctaccagcagggcgtgctgagcgccaccatcctgtacgagatcctgctgggcaaggccaccctgtacgccgtgctggtgtctgccctggtgctgatggctatggtcaagcggaaggacagccgggga

SEQ ID NO: 4033 - DNA, 1863 bp, synthetic construct
  source 1..1863: mol_type = other DNA
atggccttaccagtgaccgccttgctcctgccgctggccttgctgctccacgccgccaggccggacatcgtgctgacacagacaccagccacactgagcgtgacacctggcgattctgtgtccctgagctgtagagccagccagagcatcagcaacaacctgcactggtatcagcagaagtcccacgagagccccagactgctgattaagaacgccagccagtctatcagcggcatccccagcaagtttagcggctctggcagcggcaccgacttcaccctgagaatcaacagcgtggaaaccgaggacttcgggatgtacttctgccagcagagcaatagctggccctacacatttggctccggcaccaagctggaaatcaaactcgaggacctgaagaacgtgttcccacctgaggtggccgtgttcgagcctagcgaggccgagatcagccacacccagaaagccaccctcgtgtgcctggctaccggcttctaccccgaccatgtggaactgtcttggtgggtcaacggcaaagaggtgcacagcggcgtgtgtaccgacccccagccactgaaagaacagcccgccctgaacgacagccggtactgcctgagcagcagactgagagtgtccgccaccttctggcagaacccccggaaccacttcagatgccaggtgcagttctacggcctgagcgagaacgacgagtggacccaggacagagccaagcccgtgacccagatcgtgtctgccgaagcctggggcagagccgattgcgacgtgaagctggtggaaaagagcttcgagacagacaccaacctgaacttccagaacctgagcgtgatcggcttcagaatcctgctgctgaaagtggccggctttaacctgctgatgaccctgcggctgtggtccagcagggccaagcgatctggatctggagcaacaaacttctcactactcaaacaagcaggtgacgtggaggagaatcccgggcctactagtatggactggatttggcgcatccttttccttgtcggcgctgctaccggcgcgcattccttcgaacaagtgaagctgcaacagagcggacccgagctggttaagccaggcgcttccgtgaagattagctgcaaggccagcggctacagcttcaccggctactacatgcactgggtcaagcagagccacggcaacatcctggactggatcggctacatctacccctacaacggcgtgtccagctacaaccagaagttcaagggcaaagccactctgaccgtggacaagagcagcagcaccgcctacatggaactgagaagcctgaccagcgaggacagcgccgtgtactattgtgccagagagcggggcctgtaccagctcagagcaatggattattggggccagggcaccagcgtgaccgtttcttctacgcgtatccagaaccctgatcctgccgtgtaccagctgcgggatagcaagagcagcgacaagagcgtgtgtctgttcaccgacttcgacagccagaccaacgtgtcccagagcaaggactccgacgtgtacatcaccgataagtgcgtgctggacatgcggagcatggacttcaagagcaactccgccgtggcctggtccaacaagtccgatttcgcctgcgccaacgccttcaacaacagcattatccccgaggacacattcttcccaagccccgagagcagctgcggctttaccagcgagagctaccagcagggcgtgctgagcgccaccatcctgtacgagatcctgctgggcaaggccaccctgtacgccgtgctggtgtctgccctggtgctgatggctatggtcaagcggaaggacagccgggga

SEQ ID NO: 4034 - DNA, 1836 bp, synthetic construct
  source 1..1836: mol_type = other DNA
atggccttaccagtgaccgccttgctcctgccgctggccttgctgctccacgccgccaggccggacatcgtgatgacacagacccctgccatcatgagcgcctctccaggccagaaagtgaccatcacatgtagcgccagcagcagcgtgaactacatgcactggtatcagcagaagctgggcagcagccccaagctgtggatctacgataccagcaaactggcccctggcgtgccagccagattttctggttctggcagcggcaccagctacagcctgacaatcagcagcatggaagccgaggatgccgccagctacttctgccatcagtggtctagctacccctacacctttggctccggcaccaagctggaaatcaaactcgaggacctgaagaacgtgttcccacctgaggtggccgtgttcgagcctagcgaggccgagatcagccacacccagaaagccaccctcgtgtgcctggctaccggcttctaccccgaccatgtggaactgtcttggtgggtcaacggcaaagaggtgcacagcggcgtgtgtaccgacccccagccactgaaagaacagcccgccctgaacgacagccggtactgcctgagcagcagactgagagtgtccgccaccttctggcagaacccccggaaccacttcagatgccaggtgcagttctacggcctgagcgagaacgacgagtggacccaggacagagccaagcccgtgacccagatcgtgtctgccgaagcctggggcagagccgattgcgacgtgaagctggtggaaaagagcttcgagacagacaccaacctgaacttccagaacctgagcgtgatcggcttcagaatcctgctgctgaaagtggccggctttaacctgctgatgaccctgcggctgtggtccagcagggccaagcgatctggatctggagcaacaaacttctcactactcaaacaagcaggtgacgtggaggagaatcccgggcctactagtatggactggatttggcgcatccttttccttgtcggcgctgctaccggcgcgcattccttcgaagaagttcagctccaagagtctggccccgacctggtcaagcctagccaaagcctgagcctgacctgtaccgtgaccggctacagcatcacaagcggctatggatggcactggatcagacagttccccggcaacaaactggaatggatgggctacatccactacagcggcagcaccacctacaatcccagcctgaagtcccggatcagcatcagcagagacaccagcaagaaccagttcttcctgcaactgaacagcgtgaccaccgaggacaccgccacctactattgtgctcggagcctgagatattggggccagggcacaaccctgaccgtgtcatctacgcgtatccagaaccctgatcctgccgtgtaccagctgcgggatagcaagagcagcgacaagagcgtgtgtctgttcaccgacttcgacagccagaccaacgtgtcccagagcaaggactccgacgtgtacatcaccgataagtgcgtgctggacatgcggagcatggacttcaagagcaactccgccgtggcctggtccaacaagtccgatttcgcctgcgccaacgccttcaacaacagcattatccccgaggacacattcttcccaagccccgagagcagctgcggctttaccagcgagagctaccagcagggcgtgctgagcgccaccatcctgtacgagatcctgctgggcaaggccaccctgtacgccgtgctggtgtctgccctggtgctgatggctatggtcaagcggaaggacagccgggga

SEQ ID NO: 4035 - DNA, 1845 bp, synthetic construct
  source 1..1845: mol_type = other DNA
atggccttaccagtgaccgccttgctcctgccgctggccttgctgctccacgccgccaggccggacatccagatgacacagagccctagcagcctgtctgccagcgtgggagacagagtgaccatcacctgtagcgccaccagcagcatcagctacatgcactggtatcagcagaagcccggcaaggcccctaaaggctggatctacgataccagcaaactggcccacggcgtgcccagcagattttctggttctggcagcggcaccgacttcaccctgacaatatctagcctccagcctgaggacttcgccacctactactgccaccagagaagaagctaccccttcaccttcggccagggcaccaaggtggaaatcaaactcgaggacctgaagaacgtgttcccacctgaggtggccgtgttcgagcctagcgaggccgagatcagccacacccagaaagccaccctcgtgtgcctggctaccggcttctaccccgaccatgtggaactgtcttggtgggtcaacggcaaagaggtgcacagcggcgtgtgtaccgacccccagccactgaaagaacagcccgccctgaacgacagccggtactgcctgagcagcagactgagagtgtccgccaccttctggcagaacccccggaaccacttcagatgccaggtgcagttctacggcctgagcgagaacgacgagtggacccaggacagagccaagcccgtgacccagatcgtgtctgccgaagcctggggcagagccgattgcgacgtgaagctggtggaaaagagcttcgagacagacaccaacctgaacttccagaacctgagcgtgatcggcttcagaatcctgctgctgaaagtggccggctttaacctgctgatgaccctgcggctgtggtccagcagggccaagcgatctggatctggagcaacaaacttctcactactcaaacaagcaggtgacgtggaggagaatcccgggcctactagtatggactggatttggcgcatccttttccttgtcggcgctgctaccggcgcgcattccttcgaagaagtgcaactggttcagagcggagccgaagtgaagaaacctggggcctctgtgaaggtgtcctgcaaggcttccggctacacctttaccaatttctggattcactgggtccgacaggctccaggccaaggactggaatggatcggagagatcgaccccagcgacagctacaccaactacaaccagaaattcaaaggccgggtcaccatcaccagagacaccagcacaagcaccgcctacctggaactgagcagcctgagaagcgaggacaccgccgtgtactactgcgccagggaaatcaccaccgtggattattggggccagggaaccctggtcaccgtgtcatctacgcgtatccagaaccctgatcctgccgtgtaccagctgcgggatagcaagagcagcgacaagagcgtgtgtctgttcaccgacttcgacagccagaccaacgtgtcccagagcaaggactccgacgtgtacatcaccgataagtgcgtgctggacatgcggagcatggacttcaagagcaactccgccgtggcctggtccaacaagtccgatttcgcctgcgccaacgccttcaacaacagcattatccccgaggacacattcttcccaagccccgagagcagctgcggctttaccagcgagagctaccagcagggcgtgctgagcgccaccatcctgtacgagatcctgctgggcaaggccaccctgtacgccgtgctggtgtctgccctggtgctgatggctatggtcaagcggaaggacagccgggga

SEQ ID NO: 4036 - DNA, 1866 bp, synthetic construct
  source 1..1866: mol_type = other DNA
atggccttaccagtgaccgccttgctcctgccgctggccttgctgctccacgccgccaggccggacatccagatgacacagagccctagcagcctgtctgccagcgtgggagacagagtgaccatcacatgcaaggccagccagggcttcaacaaatacgtggcctggtatcagcagaagcccggcaaggctcctaagctgctgatctactacaccagcacactccagcctggcgtgcccagcagattttctggctctggcagcggcagagactacaccctgacaatatccagcctccagccagaggacttcgccacctactactgtctccagtacggcaacctgctgtacgcctttggacagggcaccaaggtggaaatcaagagactcgaggacctgaagaacgtgttcccacctgaggtggccgtgttcgagcctagcgaggccgagatcagccacacccagaaagccaccctcgtgtgcctggctaccggcttctaccccgaccatgtggaactgtcttggtgggtcaacggcaaagaggtgcacagcggcgtgtgtaccgacccccagccactgaaagaacagcccgccctgaacgacagccggtactgcctgagcagcagactgagagtgtccgccaccttctggcagaacccccggaaccacttcagatgccaggtgcagttctacggcctgagcgagaacgacgagtggacccaggacagagccaagcccgtgacccagatcgtgtctgccgaagcctggggcagagccgattgcgacgtgaagctggtggaaaagagcttcgagacagacaccaacctgaacttccagaacctgagcgtgatcggcttcagaatcctgctgctgaaagtggccggctttaacctgctgatgaccctgcggctgtggtccagcagggccaagcgatctggatctggagcaacaaacttctcactactcaaacaagcaggtgacgtggaggagaatcccgggcctactagtatggactggatttggcgcatccttttccttgtcggcgctgctaccggcgcgcattccttcgaagaagttcagcttgtgcagagcggagccgaagtgaagaaacctggggcctctgtgaaggtgtcctgcaaagccagcggctacacctttaccagctactggatcggctgggtccgacaggctcctggacaaggactggaatggatcggcgacatctatcccggcggaggctacaccaactacaacgagaagttcaagggccgcgtgacaatcaccagagacacctctacaagcaccgcctacctggaactgagcagcctgagaagcgaggacaccgccgtgtactactgcgccagactggatggcagcagctacagaggcgctatggattcttggggccagggcacactggtcaccgtttcttctacgcgtatccagaaccctgatcctgccgtgtaccagctgcgggatagcaagagcagcgacaagagcgtgtgtctgttcaccgacttcgacagccagaccaacgtgtcccagagcaaggactccgacgtgtacatcaccgataagtgcgtgctggacatgcggagcatggacttcaagagcaactccgccgtggcctggtccaacaagtccgatttcgcctgcgccaacgccttcaacaacagcattatccccgaggacacattcttcccaagccccgagagcagctgcggctttaccagcgagagctaccagcagggcgtgctgagcgccaccatcctgtacgagatcctgctgggcaaggccaccctgtacgccgtgctggtgtctgccctggtgctgatggctatggtcaagcggaaggacagccgggga

SEQ ID NO: 4037 - DNA, 1854 bp, synthetic construct
  source 1..1854: mol_type = other DNA
atggccttaccagtgaccgccttgctcctgccgctggccttgctgctccacgccgccaggccggacatccagatgacacagagccctagcagcctgtctgccagcgtgggagacagagtgaccatcacctgtagagccagccaggacatccggtactacctgaactggtatcagcagaagcccggcaaggcccctaagctgctgatctatgtggcctccagcctccagagcggagtgccttctagattttctggcagcggctccggcaccgagtttaccctgacagtgtctagcttgcagcccgaggacttcgccacctactactgcctgcaagtgtacagcacccctcggacctttggacagggcaccaaggtggaaatcaaactcgaggacctgaagaacgtgttcccacctgaggtggccgtgttcgagcctagcgaggccgagatcagccacacccagaaagccaccctcgtgtgcctggctaccggcttctaccccgaccatgtggaactgtcttggtgggtcaacggcaaagaggtgcacagcggcgtgtgtaccgacccccagccactgaaagaacagcccgccctgaacgacagccggtactgcctgagcagcagactgagagtgtccgccaccttctggcagaacccccggaaccacttcagatgccaggtgcagttctacggcctgagcgagaacgacgagtggacccaggacagagccaagcccgtgacccagatcgtgtctgccgaagcctggggcagagccgattgcgacgtgaagctggtggaaaagagcttcgagacagacaccaacctgaacttccagaacctgagcgtgatcggcttcagaatcctgctgctgaaagtggccggctttaacctgctgatgaccctgcggctgtggtccagcagggccaagcgatctggatctggagcaacaaacttctcactactcaaacaagcaggtgacgtggaggagaatcccgggcctactagtatggactggatttggcgcatccttttccttgtcggcgctgctaccggcgcgcattccttcgaagaagtgcagcttgttgaatctggcggcggactggctaagcctggcggatctctgagactgtcttgtgccgccagcggcttccggttcaccttcaacaactactacatggactgggtccgacaggcccctggacaaggacttgaatgggtgtccagaatcagcagcagcggcgaccctacttggtacgccgattctgtgaagggcagattcaccatcagcagagagaacgccaagaacaccctgttcctccagatgaactccctgagagccgaggacaccgccgtgtactattgtgcctctctgaccaccggcagcgattcttggggacagggcgtgctggttaccgtgtcatctacgcgtatccagaaccctgatcctgccgtgtaccagctgcgggatagcaagagcagcgacaagagcgtgtgtctgttcaccgacttcgacagccagaccaacgtgtcccagagcaaggactccgacgtgtacatcaccgataagtgcgtgctggacatgcggagcatggacttcaagagcaactccgccgtggcctggtccaacaagtccgatttcgcctgcgccaacgccttcaacaacagcattatccccgaggacacattcttcccaagccccgagagcagctgcggctttaccagcgagagctaccagcagggcgtgctgagcgccaccatcctgtacgagatcctgctgggcaaggccaccctgtacgccgtgctggtgtctgccctggtgctgatggctatggtcaagcggaaggacagccgggga

SEQ ID NO: 4038 - DNA, 1857 bp, synthetic construct
  source 1..1857: mol_type = other DNA
atggccttaccagtgaccgccttgctcctgccgctggccttgctgctccacgccgccaggccggagatcgtgatgacacagagccccgccacactgagtgtgtctccaggcgaaagagccacactgtcctgtagagccagccagagcgtgtccagaaacctggcctggtatcagcagaagcctggacaggctccccggctgttgatctacggcgcttctacaagagccaccggcattcccgccagattttctggctctggcagcggcaccgagttcaccctgacaatcggaagcctccagagcgaggacttcgccgtgtactactgccagcagtacaagacctggcctcggacctttggacagggcaccaacgtggaaatcaaactcgaggacctgaagaacgtgttcccacctgaggtggccgtgttcgagcctagcgaggccgagatcagccacacccagaaagccaccctcgtgtgcctggctaccggcttctaccccgaccatgtggaactgtcttggtgggtcaacggcaaagaggtgcacagcggcgtgtgtaccgacccccagccactgaaagaacagcccgccctgaacgacagccggtactgcctgagcagcagactgagagtgtccgccaccttctggcagaacccccggaaccacttcagatgccaggtgcagttctacggcctgagcgagaacgacgagtggacccaggacagagccaagcccgtgacccagatcgtgtctgccgaagcctggggcagagccgattgcgacgtgaagctggtggaaaagagcttcgagacagacaccaacctgaacttccagaacctgagcgtgatcggcttcagaatcctgctgctgaaagtggccggctttaacctgctgatgaccctgcggctgtggtccagcagggccaagcgatctggatctggagcaacaaacttctcactactcaaacaagcaggtgacgtggaggagaatcccgggcctactagtatggactggatttggcgcatccttttccttgtcggcgctgctaccggcgcgcattccttcgaacaagttcagctgcaacaatggggagccggcctgctgaagcctagcgaaacactgtctctgacctgcgccgtgttcggcggctctttcagcggctactactggtcctggatcagacagcctcctggcaaaggactggaatggatcggcgagatcaaccaccggggcaacaccaacgacaaccccagcctgaaaagcagagtgaccatcagcgtggacaccagcaagaaccagttcgccctgaagctgagcagcgtgacagccgctgataccgccgtgtattattgcgccagagagcggggctacacctacggcaatttcgatcactggggccagggcaccctggtcacagtttcttctacgcgtatccagaaccctgatcctgccgtgtaccagctgcgggatagcaagagcagcgacaagagcgtgtgtctgttcaccgacttcgacagccagaccaacgtgtcccagagcaaggactccgacgtgtacatcaccgataagtgcgtgctggacatgcggagcatggacttcaagagcaactccgccgtggcctggtccaacaagtccgatttcgcctgcgccaacgccttcaacaacagcattatccccgaggacacattcttcccaagccccgagagcagctgcggctttaccagcgagagctaccagcagggcgtgctgagcgccaccatcctgtacgagatcctgctgggcaaggccaccctgtacgccgtgctggtgtctgccctggtgctgatggctatggtcaagcggaaggacagccgggga

SEQ ID NO: 4039 - DNA, 1860 bp, synthetic construct
  source 1..1860: mol_type = other DNA
atggccttaccagtgaccgccttgctcctgccgctggccttgctgctccacgccgccaggccggagatcgtgatgacccctagcagcgccacactgagtgtgtctccaggcgaaagagccacactgtcctgtagagccagccagagcgtgtccagaaacctggcctggtatcagcagaagcctggacaggctccccggctgttgatctacggcgcttctacaagagccaccggcattcccgccagattttctggctctggcagcggcaccgagttcaccctgacaatctctagcctccagagcgaggacttcgccgtgtactactgccaccagtacagcaactggatgtgcagcttcggccagggcaccaagctggaaatcaaactcgaggacctgaagaacgtgttcccacctgaggtggccgtgttcgagcctagcgaggccgagatcagccacacccagaaagccaccctcgtgtgcctggctaccggcttctaccccgaccatgtggaactgtcttggtgggtcaacggcaaagaggtgcacagcggcgtgtgtaccgacccccagccactgaaagaacagcccgccctgaacgacagccggtactgcctgagcagcagactgagagtgtccgccaccttctggcagaacccccggaaccacttcagatgccaggtgcagttctacggcctgagcgagaacgacgagtggacccaggacagagccaagcccgtgacccagatcgtgtctgccgaagcctggggcagagccgattgcgacgtgaagctggtggaaaagagcttcgagacagacaccaacctgaacttccagaacctgagcgtgatcggcttcagaatcctgctgctgaaagtggccggctttaacctgctgatgaccctgcggctgtggtccagcagggccaagcgatctggatctggagcaacaaacttctcactactcaaacaagcaggtgacgtggaggagaatcccgggcctactagtatggactggatttggcgcatccttttccttgtcggcgctgctaccggcgcgcattccttcgaagaagttcagctccttgagtcaggtggcggcctggttcaacctggcggatctctgagactgagctgtgccgccagcggcttcacctttagcagatacgccatgaactgggtccgacaggcccctggcaaaggactggaatgggtgtccggcatctctggaagcggcggcagaacctactacgccgattctgtgaagggcagattcaccatcagccgggacaacagcaagaacaccctgtacctccagatgaacagcctgagagccgaggacacagccgtgtattattgcgccaaggaccgggacttttggagcggcccttttgactattggggccagggaaccctggtcaccgttagctctacgcgtatccagaaccctgatcctgccgtgtaccagctgcgggatagcaagagcagcgacaagagcgtgtgtctgttcaccgacttcgacagccagaccaacgtgtcccagagcaaggactccgacgtgtacatcaccgataagtgcgtgctggacatgcggagcatggacttcaagagcaactccgccgtggcctggtccaacaagtccgatttcgcctgcgccaacgccttcaacaacagcattatccccgaggacacattcttcccaagccccgagagcagctgcggctttaccagcgagagctaccagcagggcgtgctgagcgccaccatcctgtacgagatcctgctgggcaaggccaccctgtacgccgtgctggtgtctgccctggtgctgatggctatggtcaagcggaaggacagccgggga

SEQ ID NO: 4040 - DNA, 1875 bp, synthetic construct
  source 1..1875: mol_type = other DNA
atggccttaccagtgaccgccttgctcctgccgctggccttgctgctccacgccgccaggccggacatccagatgacccagagccccagcagcctgtctgccagcgtgggcgacagagtgaccatcacatgcaaggccagcaagaacatcagaagctacctggcctggtatcagcagaagcccggcaaggcccccaagctgctgatctacagcggcagcacactgcacagcggcgtgcccagcagattttccggctctggcagcggcaccgacttcaccctgaccatctctagcctccagcccgaggacttcgccacctactactgccagcagcaccacgagtaccccctgacattcggccagggcaccaaggtggaaatcaagagactcgaggacctgaagaacgtgttcccacctgaggtggccgtgttcgagcctagcgaggccgagatcagccacacccagaaagccaccctcgtgtgcctggctaccggcttctaccccgaccatgtggaactgtcttggtgggtcaacggcaaagaggtgcacagcggcgtgtgtaccgacccccagccactgaaagaacagcccgccctgaacgacagccggtactgcctgagcagcagactgagagtgtccgccaccttctggcagaacccccggaaccacttcagatgccaggtgcagttctacggcctgagcgagaacgacgagtggacccaggacagagccaagcccgtgacccagatcgtgtctgccgaagcctggggcagagccgattgcgacgtgaagctggtggaaaagagcttcgagacagacaccaacctgaacttccagaacctgagcgtgatcggcttcagaatcctgctgctgaaagtggccggctttaacctgctgatgaccctgcggctgtggtccagcagggccaagcgatctggatctggagcaacaaacttctcactactcaaacaagcaggtgacgtggaggagaatcccgggcctactagtatggactggatttggcgcatccttttccttgtcggcgctgctaccggcgcgcattccttcgaacaggtgcaactccaggaatctggccccggactcgtgaagcccagcgagacactgagcctgacctgtaccgtgtccggctacaccatcaccagcggctacgactggtcctggatcagacagcctcctggcaagggcctggaatggatcggctacatcaactacggcggctccaccaactacaagcccagcctgggaagccgcgtgacaatcagcgtggacacctccaagaaccagttcagcctgaagctgagcagcgtgacagccgccgataccgccgtgtactactgcgcccggtacaacgagtacaagagctacatctacgattggtacttcgacttctggggccagggaaccctcgtgaccgtgtctagtacgcgtatccagaaccctgatcctgccgtgtaccagctgcgggatagcaagagcagcgacaagagcgtgtgtctgttcaccgacttcgacagccagaccaacgtgtcccagagcaaggactccgacgtgtacatcaccgataagtgcgtgctggacatgcggagcatggacttcaagagcaactccgccgtggcctggtccaacaagtccgatttcgcctgcgccaacgccttcaacaacagcattatccccgaggacacattcttcccaagccccgagagcagctgcggctttaccagcgagagctaccagcagggcgtgctgagcgccaccatcctgtacgagatcctgctgggcaaggccaccctgtacgccgtgctggtgtctgccctggtgctgatggctatggtcaagcggaaggacagccgggga

SEQ ID NO: 4041 - DNA, 1881 bp, synthetic construct
  source 1..1881: mol_type = other DNA
atggccttaccagtgaccgccttgctcctgccgctggccttgctgctccacgccgccaggccgcagtctgtggtcacacagcctccatccgtgtctgctgcccctggacagaaagtgaccatctcctgtagcggcagcagcagcaacatcggcaacaactacgtgtcctggtatcagcagctccccggcacagctcccaaactgctgatctacgacaacaacaagcggcccagcggcatccccgatagattttctggcagcaagagcggcaccagcgccacactgggaattaccggacttcagacaggcgacgaggccgactactactgtggcacatgggatggcagcctgtacaccatgcttttcggcggaggcaccaagctgacagtgcttctcgaggacctgaagaacgtgttcccacctgaggtggccgtgttcgagcctagcgaggccgagatcagccacacccagaaagccaccctcgtgtgcctggctaccggcttctaccccgaccatgtggaactgtcttggtgggtcaacggcaaagaggtgcacagcggcgtgtgtaccgacccccagccactgaaagaacagcccgccctgaacgacagccggtactgcctgagcagcagactgagagtgtccgccaccttctggcagaacccccggaaccacttcagatgccaggtgcagttctacggcctgagcgagaacgacgagtggacccaggacagagccaagcccgtgacccagatcgtgtctgccgaagcctggggcagagccgattgcgacgtgaagctggtggaaaagagcttcgagacagacaccaacctgaacttccagaacctgagcgtgatcggcttcagaatcctgctgctgaaagtggccggctttaacctgctgatgaccctgcggctgtggtccagcagggccaagcgatctggatctggagcaacaaacttctcactactcaaacaagcaggtgacgtggaggagaatcccgggcctactagtatggactggatttggcgcatccttttccttgtcggcgctgctaccggcgcgcattccttcgaagaagtgcaactggtggaatctggcggcggactggttaagcctggcggatctctgagactgtcttgtgccgccagcggcttcaccttcagcaatgcctggatgagctgggttcgacaggcccctggaaaaggactggaatgggtcggattcatccggtccaaagcctacggcggcaccacagaatatgccgcctctgtgaagggcagattcaccatcagccgggacgacagcaagtctatcgcctacctccagatgaacaacctgaaaaccgaggacaccgccgtgtactactgcgccagagatggcctgtacagcagctcttggtacgacagcgattactggggccagggcacactggtcacagtgtcatctacgcgtatccagaaccctgatcctgccgtgtaccagctgcgggatagcaagagcagcgacaagagcgtgtgtctgttcaccgacttcgacagccagaccaacgtgtcccagagcaaggactccgacgtgtacatcaccgataagtgcgtgctggacatgcggagcatggacttcaagagcaactccgccgtggcctggtccaacaagtccgatttcgcctgcgccaacgccttcaacaacagcattatccccgaggacacattcttcccaagccccgagagcagctgcggctttaccagcgagagctaccagcagggcgtgctgagcgccaccatcctgtacgagatcctgctgggcaaggccaccctgtacgccgtgctggtgtctgccctggtgctgatggctatggtcaagcggaaggacagccgggga

SEQ ID NO: 4042 - DNA, 1896 bp, synthetic construct
  source 1..1896: mol_type = other DNA
atggccttaccagtgaccgccttgctcctgccgctggccttgctgctccacgccgccaggccgcagtctgtgctgacacagcctcctagtgtgtctggcgctcctggacagagagtgaccatctcttgtaccggcagcagcagcaatatcggagccggctatgacgtgcactggtatcagcagctccctggcacagcccctaaactgctgatcttcggcaacagcaacagacccagcggcgtgcccgatagattcagcggctttaagagcggcacaagcgccagcctggctatcactggactgcaagccgaggacgaggccgactacttctgccagagctacgatagcagcctgagcggcagcggagtgtttggcacaggcaccaaagtgacagtgcttggcctcgaggacctgaagaacgtgttcccacctgaggtggccgtgttcgagcctagcgaggccgagatcagccacacccagaaagccaccctcgtgtgcctggctaccggcttctaccccgaccatgtggaactgtcttggtgggtcaacggcaaagaggtgcacagcggcgtgtgtaccgacccccagccactgaaagaacagcccgccctgaacgacagccggtactgcctgagcagcagactgagagtgtccgccaccttctggcagaacccccggaaccacttcagatgccaggtgcagttctacggcctgagcgagaacgacgagtggacccaggacagagccaagcccgtgacccagatcgtgtctgccgaagcctggggcagagccgattgcgacgtgaagctggtggaaaagagcttcgagacagacaccaacctgaacttccagaacctgagcgtgatcggcttcagaatcctgctgctgaaagtggccggctttaacctgctgatgaccctgcggctgtggtccagcagggccaagcgatctggatctggagcaacaaacttctcactactcaaacaagcaggtgacgtggaggagaatcccgggcctactagtatggactggatttggcgcatccttttccttgtcggcgctgctaccggcgcgcattccttcgaacaaatgcaactggttcaaagcggcggtggcctggtgcaacctggaagaagtctgagactgagctgtgccgccagcggcttcaccttcgatgattacgccatgcactgggtccgacaggcccctggaaaaggactggaatgggtgtccggcatctcctggaatagcggctctatcggctacgccgacagcgtgaagggcagattcaccatcagccgggacaacgccaagaacagcctgtacctccagatgaactccctgagagccgaggatacagccctgtactactgcgccaaggacatccacagcggcagctactacggcctgctgtactacgctatggacgtgtggggccagggcacaaccgtgacagtttcttctacgcgtatccagaaccctgatcctgccgtgtaccagctgcgggatagcaagagcagcgacaagagcgtgtgtctgttcaccgacttcgacagccagaccaacgtgtcccagagcaaggactccgacgtgtacatcaccgataagtgcgtgctggacatgcggagcatggacttcaagagcaactccgccgtggcctggtccaacaagtccgatttcgcctgcgccaacgccttcaacaacagcattatccccgaggacacattcttcccaagccccgagagcagctgcggctttaccagcgagagctaccagcagggcgtgctgagcgccaccatcctgtacgagatcctgctgggcaaggccaccctgtacgccgtgctggtgtctgccctggtgctgatggctatggtcaagcggaaggacagccgggga

SEQ ID NO: 4043 - DNA, 1896 bp, synthetic construct
  source 1..1896: mol_type = other DNA
atggccttaccagtgaccgccttgctcctgccgctggccttgctgctccacgccgccaggccgctgcctgttctgacacagcctccatctgcctctggcacacctggacagagagtgaccatcagctgtagcggcagaagcagcaacatcggcagcaacagcgtgaactggtacagacagcttcctggcgctgcccctaagctgctgatctacagcaacaaccagcggcctcctggcgtgccagtcagattttctggcagcaagagcggcacaagcgccagcctggctatttctggactccagtctgaggacgaggccacctactactgtgccacctgggacgacaacctgaacgtgcactacgtgttcggcaccggcaccaaagtgacagtgcttggaagtagactcgaggacctgaagaacgtgttcccacctgaggtggccgtgttcgagcctagcgaggccgagatcagccacacccagaaagccaccctcgtgtgcctggctaccggcttctaccccgaccatgtggaactgtcttggtgggtcaacggcaaagaggtgcacagcggcgtgtgtaccgacccccagccactgaaagaacagcccgccctgaacgacagccggtactgcctgagcagcagactgagagtgtccgccaccttctggcagaacccccggaaccacttcagatgccaggtgcagttctacggcctgagcgagaacgacgagtggacccaggacagagccaagcccgtgacccagatcgtgtctgccgaagcctggggcagagccgattgcgacgtgaagctggtggaaaagagcttcgagacagacaccaacctgaacttccagaacctgagcgtgatcggcttcagaatcctgctgctgaaagtggccggctttaacctgctgatgaccctgcggctgtggtccagcagggccaagcgatctggatctggagcaacaaacttctcactactcaaacaagcaggtgacgtggaggagaatcccgggcctactagtatggactggatttggcgcatccttttccttgtcggcgctgctaccggcgcgcattccttcgaacttgaaatggctcaggtgcagctggtgcagagcggagccgaagtgaagaaacctggcagcagcgtgaaggtgtcctgcaaagcttctggcggcaccttcagcagctacgccatctcttgggttcgacaggcccctggacaaggactggaatggatgggcagaatcatccccatcctgggaatcgccaactacgcccagaaattccagggcagagtgacaatcaccgccgacaagagcaccagcaccgcctacatggaactgagcagcctgagaagcgaggacaccgccgtgtactattgtgcaagaggcggctactacagccacgacatgtggagcgaagattggggccagggcacactggtcacagtgtcatctacgcgtatccagaaccctgatcctgccgtgtaccagctgcgggatagcaagagcagcgacaagagcgtgtgtctgttcaccgacttcgacagccagaccaacgtgtcccagagcaaggactccgacgtgtacatcaccgataagtgcgtgctggacatgcggagcatggacttcaagagcaactccgccgtggcctggtccaacaagtccgatttcgcctgcgccaacgccttcaacaacagcattatccccgaggacacattcttcccaagccccgagagcagctgcggctttaccagcgagagctaccagcagggcgtgctgagcgccaccatcctgtacgagatcctgctgggcaaggccaccctgtacgccgtgctggtgtctgccctggtgctgatggctatggtcaagcggaaggacagccgggga

SEQ ID NO: 4044 - DNA, 1878 bp, synthetic construct
  source 1..1878: mol_type = other DNA
atggccttaccagtgaccgccttgctcctgccgctggccttgctgctccacgccgccaggccggacttcgtgatgacacagagccctgatagcctggccgtgtctctcggcgagcgagtgaccatgagctgcaagtctagccagagcctgctgaacagcggcaaccagaagaactacctgacctggtatcagcagaagcccggccagcctcctaagctgctgatctactgggccagcaccagagaaagcggcgtgcccgatagattttctggctctggcagcggcaccgacttcaccctgacaatttctagcctgcaagccgaggacgtggccgtgtactactgccagaacgactacagctacccctacaccttcggccagggcaccaagctggaaatcaaactcgaggacctgaagaacgtgttcccacctgaggtggccgtgttcgagcctagcgaggccgagatcagccacacccagaaagccaccctcgtgtgcctggctaccggcttctaccccgaccatgtggaactgtcttggtgggtcaacggcaaagaggtgcacagcggcgtgtgtaccgacccccagccactgaaagaacagcccgccctgaacgacagccggtactgcctgagcagcagactgagagtgtccgccaccttctggcagaacccccggaaccacttcagatgccaggtgcagttctacggcctgagcgagaacgacgagtggacccaggacagagccaagcccgtgacccagatcgtgtctgccgaagcctggggcagagccgattgcgacgtgaagctggtggaaaagagcttcgagacagacaccaacctgaacttccagaacctgagcgtgatcggcttcagaatcctgctgctgaaagtggccggctttaacctgctgatgaccctgcggctgtggtccagcagggccaagcgatctggatctggagcaacaaacttctcactactcaaacaagcaggtgacgtggaggagaatcccgggcctactagtatggactggatttggcgcatccttttccttgtcggcgctgctaccggcgcgcattccttcgaagaagtgcaactggttcagagcggagccgagctgaagaaacctggggccagcgtgaaggtgtcctgtaaagccagcggctacacctttaccgactactacatgaaatgggtccgacaggccccaggccagggactcgaatggatcggcgatattatccccagcaacggggccaccttctacaaccagaaattcaagggccgcgtgaccatcaccgtggacaagagcacaagcaccgcctacatggaactgagcagcctgagaagcgaggacaccgccgtgtattattgcgccagaagccatctgctgcgggccagttggttcgcctattggggacagggaaccctggtcaccgttagctctacgcgtatccagaaccctgatcctgccgtgtaccagctgcgggatagcaagagcagcgacaagagcgtgtgtctgttcaccgacttcgacagccagaccaacgtgtcccagagcaaggactccgacgtgtacatcaccgataagtgcgtgctggacatgcggagcatggacttcaagagcaactccgccgtggcctggtccaacaagtccgatttcgcctgcgccaacgccttcaacaacagcattatccccgaggacacattcttcccaagccccgagagcagctgcggctttaccagcgagagctaccagcagggcgtgctgagcgccaccatcctgtacgagatcctgctgggcaaggccaccctgtacgccgtgctggtgtctgccctggtgctgatggctatggtcaagcggaaggacagccgggga

SEQ ID NO: 4045 - DNA, 1878 bp, synthetic construct
  source 1..1878: mol_type = other DNA
atggccttaccagtgaccgccttgctcctgccgctggccttgctgctccacgccgccaggccggacttcgtgatgacacagagccctgatagcctggccgtgtctctcggcgagcgagtgaccatgagctgcaagtctagccagagcctgctgaacagcggcaaccagaagaactacctgacctggtatcagcagaagcccggccagcctcctaagctgctgatctactgggccagcaccagagaaagcggcgtgcccgatagattttctggctctggcagcggcaccgacttcaccctgacaatttctagcctgcaagccgaggacgtggccgtgtactactgccagaacgactacagctacccctacaccttcggccagggcaccaagctggaaatcaaactcgaggacctgaagaacgtgttcccacctgaggtggccgtgttcgagcctagcgaggccgagatcagccacacccagaaagccaccctcgtgtgcctggctaccggcttctaccccgaccatgtggaactgtcttggtgggtcaacggcaaagaggtgcacagcggcgtgtgtaccgacccccagccactgaaagaacagcccgccctgaacgacagccggtactgcctgagcagcagactgagagtgtccgccaccttctggcagaacccccggaaccacttcagatgccaggtgcagttctacggcctgagcgagaacgacgagtggacccaggacagagccaagcccgtgacccagatcgtgtctgccgaagcctggggcagagccgattgcgacgtgaagctggtggaaaagagcttcgagacagacaccaacctgaacttccagaacctgagcgtgatcggcttcagaatcctgctgctgaaagtggccggctttaacctgctgatgaccctgcggctgtggtccagcagggccaagcgatctggatctggagcaacaaacttctcactactcaaacaagcaggtgacgtggaggagaatcccgggcctactagtatggactggatttggcgcatccttttccttgtcggcgctgctaccggcgcgcattccttcgaacaagtgcaactggttcagagcggagccgagctgaagaaacctggggccagcgtgaaggtgtcctgtaaagccagcggctacacctttaccgactactacatgaaatgggtccgacaggccccaggccagggactcgaatggatcggcgatattatccccagcaacggggccaccttctacaaccagaaattcaagggccgcgtgaccatcaccgtggacaagagcacaagcaccgcctacatggaactgagcagcctgagaagcgaggacaccgccgtgtattattgcgccagaagccatctgctgcgggccagttggttcgcctattggggacagggaaccctggtcaccgttagctctacgcgtatccagaaccctgatcctgccgtgtaccagctgcgggatagcaagagcagcgacaagagcgtgtgtctgttcaccgacttcgacagccagaccaacgtgtcccagagcaaggactccgacgtgtacatcaccgataagtgcgtgctggacatgcggagcatggacttcaagagcaactccgccgtggcctggtccaacaagtccgatttcgcctgcgccaacgccttcaacaacagcattatccccgaggacacattcttcccaagccccgagagcagctgcggctttaccagcgagagctaccagcagggcgtgctgagcgccaccatcctgtacgagatcctgctgggcaaggccaccctgtacgccgtgctggtgtctgccctggtgctgatggctatggtcaagcggaaggacagccgggga

SEQ ID NO: 4046 - DNA, 1848 bp, synthetic construct
  source 1..1848: mol_type = other DNA
atggccttaccagtgaccgccttgctcctgccgctggccttgctgctccacgccgccaggccggacgtgcagatcacacagagccctagctacctggctgcctctcctggcgagacaatcaccatcaactgtcgggccagcaagagcatcagcaaggacctggcctggtatcaagagaagcccggcaagaccaacaagctgctgatctacagcggcagcacactccagtctggcatccccagcagattttccggctctggcagcggcaccgatttcaccctgaccataagcagcctggaacctgaggacttcgccatgtactactgccagcagcacaacaagtacccctacacctttggcggaggcaccaagctggaaatcaagagactcgaggacctgaagaacgtgttcccacctgaggtggccgtgttcgagcctagcgaggccgagatcagccacacccagaaagccaccctcgtgtgcctggctaccggcttctaccccgaccatgtggaactgtcttggtgggtcaacggcaaagaggtgcacagcggcgtgtgtaccgacccccagccactgaaagaacagcccgccctgaacgacagccggtactgcctgagcagcagactgagagtgtccgccaccttctggcagaacccccggaaccacttcagatgccaggtgcagttctacggcctgagcgagaacgacgagtggacccaggacagagccaagcccgtgacccagatcgtgtctgccgaagcctggggcagagccgattgcgacgtgaagctggtggaaaagagcttcgagacagacaccaacctgaacttccagaacctgagcgtgatcggcttcagaatcctgctgctgaaagtggccggctttaacctgctgatgaccctgcggctgtggtccagcagggccaagcgatctggatctggagcaacaaacttctcactactcaaacaagcaggtgacgtggaggagaatcccgggcctactagtatggactggatttggcgcatccttttccttgtcggcgctgctaccggcgcgcattccttcgaacaagttcaactgcaacagcctggggccgagcttgttagacctggcgcttctgtgaagctgagctgcaaggccagcggctacaccttcaccagctactggatgaactgggtcaagcagcggcctgaccagggcctcgaatggatcggcagaatcgacccctacgacagcgagacacactacaaccagaagttcaaggacaaggccatcctgaccgtggacaagagcagctccaccgcctacatgcaactgagcagcctgacctctgaggatagcgccgtgtactattgcgccagaggcaactgggacgactattggggccagggcacaaccctgacagtgtctagtacgcgtatccagaaccctgatcctgccgtgtaccagctgcgggatagcaagagcagcgacaagagcgtgtgtctgttcaccgacttcgacagccagaccaacgtgtcccagagcaaggactccgacgtgtacatcaccgataagtgcgtgctggacatgcggagcatggacttcaagagcaactccgccgtggcctggtccaacaagtccgatttcgcctgcgccaacgccttcaacaacagcattatccccgaggacacattcttcccaagccccgagagcagctgcggctttaccagcgagagctaccagcagggcgtgctgagcgccaccatcctgtacgagatcctgctgggcaaggccaccctgtacgccgtgctggtgtctgccctggtgctgatggctatggtcaagcggaaggacagccgggga

SEQ ID NO: 4047 - DNA, 1854 bp, synthetic construct
  source 1..1854: mol_type = other DNA
atggccttaccagtgaccgccttgctcctgccgctggccttgctgctccacgccgccaggccggagatcgtgctgacacagagccctaccagcatgacagcctctccaggcgagcaagtgaccatcacctgtagagccagcagcagcatcaactacatgcactggtatcagcagaagcctggcgcaagccccagaccttggatctacgagacaagcaagctggcctccggcgtgcccgatagattttctggatctgccagcggcaccagctacagcctgaccatcaacaacatggaagccgaggacgccgccacctactactgccagcagtggaattacccctcctggacctttggcggaggcaccaagctggaacttaaactcgaggacctgaagaacgtgttcccacctgaggtggccgtgttcgagcctagcgaggccgagatcagccacacccagaaagccaccctcgtgtgcctggctaccggcttctaccccgaccatgtggaactgtcttggtgggtcaacggcaaagaggtgcacagcggcgtgtgtaccgacccccagccactgaaagaacagcccgccctgaacgacagccggtactgcctgagcagcagactgagagtgtccgccaccttctggcagaacccccggaaccacttcagatgccaggtgcagttctacggcctgagcgagaacgacgagtggacccaggacagagccaagcccgtgacccagatcgtgtctgccgaagcctggggcagagccgattgcgacgtgaagctggtggaaaagagcttcgagacagacaccaacctgaacttccagaacctgagcgtgatcggcttcagaatcctgctgctgaaagtggccggctttaacctgctgatgaccctgcggctgtggtccagcagggccaagcgatctggatctggagcaacaaacttctcactactcaaacaagcaggtgacgtggaggagaatcccgggcctactagtatggactggatttggcgcatccttttccttgtcggcgctgctaccggcgcgcattccttcgaagaagtgcagctcgttgagtctggtggcggactggttcagcctggaagaagcctgaagctgagctgtgccgccagcggcttcaccttcagcgactacaatatggcctgggtccgacaggcccctaagaaaggactggaatgggtcgccaccatcctgtacgatggcggcagaacctactaccggggcagcgtgaagggcagattcaccatcagcagagacaacgccaagagcaccctgtacctgcggatggactctctgagaagcgaggataccgccacatattactgtgccacacacagccggggcaccgactactttgattattggggccagggcgtgatggttaccgtgtctagtacgcgtatccagaaccctgatcctgccgtgtaccagctgcgggatagcaagagcagcgacaagagcgtgtgtctgttcaccgacttcgacagccagaccaacgtgtcccagagcaaggactccgacgtgtacatcaccgataagtgcgtgctggacatgcggagcatggacttcaagagcaactccgccgtggcctggtccaacaagtccgatttcgcctgcgccaacgccttcaacaacagcattatccccgaggacacattcttcccaagccccgagagcagctgcggctttaccagcgagagctaccagcagggcgtgctgagcgccaccatcctgtacgagatcctgctgggcaaggccaccctgtacgccgtgctggtgtctgccctggtgctgatggctatggtcaagcggaaggacagccgggga

SEQ ID NO: 4048 - DNA, 1881 bp, synthetic construct
  source 1..1881: mol_type = other DNA
atggccttaccagtgaccgccttgctcctgccgctggccttgctgctccacgccgccaggccggacatcgtgatgacacagagcccttctagcctggccgtgtctgagggcgagacagtgaccatcaactgcaagagcagccagagcttcctgtctagcggcgacggcaagaattacgtggcctggtatcagtacaagcccggacagagccccaagctgctgatctactgggccagcacaagacagagcggcgtgcccgatagattcatcggctctggcagcggcaccgacttcaccctgacaatctctacagtgcaggccgaggacctggctatctactactgccagcagtattacgacacccctctgacctttggctccggcaccaagctggaaatcaaactcgaggacctgaagaacgtgttcccacctgaggtggccgtgttcgagcctagcgaggccgagatcagccacacccagaaagccaccctcgtgtgcctggctaccggcttctaccccgaccatgtggaactgtcttggtgggtcaacggcaaagaggtgcacagcggcgtgtgtaccgacccccagccactgaaagaacagcccgccctgaacgacagccggtactgcctgagcagcagactgagagtgtccgccaccttctggcagaacccccggaaccacttcagatgccaggtgcagttctacggcctgagcgagaacgacgagtggacccaggacagagccaagcccgtgacccagatcgtgtctgccgaagcctggggcagagccgattgcgacgtgaagctggtggaaaagagcttcgagacagacaccaacctgaacttccagaacctgagcgtgatcggcttcagaatcctgctgctgaaagtggccggctttaacctgctgatgaccctgcggctgtggtccagcagggccaagcgatctggatctggagcaacaaacttctcactactcaaacaagcaggtgacgtggaggagaatcccgggcctactagtatggactggatttggcgcatccttttccttgtcggcgctgctaccggcgcgcattccttcgaagaagtgaagctgcaagagtctggccccagcctggtgcagagtagccaaacactgagcctgacctgtaccgtgtccggctttagcctgaccagctaccacatccactgggtccgacagacccctggcaaaggactggaatggatgggcgtgatgtggagcgacggcgacaccagctataacagcgccctgaagtcccggctgagcatcagcagagatacaagccagagccaggtgttcctgaagatgaacagcctccagaccgaggacaccgccacctactattgtgccagaggctactacagcagctacctgtacctttggttcgcctattggggccagggcaccctggttacagtcagctctacgcgtatccagaaccctgatcctgccgtgtaccagctgcgggatagcaagagcagcgacaagagcgtgtgtctgttcaccgacttcgacagccagaccaacgtgtcccagagcaaggactccgacgtgtacatcaccgataagtgcgtgctggacatgcggagcatggacttcaagagcaactccgccgtggcctggtccaacaagtccgatttcgcctgcgccaacgccttcaacaacagcattatccccgaggacacattcttcccaagccccgagagcagctgcggctttaccagcgagagctaccagcagggcgtgctgagcgccaccatcctgtacgagatcctgctgggcaaggccaccctgtacgccgtgctggtgtctgccctggtgctgatggctatggtcaagcggaaggacagccgggga

SEQ ID NO: 4049 - DNA, 1893 bp, synthetic construct
  source 1..1893: mol_type = other DNA
atggccttaccagtgaccgccttgctcctgccgctggccttgctgctccacgccgccaggccggacgtgctgatgacccagacacctgtgtctctgccagtgtctctcggaggccaggtgtccatctcctgtagaagcagccagagcctggtgcactccgacggcgatacctacctgcactggtatctccagaagcctggacagagccctcagctcctgatctaccgggtgtccaacagattcagcggcgtgcccgatagattttccggcagcggctctggcaccgacttcaccctgaagatcagcagagtggaacccgaggacctgggcctgtactactgtctccagaccacacacttcccaccttggacctttggcggaggcaccaagctggaaatgaaactcgaggacctgaagaacgtgttcccacctgaggtggccgtgttcgagcctagcgaggccgagatcagccacacccagaaagccaccctcgtgtgcctggctaccggcttctaccccgaccatgtggaactgtcttggtgggtcaacggcaaagaggtgcacagcggcgtgtgtaccgacccccagccactgaaagaacagcccgccctgaacgacagccggtactgcctgagcagcagactgagagtgtccgccaccttctggcagaacccccggaaccacttcagatgccaggtgcagttctacggcctgagcgagaacgacgagtggacccaggacagagccaagcccgtgacccagatcgtgtctgccgaagcctggggcagagccgattgcgacgtgaagctggtggaaaagagcttcgagacagacaccaacctgaacttccagaacctgagcgtgatcggcttcagaatcctgctgctgaaagtggccggctttaacctgctgatgaccctgcggctgtggtccagcagggccaagcgatctggatctggagcaacaaacttctcactactcaaacaagcaggtgacgtggaggagaatcccgggcctactagtatggactggatttggcgcatccttttccttgtcggcgctgctaccggcgcgcattccttcgaacaggttcagctccagcagtctggacccgagcttagaaggccaggatctagcgtcagactgagctgcaaggccagcggctaccggatcaaggacttcctgatccactggattaagaacagacccgagcacggcctggaatggatcggatggattgaccctgaggacggcgagactaagtacgcccagaagttccagaccaaggccacactgaccgccgacacctctagcaacaccgcctacatgcaactgagcagcctgaccagcgaggacaccgccacctacttttgtgctagatggggcgacgtgtactacggcctgatgagaggccatgtgatggatgcctggggccagggaacaagcgtgacagtctcttctacgcgtatccagaaccctgatcctgccgtgtaccagctgcgggatagcaagagcagcgacaagagcgtgtgtctgttcaccgacttcgacagccagaccaacgtgtcccagagcaaggactccgacgtgtacatcaccgataagtgcgtgctggacatgcggagcatggacttcaagagcaactccgccgtggcctggtccaacaagtccgatttcgcctgcgccaacgccttcaacaacagcattatccccgaggacacattcttcccaagccccgagagcagctgcggctttaccagcgagagctaccagcagggcgtgctgagcgccaccatcctgtacgagatcctgctgggcaaggccaccctgtacgccgtgctggtgtctgccctggtgctgatggctatggtcaagcggaaggacagccgggga

SEQ ID NO: 4050 - DNA, 1878 bp, synthetic construct
  source 1..1878: mol_type = other DNA
atggccttaccagtgaccgccttgctcctgccgctggccttgctgctccacgccgccaggccggacatcgtgatgacacagagccccgccacactgtcactgtctccaggcgaaagagccacactgagctgtcggagcagcaagagcctccagaacgtgaacggcaacacctacctgtactggttccagcagaagcccggccagtctcctcagctcctgatctacagaatgagcaacctgaacagcggcgtgcccgacagattttctggcagcggaagcggcaccgagttcaccctgaccataagcagcctggaacctgaggacttcgccgtgtactactgtatgcagcacctggaataccccatcaccttcggagccggcaccaagctggaaatcaaactcgaggacctgaagaacgtgttcccacctgaggtggccgtgttcgagcctagcgaggccgagatcagccacacccagaaagccaccctcgtgtgcctggctaccggcttctaccccgaccatgtggaactgtcttggtgggtcaacggcaaagaggtgcacagcggcgtgtgtaccgacccccagccactgaaagaacagcccgccctgaacgacagccggtactgcctgagcagcagactgagagtgtccgccaccttctggcagaacccccggaaccacttcagatgccaggtgcagttctacggcctgagcgagaacgacgagtggacccaggacagagccaagcccgtgacccagatcgtgtctgccgaagcctggggcagagccgattgcgacgtgaagctggtggaaaagagcttcgagacagacaccaacctgaacttccagaacctgagcgtgatcggcttcagaatcctgctgctgaaagtggccggctttaacctgctgatgaccctgcggctgtggtccagcagggccaagcgatctggatctggagcaacaaacttctcactactcaaacaagcaggtgacgtggaggagaatcccgggcctactagtatggactggatttggcgcatccttttccttgtcggcgctgctaccggcgcgcattccttcgaagaagtgcaactggttgaatctggcggcggactggttaagcctggcggatctctgaagctgagctgtgccgccagcggctacacctttaccagctacgtgatgcactgggtccgacaggcccctggcaaaggacttgagtggatcggctacatcaacccctacaacgatggcaccaagtacaacgagaagttccagggcagagtgaccatcagctccgacaagagcatcagcaccgcctacatggaactgagcagcctgagaagcgaggataccgccatgtactattgcgccagaggcacctactactacggcaccagagtgttcgactactggggccagggaaccctggtcacagtctcttctacgcgtatccagaaccctgatcctgccgtgtaccagctgcgggatagcaagagcagcgacaagagcgtgtgtctgttcaccgacttcgacagccagaccaacgtgtcccagagcaaggactccgacgtgtacatcaccgataagtgcgtgctggacatgcggagcatggacttcaagagcaactccgccgtggcctggtccaacaagtccgatttcgcctgcgccaacgccttcaacaacagcattatccccgaggacacattcttcccaagccccgagagcagctgcggctttaccagcgagagctaccagcagggcgtgctgagcgccaccatcctgtacgagatcctgctgggcaaggccaccctgtacgccgtgctggtgtctgccctggtgctgatggctatggtcaagcggaaggacagccgggga

SEQ ID NO: 4051 - DNA, 1866 bp, synthetic construct
  source 1..1866: mol_type = other DNA
atggccttaccagtgaccgccttgctcctgccgctggccttgctgctccacgccgccaggccggacatccagatgacacagagccctagcagcctgtctgccagcgtgggagacagagtgaccatcacatgcaaggccagcgaccacatcaacaactggctggcctggtatcagcagaagcctggacaggcccctaagctgctgatctacggcgctaccacactggaaacaggcgtgcccagcagattttctggcagcggctctggcaccgactacaccctgacaatatccagcctccagcctgaggacttcgccacctactactgtcagcagagctggaacaccccttggacattcggccagggcaccaagctggaaatcaagagactcgaggacctgaagaacgtgttcccacctgaggtggccgtgttcgagcctagcgaggccgagatcagccacacccagaaagccaccctcgtgtgcctggctaccggcttctaccccgaccatgtggaactgtcttggtgggtcaacggcaaagaggtgcacagcggcgtgtgtaccgacccccagccactgaaagaacagcccgccctgaacgacagccggtactgcctgagcagcagactgagagtgtccgccaccttctggcagaacccccggaaccacttcagatgccaggtgcagttctacggcctgagcgagaacgacgagtggacccaggacagagccaagcccgtgacccagatcgtgtctgccgaagcctggggcagagccgattgcgacgtgaagctggtggaaaagagcttcgagacagacaccaacctgaacttccagaacctgagcgtgatcggcttcagaatcctgctgctgaaagtggccggctttaacctgctgatgaccctgcggctgtggtccagcagggccaagcgatctggatctggagcaacaaacttctcactactcaaacaagcaggtgacgtggaggagaatcccgggcctactagtatggactggatttggcgcatccttttccttgtcggcgctgctaccggcgcgcattccttcgaacaagttcagcttcaacagcctggcgctgagctggtcaaacctggcgcttctgtgaagatgagctgcaaagccagcggctacgccttcagcagctactggatcaactggatgaagcagaaacccggccagggactcgaatggatcggccaaatctatcccggcgacggcgacaccaactacaacggcaagttcaagggcagagccacactgaccgccgatacctctagcagcacagcctacatgcagctgagcagcctgaccagcgaagatagcgccgtgtacttctgtgcccggtccatcacaacagtcgtgggctgcgctatggactattggggccagggaacaagcgtgaccgtgtctagtacgcgtatccagaaccctgatcctgccgtgtaccagctgcgggatagcaagagcagcgacaagagcgtgtgtctgttcaccgacttcgacagccagaccaacgtgtcccagagcaaggactccgacgtgtacatcaccgataagtgcgtgctggacatgcggagcatggacttcaagagcaactccgccgtggcctggtccaacaagtccgatttcgcctgcgccaacgccttcaacaacagcattatccccgaggacacattcttcccaagccccgagagcagctgcggctttaccagcgagagctaccagcagggcgtgctgagcgccaccatcctgtacgagatcctgctgggcaaggccaccctgtacgccgtgctggtgtctgccctggtgctgatggctatggtcaagcggaaggacagccgggga

SEQ ID NO: 4052 - DNA, 1872 bp, synthetic construct
  source 1..1872: mol_type = other DNA
atggccttaccagtgaccgccttgctcctgccgctggccttgctgctccacgccgccaggccgcagatcgtgctgtctcagtctcctgccatcctgagcgcttccccaggcgagaaagtgaccatgacctgtagagccagcagcagcgtgtcctacatgcactggtatcagcagaagcccggcagcagccctaagccttggatctacgccaccagcaatctggcctctggcgtgccagccagattttctggctctggcagcggcaccagctacagcttcacaatcagcagagtggaagccgaggacgccgccacctactattgtcagcagtggaccttcaatcctcctaccttcggcggaggcacccggctggaaatcaaaagaacagtggctgctctcgaggacctgaagaacgtgttcccacctgaggtggccgtgttcgagcctagcgaggccgagatcagccacacccagaaagccaccctcgtgtgcctggctaccggcttctaccccgaccatgtggaactgtcttggtgggtcaacggcaaagaggtgcacagcggcgtgtgtaccgacccccagccactgaaagaacagcccgccctgaacgacagccggtactgcctgagcagcagactgagagtgtccgccaccttctggcagaacccccggaaccacttcagatgccaggtgcagttctacggcctgagcgagaacgacgagtggacccaggacagagccaagcccgtgacccagatcgtgtctgccgaagcctggggcagagccgattgcgacgtgaagctggtggaaaagagcttcgagacagacaccaacctgaacttccagaacctgagcgtgatcggcttcagaatcctgctgctgaaagtggccggctttaacctgctgatgaccctgcggctgtggtccagcagggccaagcgatctggatctggagcaacaaacttctcactactcaaacaagcaggtgacgtggaggagaatcccgggcctactagtatggactggatttggcgcatccttttccttgtcggcgctgctaccggcgcgcattccttcgaacaggcttatctgcaacagagcggagccgaactcgtcagacctggcgcttctgtgaagatgagctgcaaggccagcggctacaccttcaccagctataatatgcactgggtcaagcagacccctcggcagggactcgaatggatcggcggaatctatcccggcaacggcgacacctcctacaaccagaagttcaagggcaaagccacactgaccgtgggcaagagcagcagcaccgcctatatgcagctcagcagcctgaccagcgaggacagcgccgtgtacttctgcgccagatacgactacaactacgctatggactactggggccagggcaccagcgtgacagttagctctgccagcacgcgtatccagaaccctgatcctgccgtgtaccagctgcgggatagcaagagcagcgacaagagcgtgtgtctgttcaccgacttcgacagccagaccaacgtgtcccagagcaaggactccgacgtgtacatcaccgataagtgcgtgctggacatgcggagcatggacttcaagagcaactccgccgtggcctggtccaacaagtccgatttcgcctgcgccaacgccttcaacaacagcattatccccgaggacacattcttcccaagccccgagagcagctgcggctttaccagcgagagctaccagcagggcgtgctgagcgccaccatcctgtacgagatcctgctgggcaaggccaccctgtacgccgtgctggtgtctgccctggtgctgatggctatggtcaagcggaaggacagccgggga

SEQ ID NO: 4053 - DNA, 1866 bp, synthetic construct
  source 1..1866: mol_type = other DNA
atggccttaccagtgaccgccttgctcctgccgctggccttgctgctccacgccgccaggccggagatcgtgctgacacagagccctgccaccctgtctctgagccctggcgaaagagccaccctgagctgtagagccagccagagcgtgtccagctacctggcctggtatcagcagaagcccggccaggctccccggctgctgatctacgatgccagcaatagagccaccggcatccccgccagattttccggctctggcagcggcaccgacttcaccctgaccatcagctccctggaacccgaggacttcgccgtgtactactgccagcagcggagcaactggcccatcacattcggccagggcacccggctggaaatcaaactcgaggacctgaagaacgtgttcccacctgaggtggccgtgttcgagcctagcgaggccgagatcagccacacccagaaagccaccctcgtgtgcctggctaccggcttctaccccgaccatgtggaactgtcttggtgggtcaacggcaaagaggtgcacagcggcgtgtgtaccgacccccagccactgaaagaacagcccgccctgaacgacagccggtactgcctgagcagcagactgagagtgtccgccaccttctggcagaacccccggaaccacttcagatgccaggtgcagttctacggcctgagcgagaacgacgagtggacccaggacagagccaagcccgtgacccagatcgtgtctgccgaagcctggggcagagccgattgcgacgtgaagctggtggaaaagagcttcgagacagacaccaacctgaacttccagaacctgagcgtgatcggcttcagaatcctgctgctgaaagtggccggctttaacctgctgatgaccctgcggctgtggtccagcagggccaagcgatctggatctggagcaacaaacttctcactactcaaacaagcaggtgacgtggaggagaatcccgggcctactagtatggactggatttggcgcatccttttccttgtcggcgctgctaccggcgcgcattccttcgaagaggtgcagcttgttgagtctggcggaggactggtgcagcccgatagaagcctgagactgtcttgtgccgccagcggcttcaccttccacgattatgccatgcactgggtccgacaggcccctggcaaaggacttgaatgggtgtccaccatctcttggaacagcggcacaatcggctacgccgactctgtgaagggcagattcaccatcagccgggacaacgccaagaacagcctgtacctccagatgaactccctgagagccgaggacacagccctgtactactgcgccaaggacatccagtacggcaactactactacggcatggacgtgtggggccagggcacaacagtgacagtctcttctacgcgtatccagaaccctgatcctgccgtgtaccagctgcgggatagcaagagcagcgacaagagcgtgtgtctgttcaccgacttcgacagccagaccaacgtgtcccagagcaaggactccgacgtgtacatcaccgataagtgcgtgctggacatgcggagcatggacttcaagagcaactccgccgtggcctggtccaacaagtccgatttcgcctgcgccaacgccttcaacaacagcattatccccgaggacacattcttcccaagccccgagagcagctgcggctttaccagcgagagctaccagcagggcgtgctgagcgccaccatcctgtacgagatcctgctgggcaaggccaccctgtacgccgtgctggtgtctgccctggtgctgatggctatggtcaagcggaaggacagccgggga

SEQ ID NO: 4054 - DNA, 1851 bp, synthetic construct
  source 1..1851: mol_type = other DNA
atggccttaccagtgaccgccttgctcctgccgctggccttgctgctccacgccgccaggccggacatccagatgacacagagccctagcagcctgtctgccagcgtgggagatagagtgaccatcaactgcaaggccagccaggacatcaacagctacctgagctggttccagcagaagcctggcaaggcccctaagacactgatctaccgggccaacagactggtggatggcgtgccaagcagattttctggcagcggcagcggccaggattacaccctgacaatatccagcctccagcctgaggacttcgccacctactactgcctccagtacgacgagttccctctgacctttggcggaggcaccaaggtggaaatcaaactcgaggacctgaagaacgtgttcccacctgaggtggccgtgttcgagcctagcgaggccgagatcagccacacccagaaagccaccctcgtgtgcctggctaccggcttctaccccgaccatgtggaactgtcttggtgggtcaacggcaaagaggtgcacagcggcgtgtgtaccgacccccagccactgaaagaacagcccgccctgaacgacagccggtactgcctgagcagcagactgagagtgtccgccaccttctggcagaacccccggaaccacttcagatgccaggtgcagttctacggcctgagcgagaacgacgagtggacccaggacagagccaagcccgtgacccagatcgtgtctgccgaagcctggggcagagccgattgcgacgtgaagctggtggaaaagagcttcgagacagacaccaacctgaacttccagaacctgagcgtgatcggcttcagaatcctgctgctgaaagtggccggctttaacctgctgatgaccctgcggctgtggtccagcagggccaagcgatctggatctggagcaacaaacttctcactactcaaacaagcaggtgacgtggaggagaatcccgggcctactagtatggactggatttggcgcatccttttccttgtcggcgctgctaccggcgcgcattccttcgaacaggtgcaactggtgcagtctggggccgaagtgaagaaacctggggcctctgtgaaggtgtcctgcaaagccagcggctacacctttaccaactacgacatcaactgggtccgacaggctccaggccaaggactggaatggatcggctggatctatcctggcgacggcagcaccaagtacaacgagaagttcaaggccaaggccacactgaccgccgataccagcacaagcaccgcctacatggaactgcggagcctgagaagcgacgacaccgccgtgtactattgtgcctccggctacgaggacgctatggactattggggccagggcaccaccgtgacagtgtctagtacgcgtatccagaaccctgatcctgccgtgtaccagctgcgggatagcaagagcagcgacaagagcgtgtgtctgttcaccgacttcgacagccagaccaacgtgtcccagagcaaggactccgacgtgtacatcaccgataagtgcgtgctggacatgcggagcatggacttcaagagcaactccgccgtggcctggtccaacaagtccgatttcgcctgcgccaacgccttcaacaacagcattatccccgaggacacattcttcccaagccccgagagcagctgcggctttaccagcgagagctaccagcagggcgtgctgagcgccaccatcctgtacgagatcctgctgggcaaggccaccctgtacgccgtgctggtgtctgccctggtgctgatggctatggtcaagcggaaggacagccgggga

SEQ ID NO: 4055 - DNA, 1857 bp, synthetic construct
  source 1..1857: mol_type = other DNA
atggccttaccagtgaccgccttgctcctgccgctggccttgctgctccacgccgccaggccggacatcgtgatgacccagacacctctgagcctgagcgtgacacctggacagcctgccagcattagctgcaagagcagccagtctctgctggacggcgacggcaagacctacctgaattggctgctccagaagcctggacagagccctcagcggctgatctacctggtgtccaagctggatagcggcgtgcccgatagattttctggcagcggctctggcaccgacttcaccctgaagatcagcagagtggaagccgaggacgtgggcgtgtactactgttggcagggcacacacttccccagaacattcggccagggcacaaagctggaaatcaaactcgaggacctgaagaacgtgttcccacctgaggtggccgtgttcgagcctagcgaggccgagatcagccacacccagaaagccaccctcgtgtgcctggctaccggcttctaccccgaccatgtggaactgtcttggtgggtcaacggcaaagaggtgcacagcggcgtgtgtaccgacccccagccactgaaagaacagcccgccctgaacgacagccggtactgcctgagcagcagactgagagtgtccgccaccttctggcagaacccccggaaccacttcagatgccaggtgcagttctacggcctgagcgagaacgacgagtggacccaggacagagccaagcccgtgacccagatcgtgtctgccgaagcctggggcagagccgattgcgacgtgaagctggtggaaaagagcttcgagacagacaccaacctgaacttccagaacctgagcgtgatcggcttcagaatcctgctgctgaaagtggccggctttaacctgctgatgaccctgcggctgtggtccagcagggccaagcgatctggatctggagcaacaaacttctcactactcaaacaagcaggtgacgtggaggagaatcccgggcctactagtatggactggatttggcgcatccttttccttgtcggcgctgctaccggcgcgcattccttcgaacaagtgcaactggttcagagcggagccgaagtgaagaaacctggggcctctgtgaaggtgtcctgcaaggccagcggctacaccttcaaggacacctacatccactgggtccgacaggcccctggacaaggacttgagtggatgggcagaatcgaccccgccaacggcaacaccaaatacgaccccaagttccagggcagagtgaccatgaccagagacaccagcatcagcaccgcctacatggaactgagccggctgagatccgatgacaccgccgtgtactattgcgctagaagaggcggagtggattggggccagggaacactggttaccgtgtctagtacgcgtatccagaaccctgatcctgccgtgtaccagctgcgggatagcaagagcagcgacaagagcgtgtgtctgttcaccgacttcgacagccagaccaacgtgtcccagagcaaggactccgacgtgtacatcaccgataagtgcgtgctggacatgcggagcatggacttcaagagcaactccgccgtggcctggtccaacaagtccgatttcgcctgcgccaacgccttcaacaacagcattatccccgaggacacattcttcccaagccccgagagcagctgcggctttaccagcgagagctaccagcagggcgtgctgagcgccaccatcctgtacgagatcctgctgggcaaggccaccctgtacgccgtgctggtgtctgccctggtgctgatggctatggtcaagcggaaggacagccgggga

SEQ ID NO: 4056 - DNA, 1860 bp, synthetic construct
  source 1..1860: mol_type = other DNA
atggccttaccagtgaccgccttgctcctgccgctggccttgctgctccacgccgccaggccggacatccagatgacacagagccctagcagcctgtctgccagcgtgggagacagagtgaccatcacatgcaaggccagccaggatgtgtctacagccgtggcctggttccagcagaagcctggaaaagcccctaagctgctgatctacagccccagctacagatacaccggcgtgcccagcagattttctggcagcggctctggcaccgacttcaccctgacaatatccagcctccagcctgaggacttcacctactactgccagcagctctacagcaccccttacacattcggccagggcaccaaggtggaaatcaaactcgaggacctgaagaacgtgttcccacctgaggtggccgtgttcgagcctagcgaggccgagatcagccacacccagaaagccaccctcgtgtgcctggctaccggcttctaccccgaccatgtggaactgtcttggtgggtcaacggcaaagaggtgcacagcggcgtgtgtaccgacccccagccactgaaagaacagcccgccctgaacgacagccggtactgcctgagcagcagactgagagtgtccgccaccttctggcagaacccccggaaccacttcagatgccaggtgcagttctacggcctgagcgagaacgacgagtggacccaggacagagccaagcccgtgacccagatcgtgtctgccgaagcctggggcagagccgattgcgacgtgaagctggtggaaaagagcttcgagacagacaccaacctgaacttccagaacctgagcgtgatcggcttcagaatcctgctgctgaaagtggccggctttaacctgctgatgaccctgcggctgtggtccagcagggccaagcgatctggatctggagcaacaaacttctcactactcaaacaagcaggtgacgtggaggagaatcccgggcctactagtatggactggatttggcgcatccttttccttgtcggcgctgctaccggcgcgcattccttcgaagaagtgcaactggttcagagcggagccgaagtgaagaaacctggggcctctgtgaaggtgtcctgcaaagccagcggctacacctttaccgactactacctggacgtggtcgtgcggcaagctcctggacaaggactggaatggatcggcagagtgaacccctacaacggcggcaccatctacaaccagaaattcaagggaagagtgaccctgaccagagacaccagcacctccacagcctacctggaactgagcagcctgagaagcgaagataccgccgtgtactactgcgccagggaccactacagatatgaccctctgctggactactggggccagggaaccctggttacagtgtctagtacgcgtatccagaaccctgatcctgccgtgtaccagctgcgggatagcaagagcagcgacaagagcgtgtgtctgttcaccgacttcgacagccagaccaacgtgtcccagagcaaggactccgacgtgtacatcaccgataagtgcgtgctggacatgcggagcatggacttcaagagcaactccgccgtggcctggtccaacaagtccgatttcgcctgcgccaacgccttcaacaacagcattatccccgaggacacattcttcccaagccccgagagcagctgcggctttaccagcgagagctaccagcagggcgtgctgagcgccaccatcctgtacgagatcctgctgggcaaggccaccctgtacgccgtgctggtgtctgccctggtgctgatggctatggtcaagcggaaggacagccgggga

SEQ ID NO: 4057 - DNA, 1878 bp, synthetic construct
  source 1..1878: mol_type = other DNA
atggccttaccagtgaccgccttgctcctgccgctggccttgctgctccacgccgccaggccggacatccagatgacacagagccctagcagcctgtctgccagcgtgggagacagagtgaccatcacctgtagagccagccagagcgtgtccaccagcagctacaactacatgcactggtatcagcagaagcccggcaagcctcctaagctgctgattaagtacgccagcaacctggaaagcggcgtgcccagcagattttctggcagcggctctggcaccgacttcaccctgacaatatccagcctccagcctgaggacttcgccacctactactgtcagcactcctgggagatccctctgacattcggccagggcaccaaggtggaaatcaaactcgaggacctgaagaacgtgttcccacctgaggtggccgtgttcgagcctagcgaggccgagatcagccacacccagaaagccaccctcgtgtgcctggctaccggcttctaccccgaccatgtggaactgtcttggtgggtcaacggcaaagaggtgcacagcggcgtgtgtaccgacccccagccactgaaagaacagcccgccctgaacgacagccggtactgcctgagcagcagactgagagtgtccgccaccttctggcagaacccccggaaccacttcagatgccaggtgcagttctacggcctgagcgagaacgacgagtggacccaggacagagccaagcccgtgacccagatcgtgtctgccgaagcctggggcagagccgattgcgacgtgaagctggtggaaaagagcttcgagacagacaccaacctgaacttccagaacctgagcgtgatcggcttcagaatcctgctgctgaaagtggccggctttaacctgctgatgaccctgcggctgtggtccagcagggccaagcgatctggatctggagcaacaaacttctcactactcaaacaagcaggtgacgtggaggagaatcccgggcctactagtatggactggatttggcgcatccttttccttgtcggcgctgctaccggcgcgcattccttcgaagaagtgcaactggttcagagcggagccgaagtgaagaaacctggggcctctgtgaaggtgtcctgcaaggccagcggctacagcttcaccgactattatatgcactgggtccgacaggctccaggccagggacttgagtggatcggcagaatcaacccctacaacggcgctgccttctacagccagaacttcaaggatagagtgaccctgaccgtggacaccagcaccagcacagcctacctggaactgagcagcctgagaagcgaggacaccgccgtgtactactgcgccattgagagaggcgctgacctggaaggctacgctatggattattggggccagggaaccctggtcaccgtgtcatctacgcgtatccagaaccctgatcctgccgtgtaccagctgcgggatagcaagagcagcgacaagagcgtgtgtctgttcaccgacttcgacagccagaccaacgtgtcccagagcaaggactccgacgtgtacatcaccgataagtgcgtgctggacatgcggagcatggacttcaagagcaactccgccgtggcctggtccaacaagtccgatttcgcctgcgccaacgccttcaacaacagcattatccccgaggacacattcttcccaagccccgagagcagctgcggctttaccagcgagagctaccagcagggcgtgctgagcgccaccatcctgtacgagatcctgctgggcaaggccaccctgtacgccgtgctggtgtctgccctggtgctgatggctatggtcaagcggaaggacagccgggga

SEQ ID NO: 4058 - DNA, 1872 bp, synthetic construct
  source 1..1872: mol_type = other DNA
atggccttaccagtgaccgccttgctcctgccgctggccttgctgctccacgccgccaggccggagatcgtgctgacacagtctccagccacactgagcgcttctccaggcgagagagtgaccctgacctgtagagccagcagcaacgtgatctccagctacgtgcactggtatcagcagaagcctggcagcagccccagactgtttctgtacagcaccagcaatctggcctccggcgtgccaagcagattttctggctctggcagcggcaccgacttcacctttaccatctctagcctggaagccgaggacgccgccacctactactgtcagcagtacagcggctaccctctgaccttcggccagggcacaagactggaaatcaaactcgaggacctgaagaacgtgttcccacctgaggtggccgtgttcgagcctagcgaggccgagatcagccacacccagaaagccaccctcgtgtgcctggctaccggcttctaccccgaccatgtggaactgtcttggtgggtcaacggcaaagaggtgcacagcggcgtgtgtaccgacccccagccactgaaagaacagcccgccctgaacgacagccggtactgcctgagcagcagactgagagtgtccgccaccttctggcagaacccccggaaccacttcagatgccaggtgcagttctacggcctgagcgagaacgacgagtggacccaggacagagccaagcccgtgacccagatcgtgtctgccgaagcctggggcagagccgattgcgacgtgaagctggtggaaaagagcttcgagacagacaccaacctgaacttccagaacctgagcgtgatcggcttcagaatcctgctgctgaaagtggccggctttaacctgctgatgaccctgcggctgtggtccagcagggccaagcgatctggatctggagcaacaaacttctcactactcaaacaagcaggtgacgtggaggagaatcccgggcctactagtatggactggatttggcgcatccttttccttgtcggcgctgctaccggcgcgcattccttcgaacaagttcagctgcaagagtctggccctggcctggtcaagcctagcgaaacactgagcctgacctgcgccgtgtctggctactctatcaccagcgcctactattggaactggatcagacagcctcctggcaaaggactggaatggatcggctacatcagctacgacggcagaaacaactacaaccccagcctgaagaaccggatcaccatcaatcccgacaccagcaagaaccagttcagcctccagctgaacagcgtgacccctgaggataccgccgtgtactactgtgccagagaaggcgactacgacgtgggcaactactacgctatggactactggggccagggaaccctggtcacagtctcttctacgcgtatccagaaccctgatcctgccgtgtaccagctgcgggatagcaagagcagcgacaagagcgtgtgtctgttcaccgacttcgacagccagaccaacgtgtcccagagcaaggactccgacgtgtacatcaccgataagtgcgtgctggacatgcggagcatggacttcaagagcaactccgccgtggcctggtccaacaagtccgatttcgcctgcgccaacgccttcaacaacagcattatccccgaggacacattcttcccaagccccgagagcagctgcggctttaccagcgagagctaccagcagggcgtgctgagcgccaccatcctgtacgagatcctgctgggcaaggccaccctgtacgccgtgctggtgtctgccctggtgctgatggctatggtcaagcggaaggacagccgggga

SEQ ID NO: 4059 - DNA, 1872 bp, synthetic construct
  source 1..1872: mol_type = other DNA
atggccttaccagtgaccgccttgctcctgccgctggccttgctgctccacgccgccaggccggagatcgtgctgacacagtctcccgccacactgtcactgtctccaggcgaaagagccacactgagctgtagagccagcagcaacgtgatctccagctacgtgcactggtatcagcagaagcctggacaggcccctcggctgctgatctacagcacaagcaatctggcctctggcatccccgccagattttctggctctggaagcggcaccgacttcaccctgaccataagcagcctggaacctgaggacttcgccgtgtactactgccagcagtatagcggctaccctctgaccttcggccagggcacaagactggaaatcaaactcgaggacctgaagaacgtgttcccacctgaggtggccgtgttcgagcctagcgaggccgagatcagccacacccagaaagccaccctcgtgtgcctggctaccggcttctaccccgaccatgtggaactgtcttggtgggtcaacggcaaagaggtgcacagcggcgtgtgtaccgacccccagccactgaaagaacagcccgccctgaacgacagccggtactgcctgagcagcagactgagagtgtccgccaccttctggcagaacccccggaaccacttcagatgccaggtgcagttctacggcctgagcgagaacgacgagtggacccaggacagagccaagcccgtgacccagatcgtgtctgccgaagcctggggcagagccgattgcgacgtgaagctggtggaaaagagcttcgagacagacaccaacctgaacttccagaacctgagcgtgatcggcttcagaatcctgctgctgaaagtggccggctttaacctgctgatgaccctgcggctgtggtccagcagggccaagcgatctggatctggagcaacaaacttctcactactcaaacaagcaggtgacgtggaggagaatcccgggcctactagtatggactggatttggcgcatccttttccttgtcggcgctgctaccggcgcgcattccttcgaagaagtgcaactggtggaaagtggcggcggactggtgcaacctggaagaagcctgagactgtcctgtgccgccagcggctactctatcacaagcgcctactactggaactgggtccgacaggctcctggcaaaggactggaatgggtgtcctacatcagctacgacggcagaaacaactacaaccccagcctgaagaaccgcttcaccatcagccgggacaacgccaagaagtccctgtacctccagatgaacagcctgagagccgaggacacagccctgtactattgcgccaaagagggcgactacgacgtcggcaactactacgctatggactactggggccagggaaccaccgtgactgtctcttctacgcgtatccagaaccctgatcctgccgtgtaccagctgcgggatagcaagagcagcgacaagagcgtgtgtctgttcaccgacttcgacagccagaccaacgtgtcccagagcaaggactccgacgtgtacatcaccgataagtgcgtgctggacatgcggagcatggacttcaagagcaactccgccgtggcctggtccaacaagtccgatttcgcctgcgccaacgccttcaacaacagcattatccccgaggacacattcttcccaagccccgagagcagctgcggctttaccagcgagagctaccagcagggcgtgctgagcgccaccatcctgtacgagatcctgctgggcaaggccaccctgtacgccgtgctggtgtctgccctggtgctgatggctatggtcaagcggaaggacagccgggga

SEQ ID NO: 4060 - DNA, 1869 bp, synthetic construct
  source 1..1869: mol_type = other DNA
atggccttaccagtgaccgccttgctcctgccgctggccttgctgctccacgccgccaggccggacgtggtcatgacacagaccccactgagcctgcctgtgtctctgggagatcaggccagcatctcctgtagaagcagccagagcctggtgcacagcaacggcaacacctacctgcggtggtatctccagaagcctggacagagccccaaggtgctgatctacaaggtgtccaacagagtgtccggcgtgcccgatagattttctggcagcggctctggcaccgacttcaccctgaagatcaatagagtggaagccgaggacctgggcgtgtacttctgtagccagagcacccatgtgccttggacctttggcggaggcaccaagctggaaatcaagctcgaggacctgaagaacgtgttcccacctgaggtggccgtgttcgagcctagcgaggccgagatcagccacacccagaaagccaccctcgtgtgcctggctaccggcttctaccccgaccatgtggaactgtcttggtgggtcaacggcaaagaggtgcacagcggcgtgtgtaccgacccccagccactgaaagaacagcccgccctgaacgacagccggtactgcctgagcagcagactgagagtgtccgccaccttctggcagaacccccggaaccacttcagatgccaggtgcagttctacggcctgagcgagaacgacgagtggacccaggacagagccaagcccgtgacccagatcgtgtctgccgaagcctggggcagagccgattgcgacgtgaagctggtggaaaagagcttcgagacagacaccaacctgaacttccagaacctgagcgtgatcggcttcagaatcctgctgctgaaagtggccggctttaacctgctgatgaccctgcggctgtggtccagcagggccaagcgatctggatctggagcaacaaacttctcactactcaaacaagcaggtgacgtggaggagaatcccgggcctactagtatggactggatttggcgcatccttttccttgtcggcgctgctaccggcgcgcattccttcgaaggcgtgaagctggacgagacaggcggaggacttgttcaacctggcggagccatgaagctgagctgtgtgaccagcggctttaccttcggccactactggatgaactgggtccgacagtcccctgagaaaggactggaatgggtcgcccagttcagaaacaagccctacaactacgaaacctactacagcgacagcgtgaagggcagattcaccatcagccgggacgacagcaagtccagcgtgtacctccagatgaacaacctgcgcgtggaagataccggcatctactactgtaccggggccagctacggcatggaatatctcggccagggcaccagcgtgaccgtgtctacaacgcgtatccagaaccctgatcctgccgtgtaccagctgcgggatagcaagagcagcgacaagagcgtgtgtctgttcaccgacttcgacagccagaccaacgtgtcccagagcaaggactccgacgtgtacatcaccgataagtgcgtgctggacatgcggagcatggacttcaagagcaactccgccgtggcctggtccaacaagtccgatttcgcctgcgccaacgccttcaacaacagcattatccccgaggacacattcttcccaagccccgagagcagctgcggctttaccagcgagagctaccagcagggcgtgctgagcgccaccatcctgtacgagatcctgctgggcaaggccaccctgtacgccgtgctggtgtctgccctggtgctgatggctatggtcaagcggaaggacagccgggga

SEQ ID NO: 4061 - DNA, 1887 bp, synthetic construct
  source 1..1887: mol_type = other DNA
atggccttaccagtgaccgccttgctcctgccgctggccttgctgctccacgccgccaggccgcaggtgcaactggtggaatctggcggcaatctggttcagcctggcggctctctgagactgtcttgtgccgccagcggcttcaccttcggcagcttttctatgagctgggtccgacaagctcctggcggaggacttgaatgggtggcaggactgtctgccagaagcagcctgacacactacgccgactctgtgaagggcagattcaccatcagccgggacaacgccaagaacagcgtgtacctccagatgaacagcctgagagtggaagataccgccgtgtactactgcgccagaagaagctacgacagcagcggctactggggccacttctacagctacatggatgtgtggggccagggcaccctggttacagtttctctcgaggacctgaagaacgtgttcccacctgaggtggccgtgttcgagcctagcgaggccgagatcagccacacccagaaagccaccctcgtgtgcctggctaccggcttctaccccgaccatgtggaactgtcttggtgggtcaacggcaaagaggtgcacagcggcgtgtgtaccgacccccagccactgaaagaacagcccgccctgaacgacagccggtactgcctgagcagcagactgagagtgtccgccaccttctggcagaacccccggaaccacttcagatgccaggtgcagttctacggcctgagcgagaacgacgagtggacccaggacagagccaagcccgtgacccagatcgtgtctgccgaagcctggggcagagccgattgcgacgtgaagctggtggaaaagagcttcgagacagacaccaacctgaacttccagaacctgagcgtgatcggcttcagaatcctgctgctgaaagtggccggctttaacctgctgatgaccctgcggctgtggtccagcagggccaagcgatctggatctggagcaacaaacttctcactactcaaacaagcaggtgacgtggaggagaatcccgggcctactagtatggactggatttggcgcatccttttccttgtcggcgctgctaccggcgcgcattccttcgaatctgtgctgacccagcctagctccgtgtctgctgctcctggacagaaagtgaccatctcctgtagcggcagcaccagcaacatcggcaacaactacgtgtcctggtatcagcagcaccccggcaaggcccctaagctgatgatctacgacgtgtccaagaggcccagcggcgtgccagatagattttccggcagcaagagcggcaacagcgccagcctggatattagcggactccagtctgaggacgaggccgactactattgcgccgcctgggatgatagcctgagcgagtttctgtttggcaccggcaccaagctgacagtgcttggaacgcgtatccagaaccctgatcctgccgtgtaccagctgcgggatagcaagagcagcgacaagagcgtgtgtctgttcaccgacttcgacagccagaccaacgtgtcccagagcaaggactccgacgtgtacatcaccgataagtgcgtgctggacatgcggagcatggacttcaagagcaactccgccgtggcctggtccaacaagtccgatttcgcctgcgccaacgccttcaacaacagcattatccccgaggacacattcttcccaagccccgagagcagctgcggctttaccagcgagagctaccagcagggcgtgctgagcgccaccatcctgtacgagatcctgctgggcaaggccaccctgtacgccgtgctggtgtctgccctggtgctgatggctatggtcaagcggaaggacagccgggga

SEQ ID NO: 4062 - DNA, 1872 bp, synthetic construct
  source 1..1872: mol_type = other DNA
atggccttaccagtgaccgccttgctcctgccgctggccttgctgctccacgccgccaggccggacgtggtcatgacacagagcccttctagcctgtctgccagcgtgggcgacagagtgacaatcacctgtcagagcagcctggacatcagccactacctgaactggtatcagcagaagcccggcaaggcccctaagctgctgatctacgacgccagcaatctggaaaccggcgtgcccagcagattttctggcagcggaagcggcacccacttcaccttcacaatatccagcctccagcctgaggacttcgccacctactactgccagcagtacgacaacctgcctctgacctttggcggaggcaccaagctggaaatcaagagactcgaggacctgaagaacgtgttcccacctgaggtggccgtgttcgagcctagcgaggccgagatcagccacacccagaaagccaccctcgtgtgcctggctaccggcttctaccccgaccatgtggaactgtcttggtgggtcaacggcaaagaggtgcacagcggcgtgtgtaccgacccccagccactgaaagaacagcccgccctgaacgacagccggtactgcctgagcagcagactgagagtgtccgccaccttctggcagaacccccggaaccacttcagatgccaggtgcagttctacggcctgagcgagaacgacgagtggacccaggacagagccaagcccgtgacccagatcgtgtctgccgaagcctggggcagagccgattgcgacgtgaagctggtggaaaagagcttcgagacagacaccaacctgaacttccagaacctgagcgtgatcggcttcagaatcctgctgctgaaagtggccggctttaacctgctgatgaccctgcggctgtggtccagcagggccaagcgatctggatctggagcaacaaacttctcactactcaaacaagcaggtgacgtggaggagaatcccgggcctactagtatggactggatttggcgcatccttttccttgtcggcgctgctaccggcgcgcattccttcgaacaagttcaactggttcaatcaggcggaggcgtggtgcaacctggtggctctctgagagtgtcttgtgctgcctctggcgtgaccctgagcgactatggaatgcactgggtccgacaggcccctggcaaaggacttgagtgggtcgccttcatcagaaacgacggcagcgacaagtattacgccgacagcgtgaagggcagattcaccatcagccgggacaacagcgagaaaaccgtgtctctccagatgtctagcctgagagccgaggacaccgccgtgtactactgtgccaagaatggcgagagcggccctctggactactggtatctggatctgtggggcagaggcaccctggtcacagtctcttctacgcgtatccagaaccctgatcctgccgtgtaccagctgcgggatagcaagagcagcgacaagagcgtgtgtctgttcaccgacttcgacagccagaccaacgtgtcccagagcaaggactccgacgtgtacatcaccgataagtgcgtgctggacatgcggagcatggacttcaagagcaactccgccgtggcctggtccaacaagtccgatttcgcctgcgccaacgccttcaacaacagcattatccccgaggacacattcttcccaagccccgagagcagctgcggctttaccagcgagagctaccagcagggcgtgctgagcgccaccatcctgtacgagatcctgctgggcaaggccaccctgtacgccgtgctggtgtctgccctggtgctgatggctatggtcaagcggaaggacagccgggga

SEQ ID NO: 4063 - DNA, 1884 bp, synthetic construct
  source 1..1884: mol_type = other DNA
atggccttaccagtgaccgccttgctcctgccgctggccttgctgctccacgccgccaggccgagctacgagctgacacagcctccatccgtgtctggcacacctggacagagagtggctatctcctgtagcggcagcagcagcaacatcggcaccagaatggtcacctggtatcagcacgtgccaggcacagcccctaagctgctgatcttcaacaacaaccagcggcctagcggcgtgcccgatagattttctgccagcaagagcggcacaagcgccagcctggctatcatcggactccagtctgacgacgaggccgactactactgtgccacctgggacgacaacgtgaagtcctacgtgttcggcaccggcaccaaagtgacagtgcttggaagtagactcgaggacctgaagaacgtgttcccacctgaggtggccgtgttcgagcctagcgaggccgagatcagccacacccagaaagccaccctcgtgtgcctggctaccggcttctaccccgaccatgtggaactgtcttggtgggtcaacggcaaagaggtgcacagcggcgtgtgtaccgacccccagccactgaaagaacagcccgccctgaacgacagccggtactgcctgagcagcagactgagagtgtccgccaccttctggcagaacccccggaaccacttcagatgccaggtgcagttctacggcctgagcgagaacgacgagtggacccaggacagagccaagcccgtgacccagatcgtgtctgccgaagcctggggcagagccgattgcgacgtgaagctggtggaaaagagcttcgagacagacaccaacctgaacttccagaacctgagcgtgatcggcttcagaatcctgctgctgaaagtggccggctttaacctgctgatgaccctgcggctgtggtccagcagggccaagcgatctggatctggagcaacaaacttctcactactcaaacaagcaggtgacgtggaggagaatcccgggcctactagtatggactggatttggcgcatccttttccttgtcggcgctgctaccggcgcgcattccttcgaacttgaaatggcccaggttcagctccagcagtggggagctggactgctgaagcctagcgagacactgagcctgacctgtgctgtgtacggcggcagcttcagcggctactactggtcctggatcagacagcctcctggcaaaggactggaatggatcggcgagatcaaccacagcggctccaccaactacaaccccagcctgaagtccagagtgaccatcagcgtggacaccagcaagaaccagttctccctgaagctgagcagcgtgacagccgctgataccgccgtgtactattgcgctagagcccctcagtcttggtacgtgggagatgtgtggggccagggcacactggttacagtgtcatctacgcgtatccagaaccctgatcctgccgtgtaccagctgcgggatagcaagagcagcgacaagagcgtgtgtctgttcaccgacttcgacagccagaccaacgtgtcccagagcaaggactccgacgtgtacatcaccgataagtgcgtgctggacatgcggagcatggacttcaagagcaactccgccgtggcctggtccaacaagtccgatttcgcctgcgccaacgccttcaacaacagcattatccccgaggacacattcttcccaagccccgagagcagctgcggctttaccagcgagagctaccagcagggcgtgctgagcgccaccatcctgtacgagatcctgctgggcaaggccaccctgtacgccgtgctggtgtctgccctggtgctgatggctatggtcaagcggaaggacagccgggga

SEQ ID NO: 4064 - DNA, 1875 bp, synthetic construct
  source 1..1875: mol_type = other DNA
atggccttaccagtgaccgccttgctcctgccgctggccttgctgctccacgccgccaggccgcagtctgtgctgacacagcctcctagcctgtctgtggcccctggaaagacagccagcatcacatgcggcggcaacaacatcggcatgaagtccgtgcactggtatcagcagaggccaggacaggctcctgtgctggtcatctactacgacagcgacagaccctctggcatccccggcagattttccggcagcaactctggcaataccgccacactgaccatctccagagtggaagctggcgacgaggccgactactactgccaagtgtgggataccaccggcgatcaccctggctatgtgtttggcaccggcaccaaagtgacagtgcttctcgaggacctgaagaacgtgttcccacctgaggtggccgtgttcgagcctagcgaggccgagatcagccacacccagaaagccaccctcgtgtgcctggctaccggcttctaccccgaccatgtggaactgtcttggtgggtcaacggcaaagaggtgcacagcggcgtgtgtaccgacccccagccactgaaagaacagcccgccctgaacgacagccggtactgcctgagcagcagactgagagtgtccgccaccttctggcagaacccccggaaccacttcagatgccaggtgcagttctacggcctgagcgagaacgacgagtggacccaggacagagccaagcccgtgacccagatcgtgtctgccgaagcctggggcagagccgattgcgacgtgaagctggtggaaaagagcttcgagacagacaccaacctgaacttccagaacctgagcgtgatcggcttcagaatcctgctgctgaaagtggccggctttaacctgctgatgaccctgcggctgtggtccagcagggccaagcgatctggatctggagcaacaaacttctcactactcaaacaagcaggtgacgtggaggagaatcccgggcctactagtatggactggatttggcgcatccttttccttgtcggcgctgctaccggcgcgcattccttcgaacaagttcaactggttcagagcggagccgaagtgaagaaacctggcagcagcgtgaaggtgtcctgcaaagcaagcggcggcacctttagcagctacgccatctcttgggtccgacaggcacctggacaaggactggaatggatgggcggcatcatccccatcttcggcacagccaattacgcccagaaattccagggcagagtgaccatcaccgccgacgagtctacaagcaccgcctacatggaactgagcagcctgagaagcgaggacaccgccgtgtactattgtgccagaggcgtgtacggctacagcggctctgccccttatgatgagtggggccagggaaccctggtcaccgtttcttctacgcgtatccagaaccctgatcctgccgtgtaccagctgcgggatagcaagagcagcgacaagagcgtgtgtctgttcaccgacttcgacagccagaccaacgtgtcccagagcaaggactccgacgtgtacatcaccgataagtgcgtgctggacatgcggagcatggacttcaagagcaactccgccgtggcctggtccaacaagtccgatttcgcctgcgccaacgccttcaacaacagcattatccccgaggacacattcttcccaagccccgagagcagctgcggctttaccagcgagagctaccagcagggcgtgctgagcgccaccatcctgtacgagatcctgctgggcaaggccaccctgtacgccgtgctggtgtctgccctggtgctgatggctatggtcaagcggaaggacagccgggga

SEQ ID NO: 4065 - DNA, 1869 bp, synthetic construct
  source 1..1869: mol_type = other DNA
atggccttaccagtgaccgccttgctcctgccgctggccttgctgctccacgccgccaggccggaggtgcaactggttgagtctggcggaggactggtgcagcctggaagaagcctgagactgtcttgtgccgccagcggcttcaccttcgacgattatgccatgcactgggtccgacaggcccctggcaaaggacttgaatgggtgtccggcatctcctggaacagcggctctatcggctacgccgattccgtgaagggcagattcaccatcagccgggacaacgccaagaacagcctgtacctccagatgaactccctgagagccgaggacacagccctgtactactgcgccaaagacaaaggcggaggctactacgacttttggagcggcagcgattattggggccagggcacactggtcacagtgtctagcctcgaggacctgaagaacgtgttcccacctgaggtggccgtgttcgagcctagcgaggccgagatcagccacacccagaaagccaccctcgtgtgcctggctaccggcttctaccccgaccatgtggaactgtcttggtgggtcaacggcaaagaggtgcacagcggcgtgtgtaccgacccccagccactgaaagaacagcccgccctgaacgacagccggtactgcctgagcagcagactgagagtgtccgccaccttctggcagaacccccggaaccacttcagatgccaggtgcagttctacggcctgagcgagaacgacgagtggacccaggacagagccaagcccgtgacccagatcgtgtctgccgaagcctggggcagagccgattgcgacgtgaagctggtggaaaagagcttcgagacagacaccaacctgaacttccagaacctgagcgtgatcggcttcagaatcctgctgctgaaagtggccggctttaacctgctgatgaccctgcggctgtggtccagcagggccaagcgatctggatctggagcaacaaacttctcactactcaaacaagcaggtgacgtggaggagaatcccgggcctactagtatggactggatttggcgcatccttttccttgtcggcgctgctaccggcgcgcattccttcgaatcttctgagctgacacaggaccctgccgtgtctgttgctctgggccagacagtgcggattacctgtcagggcgatagcctgagaagctactacgcctcctggtatcagcagaagccaggccaggctcctgtgctggtcatctacggcaagaacaacagacccagcggcatccccgatagattcagcggaagcagctctggcaataccgccagcctgacaattactggcgctcaggccgaggacgaggccgactactactgcaacagcagagatagcagcggctgggttttcggcggaggcacaaaactgacagtgctgacgcgtatccagaaccctgatcctgccgtgtaccagctgcgggatagcaagagcagcgacaagagcgtgtgtctgttcaccgacttcgacagccagaccaacgtgtcccagagcaaggactccgacgtgtacatcaccgataagtgcgtgctggacatgcggagcatggacttcaagagcaactccgccgtggcctggtccaacaagtccgatttcgcctgcgccaacgccttcaacaacagcattatccccgaggacacattcttcccaagccccgagagcagctgcggctttaccagcgagagctaccagcagggcgtgctgagcgccaccatcctgtacgagatcctgctgggcaaggccaccctgtacgccgtgctggtgtctgccctggtgctgatggctatggtcaagcggaaggacagccgggga

SEQ ID NO: 4066 - DNA, 1896 bp, synthetic construct
  source 1..1896: mol_type = other DNA
atggccttaccagtgaccgccttgctcctgccgctggccttgctgctccacgccgccaggccggaagtgcagctccagcagtctggacctggcctggttaagcctagccagacactgagcctgacctgtgccatcagcggcgatagcgtgctgagcaacagcgacacctggaactggatcagacagagccctagcagaggactggaatggctgggcagaacctaccacagaagcacttggtacgacgactacgccagctctgtgcggggcagagtgtccatcaatgtggacaccagcaagaaccagtacagcctgcaactgaacgccgtgacacctgaggataccggcgtgtactactgcgccagagacagactccaggacggcaactcttggagcgacgcctttgatgtgtggggccagggcacaatggtcaccgtttctagcctcgaggacctgaagaacgtgttcccacctgaggtggccgtgttcgagcctagcgaggccgagatcagccacacccagaaagccaccctcgtgtgcctggctaccggcttctaccccgaccatgtggaactgtcttggtgggtcaacggcaaagaggtgcacagcggcgtgtgtaccgacccccagccactgaaagaacagcccgccctgaacgacagccggtactgcctgagcagcagactgagagtgtccgccaccttctggcagaacccccggaaccacttcagatgccaggtgcagttctacggcctgagcgagaacgacgagtggacccaggacagagccaagcccgtgacccagatcgtgtctgccgaagcctggggcagagccgattgcgacgtgaagctggtggaaaagagcttcgagacagacaccaacctgaacttccagaacctgagcgtgatcggcttcagaatcctgctgctgaaagtggccggctttaacctgctgatgaccctgcggctgtggtccagcagggccaagcgatctggatctggagcaacaaacttctcactactcaaacaagcaggtgacgtggaggagaatcccgggcctactagtatggactggatttggcgcatccttttccttgtcggcgctgctaccggcgcgcattccttcgaacaatctgctctgacacagcctgccagcgtgtcaggatctcctggacagagcatcaccatctcttgcaccggcaccagctctgatgtcggcggctacaattacgtgtcctggtatcagcagcaccccggcaaggcccctaagctgatgatctacgacgtgtccaacagacccagcggcgtgtccaatagattctccggcagcaagagcggcaacaccgccagcctgacaatttctggactgcaagccgaggacgaggccgactactactgtagcagctacaccagcagcagcacactggtgtacgtgttcggcacaggcaccaaagtgaccgtgcttacgcgtatccagaaccctgatcctgccgtgtaccagctgcgggatagcaagagcagcgacaagagcgtgtgtctgttcaccgacttcgacagccagaccaacgtgtcccagagcaaggactccgacgtgtacatcaccgataagtgcgtgctggacatgcggagcatggacttcaagagcaactccgccgtggcctggtccaacaagtccgatttcgcctgcgccaacgccttcaacaacagcattatccccgaggacacattcttcccaagccccgagagcagctgcggctttaccagcgagagctaccagcagggcgtgctgagcgccaccatcctgtacgagatcctgctgggcaaggccaccctgtacgccgtgctggtgtctgccctggtgctgatggctatggtcaagcggaaggacagccgggga

SEQ ID NO: 4067 - DNA, 1830 bp, synthetic construct
  source 1..1830: mol_type = other DNA
atggccttaccagtgaccgccttgctcctgccgctggccttgctgctccacgccgccaggccgcaggtgcaactggttcagtctggggccgaagtgaagaaacctggggcctctgtgaaggtgtcctgcaaggcttccggctacacctttaccagctacgacatcaactgggtccgacaggccacaggccaaggactggaatggatgggctggatgaaccccaacagcggcaataccggctacgcccagaaattccagggcagagtgaccatgaccagaaacaccagcatcagcaccgcctacatggaactgagcagcctgagaagcgaggacaccgccgtgtactattgcgccagaggcgacagcaccaaggtggaaatcaaactcgaggacctgaagaacgtgttcccacctgaggtggccgtgttcgagcctagcgaggccgagatcagccacacccagaaagccaccctcgtgtgcctggctaccggcttctaccccgaccatgtggaactgtcttggtgggtcaacggcaaagaggtgcacagcggcgtgtgtaccgacccccagccactgaaagaacagcccgccctgaacgacagccggtactgcctgagcagcagactgagagtgtccgccaccttctggcagaacccccggaaccacttcagatgccaggtgcagttctacggcctgagcgagaacgacgagtggacccaggacagagccaagcccgtgacccagatcgtgtctgccgaagcctggggcagagccgattgcgacgtgaagctggtggaaaagagcttcgagacagacaccaacctgaacttccagaacctgagcgtgatcggcttcagaatcctgctgctgaaagtggccggctttaacctgctgatgaccctgcggctgtggtccagcagggccaagcgatctggatctggagcaacaaacttctcactactcaaacaagcaggtgacgtggaggagaatcccgggcctactagtatggactggatttggcgcatccttttccttgtcggcgctgctaccggcgcgcattccttcgaacaatctgtgctgacccagcctagatccgtgtctggctctcctggacagagcgtgaccatctcttgtaccggcaccagctctgatgtcggcggctacaattacgtgtcctggtatcagcagcaccccggcgaagcccctaagctgattatctacgacgccgacaagcggcccagcggcatcagcaatagattcagctctggcaagagcggcaacaccgccagcctgacaatcagcggactccaggtggaagatgaggccgactactactgctgctcctatgccggcggaagcacctgggttttcggaggcggtacaaaagtgaccgtgctgacgcgtatccagaaccctgatcctgccgtgtaccagctgcgggatagcaagagcagcgacaagagcgtgtgtctgttcaccgacttcgacagccagaccaacgtgtcccagagcaaggactccgacgtgtacatcaccgataagtgcgtgctggacatgcggagcatggacttcaagagcaactccgccgtggcctggtccaacaagtccgatttcgcctgcgccaacgccttcaacaacagcattatccccgaggacacattcttcccaagccccgagagcagctgcggctttaccagcgagagctaccagcagggcgtgctgagcgccaccatcctgtacgagatcctgctgggcaaggccaccctgtacgccgtgctggtgtctgccctggtgctgatggctatggtcaagcggaaggacagccgggga

SEQ ID NO: 4068 - DNA, 1896 bp, synthetic construct
  source 1..1896: mol_type = other DNA
atggccttaccagtgaccgccttgctcctgccgctggccttgctgctccacgccgccaggccggaagtgcagctccagcagtctggacctggcctggttaagcctagccagacactgagcctgacctgtgccatcagcggcgatagcgtgtcctctaatagcgccgcctggaactggatcagacagagccctagcagaggactggaatggctgggcagaacctactaccgcagcaagtggtacagcgactacgccgtgtccgtgaagtcccggatcaccatcaatcccgacaccagcaagaaccagttcagcctgcaactgaacagcgtgacccctgaggataccgccgtgtactactgcgccagagatccctacgacttttggagcggctaccccgacgcctttgacatctggggacagggcacaatggtcaccgtttctagcctcgaggacctgaagaacgtgttcccacctgaggtggccgtgttcgagcctagcgaggccgagatcagccacacccagaaagccaccctcgtgtgcctggctaccggcttctaccccgaccatgtggaactgtcttggtgggtcaacggcaaagaggtgcacagcggcgtgtgtaccgacccccagccactgaaagaacagcccgccctgaacgacagccggtactgcctgagcagcagactgagagtgtccgccaccttctggcagaacccccggaaccacttcagatgccaggtgcagttctacggcctgagcgagaacgacgagtggacccaggacagagccaagcccgtgacccagatcgtgtctgccgaagcctggggcagagccgattgcgacgtgaagctggtggaaaagagcttcgagacagacaccaacctgaacttccagaacctgagcgtgatcggcttcagaatcctgctgctgaaagtggccggctttaacctgctgatgaccctgcggctgtggtccagcagggccaagcgatctggatctggagcaacaaacttctcactactcaaacaagcaggtgacgtggaggagaatcccgggcctactagtatggactggatttggcgcatccttttccttgtcggcgctgctaccggcgcgcattccttcgaacaatctgctctgacacagcctgccagcgtgtcaggatctcctggacagagcatcaccatctcttgcaccggcaccagctctgatgtcggcggctacaattacgtgtcctggtatcagcagcaccccggcaaggcccctaaagtgattatcagcgaagtgaacaacagacccagcggcgtgtcccacagattcagcggctctaagtctggcaacaccgccagcctgacaatctctggactgcaagccgaggacgaggccgactacttctgtagcagctacaccagcggcagaaccctgtacgtgttcggcacaggcagcaaagtgacagtgctgggaacgcgtatccagaaccctgatcctgccgtgtaccagctgcgggatagcaagagcagcgacaagagcgtgtgtctgttcaccgacttcgacagccagaccaacgtgtcccagagcaaggactccgacgtgtacatcaccgataagtgcgtgctggacatgcggagcatggacttcaagagcaactccgccgtggcctggtccaacaagtccgatttcgcctgcgccaacgccttcaacaacagcattatccccgaggacacattcttcccaagccccgagagcagctgcggctttaccagcgagagctaccagcagggcgtgctgagcgccaccatcctgtacgagatcctgctgggcaaggccaccctgtacgccgtgctggtgtctgccctggtgctgatggctatggtcaagcggaaggacagccgggga

SEQ ID NO: 4069 - DNA, 1893 bp, synthetic construct
  source 1..1893: mol_type = other DNA
atggccttaccagtgaccgccttgctcctgccgctggccttgctgctccacgccgccaggccgcaatctgctctgacacagcctgccagcgcctctggatctcctggacagagcgtgaccatctcctgtaccggcacctcttctgatgtcggcggctacaactacgtgtcctggtatcagcagcaccccggcaaggcccctaagctgatgatctacgacgtgtccaacagacccagcggcgtgtccaatagattctccggcagcaagagcggcaacaccgccagcctgacaatttctggactgcaagccgaggacgaggccgactactactgtagcagctacaccagcagcagcacactgtacgtgttcggcacaggcacccagctcacagttcttctcgaggacctgaagaacgtgttcccacctgaggtggccgtgttcgagcctagcgaggccgagatcagccacacccagaaagccaccctcgtgtgcctggctaccggcttctaccccgaccatgtggaactgtcttggtgggtcaacggcaaagaggtgcacagcggcgtgtgtaccgacccccagccactgaaagaacagcccgccctgaacgacagccggtactgcctgagcagcagactgagagtgtccgccaccttctggcagaacccccggaaccacttcagatgccaggtgcagttctacggcctgagcgagaacgacgagtggacccaggacagagccaagcccgtgacccagatcgtgtctgccgaagcctggggcagagccgattgcgacgtgaagctggtggaaaagagcttcgagacagacaccaacctgaacttccagaacctgagcgtgatcggcttcagaatcctgctgctgaaagtggccggctttaacctgctgatgaccctgcggctgtggtccagcagggccaagcgatctggatctggagcaacaaacttctcactactcaaacaagcaggtgacgtggaggagaatcccgggcctactagtatggactggatttggcgcatccttttccttgtcggcgctgctaccggcgcgcattccttcgaagaagtgcagctccagcagtctggacctggcctggttaagcctagccagacactgagcctgacctgtgccatcagcggcgattccatgctgagcaacagcgacacctggaactggatcagacagagccccagcagaggcctggaatggctgggcagaacataccacagaagcacttggtacgacgactacgccagctctgtgcggggcagagtgtccatcaatgtggacaccagcaagaaccagtacagcctgcaactgaacgccgtgacacctgaggataccggcgtgtactactgtgccagagtgcggctccaggacggcaattcttggagcgacgcctttgatgtgtggggccagggcacaatggtcaccgtttctagcacgcgtatccagaaccctgatcctgccgtgtaccagctgcgggatagcaagagcagcgacaagagcgtgtgtctgttcaccgacttcgacagccagaccaacgtgtcccagagcaaggactccgacgtgtacatcaccgataagtgcgtgctggacatgcggagcatggacttcaagagcaactccgccgtggcctggtccaacaagtccgatttcgcctgcgccaacgccttcaacaacagcattatccccgaggacacattcttcccaagccccgagagcagctgcggctttaccagcgagagctaccagcagggcgtgctgagcgccaccatcctgtacgagatcctgctgggcaaggccaccctgtacgccgtgctggtgtctgccctggtgctgatggctatggtcaagcggaaggacagccgggga

SEQ ID NO: 4070 - DNA, 1893 bp, synthetic construct
  source 1..1893: mol_type = other DNA
atggccttaccagtgaccgccttgctcctgccgctggccttgctgctccacgccgccaggccggacgtgatgctgacccagacaccactgagcctgcctgtgtctctgggcgatcaggccagcatctcctgtagaagcagccagagcatcctgcacagcaccggcgatacctacctggaatggtatctccagaagcctggacagagccccaagctgctgattaacaaggtgtccaaccggctgagcggcgtgcccgatagattttctggcagcggctctggcaccgacttcaccctgaagatcagcagagtggaagccgaggacctgggcgtgtactactgcttccaaggcagccatgttccttggacctttggcggaggcaccaagctggaaatcaagagagctgacgccgctcctaccgtgtccatctttcctctcgaggacctgaagaacgtgttcccacctgaggtggccgtgttcgagcctagcgaggccgagatcagccacacccagaaagccaccctcgtgtgcctggctaccggcttctaccccgaccatgtggaactgtcttggtgggtcaacggcaaagaggtgcacagcggcgtgtgtaccgacccccagccactgaaagaacagcccgccctgaacgacagccggtactgcctgagcagcagactgagagtgtccgccaccttctggcagaacccccggaaccacttcagatgccaggtgcagttctacggcctgagcgagaacgacgagtggacccaggacagagccaagcccgtgacccagatcgtgtctgccgaagcctggggcagagccgattgcgacgtgaagctggtggaaaagagcttcgagacagacaccaacctgaacttccagaacctgagcgtgatcggcttcagaatcctgctgctgaaagtggccggctttaacctgctgatgaccctgcggctgtggtccagcagggccaagcgatctggatctggagcaacaaacttctcactactcaaacaagcaggtgacgtggaggagaatcccgggcctactagtatggactggatttggcgcatccttttccttgtcggcgctgctaccggcgcgcattccttcgaacaagtgaagctccagcagagcggccctagccttgtgaaacctggcgcttccgtgaagatgagctgcaaggccagcggctacaccttcaccgatttctacatgaaatgggtcaagcagagccacggcaagtctctggaatggatcggcgacatcaaccccaacatcggagacaccttctacaaccagaagttcaagggcaaagccacactgaccgtggacaagagcagcagcaccgcctacatgcagctcaacagcctgaccagcgaggacagcgccgtgtacttttgttccgtgggctacttcgacgtgtggggagccggaacaaccgtgacagtctcttctacgcgtatccagaaccctgatcctgccgtgtaccagctgcgggatagcaagagcagcgacaagagcgtgtgtctgttcaccgacttcgacagccagaccaacgtgtcccagagcaaggactccgacgtgtacatcaccgataagtgcgtgctggacatgcggagcatggacttcaagagcaactccgccgtggcctggtccaacaagtccgatttcgcctgcgccaacgccttcaacaacagcattatccccgaggacacattcttcccaagccccgagagcagctgcggctttaccagcgagagctaccagcagggcgtgctgagcgccaccatcctgtacgagatcctgctgggcaaggccaccctgtacgccgtgctggtgtctgccctggtgctgatggctatggtcaagcggaaggacagccgggga

SEQ ID NO: 4071 - DNA, 1881 bp, synthetic construct
  source 1..1881: mol_type = other DNA
atggccttaccagtgaccgccttgctcctgccgctggccttgctgctccacgccgccaggccggagatcgtgctgacacagtctcccgccacactgtcactgtctccaggcgaaagagccacactgagctgtagagccagccagagcgtgtccatctacctggcctggtatcagcagaagcctggacaggctccccggctgctgatctacgatgccagcaatagagccacaggcatccccgccagattttctggctctggcagcggcaccgatttcaccctgaccataagcagcctggaacctgaggacttcgccgtgtactactgccagcagagaagcaactggcctcctttcacattcggccctggcaccaaggtggacatcaaactcgaggacctgaagaacgtgttcccacctgaggtggccgtgttcgagcctagcgaggccgagatcagccacacccagaaagccaccctcgtgtgcctggctaccggcttctaccccgaccatgtggaactgtcttggtgggtcaacggcaaagaggtgcacagcggcgtgtgtaccgacccccagccactgaaagaacagcccgccctgaacgacagccggtactgcctgagcagcagactgagagtgtccgccaccttctggcagaacccccggaaccacttcagatgccaggtgcagttctacggcctgagcgagaacgacgagtggacccaggacagagccaagcccgtgacccagatcgtgtctgccgaagcctggggcagagccgattgcgacgtgaagctggtggaaaagagcttcgagacagacaccaacctgaacttccagaacctgagcgtgatcggcttcagaatcctgctgctgaaagtggccggctttaacctgctgatgaccctgcggctgtggtccagcagggccaagcgatctggatctggagcaacaaacttctcactactcaaacaagcaggtgacgtggaggagaatcccgggcctactagtatggactggatttggcgcatccttttccttgtcggcgctgctaccggcgcgcattccttcgaacaggtgcagcttgttgaaagcggaggcggagttgtgcagcctggcagaagtctgagactgtcttgtgccgccagcggcttcaccttcagcagctatggaatgcactgggtccgacaggcccctggcaaaggacttgaatgggttgccgtgatctgggacgacggcagcaacaagtattacgtggacagcgtgaagggcagattcaccatcagccgggacaacagcaagaacaccctgtacctccagatgaacagcctgagagccgaggacacagccgtgtattattgcgccagagatgactactacggcagcggctccttcaacagctactatggcacagacgtgtggggccagggcacaacagttaccgttagctctacgcgtatccagaaccctgatcctgccgtgtaccagctgcgggatagcaagagcagcgacaagagcgtgtgtctgttcaccgacttcgacagccagaccaacgtgtcccagagcaaggactccgacgtgtacatcaccgataagtgcgtgctggacatgcggagcatggacttcaagagcaactccgccgtggcctggtccaacaagtccgatttcgcctgcgccaacgccttcaacaacagcattatccccgaggacacattcttcccaagccccgagagcagctgcggctttaccagcgagagctaccagcagggcgtgctgagcgccaccatcctgtacgagatcctgctgggcaaggccaccctgtacgccgtgctggtgtctgccctggtgctgatggctatggtcaagcggaaggacagccgggga

SEQ ID NO: 4072 - DNA, 1836 bp, synthetic construct
  source 1..1836: mol_type = other DNA
atggccttaccagtgaccgccttgctcctgccgctggccttgctgctccacgccgccaggccggacatccagatgacacagagccctagcagcctgtctgccagcgtgggagacagagtgaccatcacctgtagagccagccagggcatctcttcttggctggcctggtatcagcagaagcccgagaaggcccctaagagcctgatctatgccgccagctctctccagagcggagtgcctagcagattttctggcagcggctccggcaccgatttcaccctgacaatatccagcctccagcctgaggacttcgccacctactactgccagcagtacaacagctacccctacaccttcggccagggcaccaagctggaaatcaaactcgaggacctgaagaacgtgttcccacctgaggtggccgtgttcgagcctagcgaggccgagatcagccacacccagaaagccaccctcgtgtgcctggctaccggcttctaccccgaccatgtggaactgtcttggtgggtcaacggcaaagaggtgcacagcggcgtgtgtaccgacccccagccactgaaagaacagcccgccctgaacgacagccggtactgcctgagcagcagactgagagtgtccgccaccttctggcagaacccccggaaccacttcagatgccaggtgcagttctacggcctgagcgagaacgacgagtggacccaggacagagccaagcccgtgacccagatcgtgtctgccgaagcctggggcagagccgattgcgacgtgaagctggtggaaaagagcttcgagacagacaccaacctgaacttccagaacctgagcgtgatcggcttcagaatcctgctgctgaaagtggccggctttaacctgctgatgaccctgcggctgtggtccagcagggccaagcgatctggatctggagcaacaaacttctcactactcaaacaagcaggtgacgtggaggagaatcccgggcctactagtatggactggatttggcgcatccttttccttgtcggcgctgctaccggcgcgcattccttcgaagaagtgcaactggttcaatctggcggcggactggttcatccaggcggttctctgagactgagctgtgccggctctggcttcaccttcagcacctacctgatgtactgggtccgacaggcccctggcaagacactggaatgggtgtccgctattggcagcggaggcgatacctactacgccgactctgtgaagggcagattcaccatcagccgggacaacgccaagaacagcctgtacctccagatgaactccctgagagccgaggacatggccgtgtactactgtgccagaggactcggctattggggccagggaacactggtcacagtgtcctctacgcgtatccagaaccctgatcctgccgtgtaccagctgcgggatagcaagagcagcgacaagagcgtgtgtctgttcaccgacttcgacagccagaccaacgtgtcccagagcaaggactccgacgtgtacatcaccgataagtgcgtgctggacatgcggagcatggacttcaagagcaactccgccgtggcctggtccaacaagtccgatttcgcctgcgccaacgccttcaacaacagcattatccccgaggacacattcttcccaagccccgagagcagctgcggctttaccagcgagagctaccagcagggcgtgctgagcgccaccatcctgtacgagatcctgctgggcaaggccaccctgtacgccgtgctggtgtctgccctggtgctgatggctatggtcaagcggaaggacagccgggga

SEQ ID NO: 4073 - DNA, 1893 bp, synthetic construct
  source 1..1893: mol_type = other DNA
atggccttaccagtgaccgccttgctcctgccgctggccttgctgctccacgccgccaggccgctgcctgttctgacacagcctccatccgtgtctgtggcccctggaaagaccgccagaatcacatgcggcggcaacaacatcggcagcaagagcgtgcactggtatcagcagaagcctggacaggctcctgtgctggtggtgtacgacgacagcgatagacctagcggcatccccgagagattcagcggcagcaattccggcaataccgccacactgaccatcagcagagtggaagctggcgacgaggccgactactactgccaagtgtgggacagcagcagcgactacgtggtgtttggcggcggaacaaagctgacagtgcttctcgaggacctgaagaacgtgttcccacctgaggtggccgtgttcgagcctagcgaggccgagatcagccacacccagaaagccaccctcgtgtgcctggctaccggcttctaccccgaccatgtggaactgtcttggtgggtcaacggcaaagaggtgcacagcggcgtgtgtaccgacccccagccactgaaagaacagcccgccctgaacgacagccggtactgcctgagcagcagactgagagtgtccgccaccttctggcagaacccccggaaccacttcagatgccaggtgcagttctacggcctgagcgagaacgacgagtggacccaggacagagccaagcccgtgacccagatcgtgtctgccgaagcctggggcagagccgattgcgacgtgaagctggtggaaaagagcttcgagacagacaccaacctgaacttccagaacctgagcgtgatcggcttcagaatcctgctgctgaaagtggccggctttaacctgctgatgaccctgcggctgtggtccagcagggccaagcgatctggatctggagcaacaaacttctcactactcaaacaagcaggtgacgtggaggagaatcccgggcctactagtatggactggatttggcgcatccttttccttgtcggcgctgctaccggcgcgcattccttcgaagaagttcaactggtgcagagcggagccgaagtgaagaagccaggcgagagcctgaagattagctgcaaaggcagcggctacagcttcaccagctactggatcggctgggtccgacagatgcctggcaaaggactggaatggatgggcatcatctaccccggcgacagcgacaccagatacagccctagctttcagggccaagtgaccatctccgccgacaagagcatcagcacagcctacctccagtggtcctctctgaaggccagcgataccgccatgtactactgcgccagacaagtctggggatggcaaggcggcatgtaccccaggtctaactggtggtacaacctggactcttggggccagggcacactggtcacagtctcttctacgcgtatccagaaccctgatcctgccgtgtaccagctgcgggatagcaagagcagcgacaagagcgtgtgtctgttcaccgacttcgacagccagaccaacgtgtcccagagcaaggactccgacgtgtacatcaccgataagtgcgtgctggacatgcggagcatggacttcaagagcaactccgccgtggcctggtccaacaagtccgatttcgcctgcgccaacgccttcaacaacagcattatccccgaggacacattcttcccaagccccgagagcagctgcggctttaccagcgagagctaccagcagggcgtgctgagcgccaccatcctgtacgagatcctgctgggcaaggccaccctgtacgccgtgctggtgtctgccctggtgctgatggctatggtcaagcggaaggacagccgggga

SEQ ID NO: 4074 - DNA, 1872 bp, synthetic construct
  source 1..1872: mol_type = other DNA
atggccttaccagtgaccgccttgctcctgccgctggccttgctgctccacgccgccaggccggagctggtcatgacacagagccctgcttctctggccgtgtcactgggacagagagccaccatctcttgcagagccagcgagagcgtggacagctacggcaagagcttcatgcactggtatcagctcaagcccggccagcctcctaagctgctgatctacagagcctccaacctggaaagcggcgtgccagccagattttctggcagcggcagcagaaccgacttcaccctgaccattgatcccgtggaagccgatgatgccgccacctactactgccagcagaacaacgaggacccctggacatttggcggaggcaccaagctggaaatcaaactcgaggacctgaagaacgtgttcccacctgaggtggccgtgttcgagcctagcgaggccgagatcagccacacccagaaagccaccctcgtgtgcctggctaccggcttctaccccgaccatgtggaactgtcttggtgggtcaacggcaaagaggtgcacagcggcgtgtgtaccgacccccagccactgaaagaacagcccgccctgaacgacagccggtactgcctgagcagcagactgagagtgtccgccaccttctggcagaacccccggaaccacttcagatgccaggtgcagttctacggcctgagcgagaacgacgagtggacccaggacagagccaagcccgtgacccagatcgtgtctgccgaagcctggggcagagccgattgcgacgtgaagctggtggaaaagagcttcgagacagacaccaacctgaacttccagaacctgagcgtgatcggcttcagaatcctgctgctgaaagtggccggctttaacctgctgatgaccctgcggctgtggtccagcagggccaagcgatctggatctggagcaacaaacttctcactactcaaacaagcaggtgacgtggaggagaatcccgggcctactagtatggactggatttggcgcatccttttccttgtcggcgctgctaccggcgcgcattccttcgaagaagtgcagctcgaacagtctggccccgagcttgtgaaacctggcgcttccgtgaagatgagctgcaaggccagcggctacaccttcaccaactactacatgaaatgggtcaagcagagccacggcaagtccctggaatggatcggcgatctgaaccccaacaacggcgacaccttctacaaccagaagttcaagggcaaagccacactgaccgtggacaagagcagcaacaccgcctacatgcagctcaactccctgaccagcgaggacagcgccgtgtactactgtgccagaaccggcagatacgaagagaacgctatggactactggggccagggcacaagcgtgacagtctcttctacgcgtatccagaaccctgatcctgccgtgtaccagctgcgggatagcaagagcagcgacaagagcgtgtgtctgttcaccgacttcgacagccagaccaacgtgtcccagagcaaggactccgacgtgtacatcaccgataagtgcgtgctggacatgcggagcatggacttcaagagcaactccgccgtggcctggtccaacaagtccgatttcgcctgcgccaacgccttcaacaacagcattatccccgaggacacattcttcccaagccccgagagcagctgcggctttaccagcgagagctaccagcagggcgtgctgagcgccaccatcctgtacgagatcctgctgggcaaggccaccctgtacgccgtgctggtgtctgccctggtgctgatggctatggtcaagcggaaggacagccgggga

SEQ ID NO: 4075 - DNA, 1854 bp, synthetic construct
  source 1..1854: mol_type = other DNA
atggccttaccagtgaccgccttgctcctgccgctggccttgctgctccacgccgccaggccggacgtggtcatgacacagagcccttctagcctgtctgccagcgtgggcgacagagtgaccatcacctgtatggcctccgaggacatctacatccggctggcctggtatcagcagaagcctggaaacgcccctaagctgctgatctacgccgccacctctctggaaacaggcgtgccaagcagattttccggcagcggctctggcaccgatttcaccctgacaatatccagcctccagcctgaggacttcgccacctactactgccagcagtattggagcagcccctggacatttggcggaggcaccaaggtggaaatcaaactcgaggacctgaagaacgtgttcccacctgaggtggccgtgttcgagcctagcgaggccgagatcagccacacccagaaagccaccctcgtgtgcctggctaccggcttctaccccgaccatgtggaactgtcttggtgggtcaacggcaaagaggtgcacagcggcgtgtgtaccgacccccagccactgaaagaacagcccgccctgaacgacagccggtactgcctgagcagcagactgagagtgtccgccaccttctggcagaacccccggaaccacttcagatgccaggtgcagttctacggcctgagcgagaacgacgagtggacccaggacagagccaagcccgtgacccagatcgtgtctgccgaagcctggggcagagccgattgcgacgtgaagctggtggaaaagagcttcgagacagacaccaacctgaacttccagaacctgagcgtgatcggcttcagaatcctgctgctgaaagtggccggctttaacctgctgatgaccctgcggctgtggtccagcagggccaagcgatctggatctggagcaacaaacttctcactactcaaacaagcaggtgacgtggaggagaatcccgggcctactagtatggactggatttggcgcatccttttccttgtcggcgctgctaccggcgcgcattccttcgaacaggttcagctgcaagagtctggccccggactggtcaagcctagccaaacactgagcctgacctgtaccgtgtccggctacagcatcaccagcgactacacctggaactggatcagacagcctcctggcaacggactggaatggatcggctacatcacctacagcggcagcaccagctacaaccccagcctgaaaagccgggtgctgatctccgtggacaccagcaagaatcaggtgtccctgaagctgagcagcgtgacagccgctgataccgccgtgtactactgtgccagactggggagaagatacacaatggactactggggccagggcaccaccgtgacagtttcttctacgcgtatccagaaccctgatcctgccgtgtaccagctgcgggatagcaagagcagcgacaagagcgtgtgtctgttcaccgacttcgacagccagaccaacgtgtcccagagcaaggactccgacgtgtacatcaccgataagtgcgtgctggacatgcggagcatggacttcaagagcaactccgccgtggcctggtccaacaagtccgatttcgcctgcgccaacgccttcaacaacagcattatccccgaggacacattcttcccaagccccgagagcagctgcggctttaccagcgagagctaccagcagggcgtgctgagcgccaccatcctgtacgagatcctgctgggcaaggccaccctgtacgccgtgctggtgtctgccctggtgctgatggctatggtcaagcggaaggacagccgggga

SEQ ID NO: 4076 - DNA, 1866 bp, synthetic construct
  source 1..1866: mol_type = other DNA
atggccttaccagtgaccgccttgctcctgccgctggccttgctgctccacgccgccaggccggatattgtgctgactcagagccctgccactctgagccttagtccaggcgacagagctaccatctcctgtagggcctctgaatccgtgaccattctgggctctcatctcatatattggtatcaacaaaagccgggccagcctccacggctgctcattcaactggcctctaacgtgcagaccggcgtgccagctagattttctggctctggctcccggaccgactttacactgacaatcagctccgtggaacccgaagattttgccgtctattattgcctccagtccaggaccattcctcggacattcggccagggaacaaaactcgaaatcaagcggctcgaggacctgaagaacgtgttcccacctgaggtggccgtgttcgagcctagcgaggccgagatcagccacacccagaaagccaccctcgtgtgcctggctaccggcttctaccccgaccatgtggaactgtcttggtgggtcaacggcaaagaggtgcacagcggcgtgtgtaccgacccccagccactgaaagaacagcccgccctgaacgacagccggtactgcctgagcagcagactgagagtgtccgccaccttctggcagaacccccggaaccacttcagatgccaggtgcagttctacggcctgagcgagaacgacgagtggacccaggacagagccaagcccgtgacccagatcgtgtctgccgaagcctggggcagagccgattgcgacgtgaagctggtggaaaagagcttcgagacagacaccaacctgaacttccagaacctgagcgtgatcggcttcagaatcctgctgctgaaagtggccggctttaacctgctgatgaccctgcggctgtggtccagcagggccaagcgatctggatctggagcaacaaacttctcactactcaaacaagcaggtgacgtggaggagaatcccgggcctactagtatggactggatttggcgcatccttttccttgtcggcgctgctaccggcgcgcattccttcgaacaggtgcagctcgttcagagtggccccgaagtgaaaaagccaggcgagtccgtgaagatttcctgcaaagcctccggctacacattccggcactactctatgaattgggtcaagcaggccccaggccagggccttaagtggatgggacgcatcaataccgagtccggcgtgccaatctacgccgatgacttcaaaggccggttcagcttcaccgtggatacctctgcctccaccgcctacctggaaatcagcagcctgaccagcgaggatacagctgtgtacttctgtagcaacgattacctctacagcctggatttctggggacagggaaccacactgaccgtgtctagcacgcgtatccagaaccctgatcctgccgtgtaccagctgcgggatagcaagagcagcgacaagagcgtgtgtctgttcaccgacttcgacagccagaccaacgtgtcccagagcaaggactccgacgtgtacatcaccgataagtgcgtgctggacatgcggagcatggacttcaagagcaactccgccgtggcctggtccaacaagtccgatttcgcctgcgccaacgccttcaacaacagcattatccccgaggacacattcttcccaagccccgagagcagctgcggctttaccagcgagagctaccagcagggcgtgctgagcgccaccatcctgtacgagatcctgctgggcaaggccaccctgtacgccgtgctggtgtctgccctggtgctgatggctatggtcaagcggaaggacagccgggga

SEQ ID NO: 4077 - DNA, 1866 bp, synthetic construct
  source 1..1866: mol_type = other DNA
atggccttaccagtgaccgccttgctcctgccgctggccttgctgctccacgccgccaggccggacatcgtgctgacacagtctcccgccacactgtcactgagccctggcgatagagccacactgagctgtagagccagcgagagcgtgacaatcctgggcagccacctgatctactggtatcagcagaagcccggacaggcccctagactgctgattcagctcgccagcaatgtgcagacaggcatccctgccagattttccggcagcggcagcagaaccgatttcaccctgaccataagcagcctggaacctgaggacttcgccgtgtactactgcctccagagccggacaatccccagaacctttggacagggcaccaagctggaaatcaagagactcgaggacctgaagaacgtgttcccacctgaggtggccgtgttcgagcctagcgaggccgagatcagccacacccagaaagccaccctcgtgtgcctggctaccggcttctaccccgaccatgtggaactgtcttggtgggtcaacggcaaagaggtgcacagcggcgtgtgtaccgacccccagccactgaaagaacagcccgccctgaacgacagccggtactgcctgagcagcagactgagagtgtccgccaccttctggcagaacccccggaaccacttcagatgccaggtgcagttctacggcctgagcgagaacgacgagtggacccaggacagagccaagcccgtgacccagatcgtgtctgccgaagcctggggcagagccgattgcgacgtgaagctggtggaaaagagcttcgagacagacaccaacctgaacttccagaacctgagcgtgatcggcttcagaatcctgctgctgaaagtggccggctttaacctgctgatgaccctgcggctgtggtccagcagggccaagcgatctggatctggagcaacaaacttctcactactcaaacaagcaggtgacgtggaggagaatcccgggcctactagtatggactggatttggcgcatccttttccttgtcggcgctgctaccggcgcgcattccttcgaacaggttcagctggtgcagtctggcagcgagctgaagaaacctggcgagagcgtgaagatcagctgcaaggccagcggctacaccttcacacactacagcatgaactgggtccgacaggcccctggacaaggactggaatggatgggcagaatcaacaccgagacaggcgagcccctgtacgccgacgatttcaagggcagattcgtgttcagcctggacaccagcgccagcacagcctatctccagatcagctctctgaaggccgaggacaccgccgtgtactactgctccaacgactacctgtactccctggactattggggccagggcacactggtcacagtgtctagtacgcgtatccagaaccctgatcctgccgtgtaccagctgcgggatagcaagagcagcgacaagagcgtgtgtctgttcaccgacttcgacagccagaccaacgtgtcccagagcaaggactccgacgtgtacatcaccgataagtgcgtgctggacatgcggagcatggacttcaagagcaactccgccgtggcctggtccaacaagtccgatttcgcctgcgccaacgccttcaacaacagcattatccccgaggacacattcttcccaagccccgagagcagctgcggctttaccagcgagagctaccagcagggcgtgctgagcgccaccatcctgtacgagatcctgctgggcaaggccaccctgtacgccgtgctggtgtctgccctggtgctgatggctatggtcaagcggaaggacagccgggga

SEQ ID NO: 4078 - DNA, 1869 bp, synthetic construct
  source 1..1869: mol_type = other DNA
atggccttaccagtgaccgccttgctcctgccgctggccttgctgctccacgccgccaggccggacatccagctgactcagagccctagctttctgagcgccagcgtgggcgacagagtgaccattacatgtagagccagccagggcatcagcaccgacctgaactggtatcagcagaagcctggcaaggcccctaagctgctgatctacgccgccagcaatctggaaagcggcgtgccaagcagattttccggctctggcagcggcaccgagttcaccctgacaatatctagcctccagcctgaggacttcgccacctactactgccagcagagctacaactggccctacacctttggcggaggcaccaaggtggaaatcaagagactcgaggacctgaagaacgtgttcccacctgaggtggccgtgttcgagcctagcgaggccgagatcagccacacccagaaagccaccctcgtgtgcctggctaccggcttctaccccgaccatgtggaactgtcttggtgggtcaacggcaaagaggtgcacagcggcgtgtgtaccgacccccagccactgaaagaacagcccgccctgaacgacagccggtactgcctgagcagcagactgagagtgtccgccaccttctggcagaacccccggaaccacttcagatgccaggtgcagttctacggcctgagcgagaacgacgagtggacccaggacagagccaagcccgtgacccagatcgtgtctgccgaagcctggggcagagccgattgcgacgtgaagctggtggaaaagagcttcgagacagacaccaacctgaacttccagaacctgagcgtgatcggcttcagaatcctgctgctgaaagtggccggctttaacctgctgatgaccctgcggctgtggtccagcagggccaagcgatctggatctggagcaacaaacttctcactactcaaacaagcaggtgacgtggaggagaatcccgggcctactagtatggactggatttggcgcatccttttccttgtcggcgctgctaccggcgcgcattccttcgaagaagttcagctggttgaatcaggcggaggactcgtgaaacctggcggctctctgagactgtcttgtgccgccagcggcttcaccttcagcaacttcgagatgaactgggtccgacaggccccaggcaaaggactggaatgggtgtccggcatcagctccaatggccggtacatcaactacgccgacagcgtgaagggcagattcaccatcagccgggacaacgccaagaacagcctgtacctccagatgaactccctgagagccgaggacaccgccgtgtactattgtgccagagtggtggacttcgaccaggactacaacggcttcgactattggggccagggcaccctggttaccgttagctctacgcgtatccagaaccctgatcctgccgtgtaccagctgcgggatagcaagagcagcgacaagagcgtgtgtctgttcaccgacttcgacagccagaccaacgtgtcccagagcaaggactccgacgtgtacatcaccgataagtgcgtgctggacatgcggagcatggacttcaagagcaactccgccgtggcctggtccaacaagtccgatttcgcctgcgccaacgccttcaacaacagcattatccccgaggacacattcttcccaagccccgagagcagctgcggctttaccagcgagagctaccagcagggcgtgctgagcgccaccatcctgtacgagatcctgctgggcaaggccaccctgtacgccgtgctggtgtctgccctggtgctgatggctatggtcaagcggaaggacagccgggga

SEQ ID NO: 4079 - DNA, 1863 bp, synthetic construct
  source 1..1863: mol_type = other DNA
atggccttaccagtgaccgccttgctcctgccgctggccttgctgctccacgccgccaggccggacatccaactgactcagagccccagctttctgagcgcctctgtgggcgacagagtgaccatcacatgtagtctcagcctgggcatcagcacatggcgggattggtttccgccgaggcttggcaggggccttgagccgctgacctacgccgccagcacactgcaaagcggagtgcctagcagattttccggcagcggctctggcaccgagttcaccctgacaatatccagcctccagcctgaggacttcgccacctactactgccagcagctcaacagctaccctctgacctttggcggaggcaccaaggtggaaatcaagagactcgaggacctgaagaacgtgttcccacctgaggtggccgtgttcgagcctagcgaggccgagatcagccacacccagaaagccaccctcgtgtgcctggctaccggcttctaccccgaccatgtggaactgtcttggtgggtcaacggcaaagaggtgcacagcggcgtgtgtaccgacccccagccactgaaagaacagcccgccctgaacgacagccggtactgcctgagcagcagactgagagtgtccgccaccttctggcagaacccccggaaccacttcagatgccaggtgcagttctacggcctgagcgagaacgacgagtggacccaggacagagccaagcccgtgacccagatcgtgtctgccgaagcctggggcagagccgattgcgacgtgaagctggtggaaaagagcttcgagacagacaccaacctgaacttccagaacctgagcgtgatcggcttcagaatcctgctgctgaaagtggccggctttaacctgctgatgaccctgcggctgtggtccagcagggccaagcgatctggatctggagcaacaaacttctcactactcaaacaagcaggtgacgtggaggagaatcccgggcctactagtatggactggatttggcgcatccttttccttgtcggcgctgctaccggcgcgcattccttcgaagaagttcaactggttgagtctggtggcggcctggttaagcctggcggatctctgagactgagctgtgccgccagcggcttcacctttagcacatacggcatgagctgggtccgacaggcccctggaaaaggacttgagtgggtcgcctacatcaacaacggctccggctacatctactacgccgacagcgtgaagggcagattcaccatcagccgggacaacgccaagaacagcctgtacctccagatgaactccctgagagccgaggacaccgccgtgtactattgtgccagaggacagtggtggagcggcggagactttgattattggggccagggcaccctggtcaccgtttcttctacgcgtatccagaaccctgatcctgccgtgtaccagctgcgggatagcaagagcagcgacaagagcgtgtgtctgttcaccgacttcgacagccagaccaacgtgtcccagagcaaggactccgacgtgtacatcaccgataagtgcgtgctggacatgcggagcatggacttcaagagcaactccgccgtggcctggtccaacaagtccgatttcgcctgcgccaacgccttcaacaacagcattatccccgaggacacattcttcccaagccccgagagcagctgcggctttaccagcgagagctaccagcagggcgtgctgagcgccaccatcctgtacgagatcctgctgggcaaggccaccctgtacgccgtgctggtgtctgccctggtgctgatggctatggtcaagcggaaggacagccgggga

SEQ ID NO: 4080 - DNA, 1866 bp, synthetic construct
  source 1..1866: mol_type = other DNA
atggccttaccagtgaccgccttgctcctgccgctggccttgctgctccacgccgccaggccggagatcgtgctgacacagtctcccgccacactgtcactgtctccaggcgaaagagccacactgagctgtagcgccagcagcagcgtgtcctacatgtactggtatcagcagaagcccggacaggcccctagactgctgatctacagaaccagcaacctggcctctggcatccccgccagattttctggctctggcagcggcaccgatttcaccctgaccataagcagcctggaacctgaggacttcgccgtgtactactgccagcagtaccacagctaccccaccacctttggacagggcaccaaggtggaaatcaagcggacagttctcgaggacctgaagaacgtgttcccacctgaggtggccgtgttcgagcctagcgaggccgagatcagccacacccagaaagccaccctcgtgtgcctggctaccggcttctaccccgaccatgtggaactgtcttggtgggtcaacggcaaagaggtgcacagcggcgtgtgtaccgacccccagccactgaaagaacagcccgccctgaacgacagccggtactgcctgagcagcagactgagagtgtccgccaccttctggcagaacccccggaaccacttcagatgccaggtgcagttctacggcctgagcgagaacgacgagtggacccaggacagagccaagcccgtgacccagatcgtgtctgccgaagcctggggcagagccgattgcgacgtgaagctggtggaaaagagcttcgagacagacaccaacctgaacttccagaacctgagcgtgatcggcttcagaatcctgctgctgaaagtggccggctttaacctgctgatgaccctgcggctgtggtccagcagggccaagcgatctggatctggagcaacaaacttctcactactcaaacaagcaggtgacgtggaggagaatcccgggcctactagtatggactggatttggcgcatccttttccttgtcggcgctgctaccggcgcgcattccttcgaagaagtgcagctggttgaatcaggtggcggcctggttcaacctggcggatctctgagactgtcttgtgccgccagcggcttcagcttcaacacctacgccatgaactgggtccgacaggctcctggcaaaggactggaatgggtgtcccacatcagaagcaagagcaacaacttcgccacctactacgccgacagcgtgaaggacagattcaccatcagccgggacaacgccaagaacagcctgtacctccagatgaactccctgagagccgaggacaccgccgtgtattattgcgccagacaaggcggcgacttccctatggattattggggccagggcaccctggtcaccgtttcttctacgcgtatccagaaccctgatcctgccgtgtaccagctgcgggatagcaagagcagcgacaagagcgtgtgtctgttcaccgacttcgacagccagaccaacgtgtcccagagcaaggactccgacgtgtacatcaccgataagtgcgtgctggacatgcggagcatggacttcaagagcaactccgccgtggcctggtccaacaagtccgatttcgcctgcgccaacgccttcaacaacagcattatccccgaggacacattcttcccaagccccgagagcagctgcggctttaccagcgagagctaccagcagggcgtgctgagcgccaccatcctgtacgagatcctgctgggcaaggccaccctgtacgccgtgctggtgtctgccctggtgctgatggctatggtcaagcggaaggacagccgggga

SEQ ID NO: 4081 - DNA, 1854 bp, synthetic construct
  source 1..1854: mol_type = other DNA
atggccttaccagtgaccgccttgctcctgccgctggccttgctgctccacgccgccaggccggacgtggtcatgacacagagcccttctagcctgtctgccagcgtgggcgacagagtgaccatcacctgtaaagccagcgaggacatctacatccggctggcctggtatcagcagaagcctggaaaggcccctaagctgctgatctacgccgccacctctctggaaacaggcgtgccaagcagattttccggcagcggctctggcaccgatttcaccctgacaatatccagcctccagcctgaggacttcgccacctactactgccagcagtattggaccacaccttggacctttggcggaggcaccaaggtggaaatcaaactcgaggacctgaagaacgtgttcccacctgaggtggccgtgttcgagcctagcgaggccgagatcagccacacccagaaagccaccctcgtgtgcctggctaccggcttctaccccgaccatgtggaactgtcttggtgggtcaacggcaaagaggtgcacagcggcgtgtgtaccgacccccagccactgaaagaacagcccgccctgaacgacagccggtactgcctgagcagcagactgagagtgtccgccaccttctggcagaacccccggaaccacttcagatgccaggtgcagttctacggcctgagcgagaacgacgagtggacccaggacagagccaagcccgtgacccagatcgtgtctgccgaagcctggggcagagccgattgcgacgtgaagctggtggaaaagagcttcgagacagacaccaacctgaacttccagaacctgagcgtgatcggcttcagaatcctgctgctgaaagtggccggctttaacctgctgatgaccctgcggctgtggtccagcagggccaagcgatctggatctggagcaacaaacttctcactactcaaacaagcaggtgacgtggaggagaatcccgggcctactagtatggactggatttggcgcatccttttccttgtcggcgctgctaccggcgcgcattccttcgaacaggtgcagctccaagagtctggccctggactggtcaagcctagccagacactgagcctgacctgtaccgtgtccggctacagcatcaccatcgactacacctggaactggatcagacagcctcctggcaaaggactggaatggatcggctacatcacctacagcggcagcaccgactacaaccccagcctgaaaagccgggtgctgatctccgtggacaccagcaagaatcaggtgtccctgaagctgagcagcgtgacagccgctgataccgccgtgtactactgtgccagactgggcagaagatacgccctggattattggggccagggcaccaccgtgacagtgtcatctacgcgtatccagaaccctgatcctgccgtgtaccagctgcgggatagcaagagcagcgacaagagcgtgtgtctgttcaccgacttcgacagccagaccaacgtgtcccagagcaaggactccgacgtgtacatcaccgataagtgcgtgctggacatgcggagcatggacttcaagagcaactccgccgtggcctggtccaacaagtccgatttcgcctgcgccaacgccttcaacaacagcattatccccgaggacacattcttcccaagccccgagagcagctgcggctttaccagcgagagctaccagcagggcgtgctgagcgccaccatcctgtacgagatcctgctgggcaaggccaccctgtacgccgtgctggtgtctgccctggtgctgatggctatggtcaagcggaaggacagccgggga

SEQ ID NO: 4082 - DNA, 1869 bp, synthetic construct
  source 1..1869: mol_type = other DNA
atggccttaccagtgaccgccttgctcctgccgctggccttgctgctccacgccgccaggccggacatccagatgacccagaccacaagcagcctgtctgccagcctgggcgacagagtgaccatctcttgtagagccagccaggacatcagcaactacctgaactggtatcagcagaaacccgacggcaccgtgaagctgctgatctactacaccagcatcctgcacagcggcgtgcccagcagattttctggctctggcagcggcaccgactacagcctgaccatcagcaatctggaacaagaggacttcgctacctacttctgccagcaaggcaacaccctgccttggacatttggcggaggcaccaagctggaaatcaaagctctcgaggacctgaagaacgtgttcccacctgaggtggccgtgttcgagcctagcgaggccgagatcagccacacccagaaagccaccctcgtgtgcctggctaccggcttctaccccgaccatgtggaactgtcttggtgggtcaacggcaaagaggtgcacagcggcgtgtgtaccgacccccagccactgaaagaacagcccgccctgaacgacagccggtactgcctgagcagcagactgagagtgtccgccaccttctggcagaacccccggaaccacttcagatgccaggtgcagttctacggcctgagcgagaacgacgagtggacccaggacagagccaagcccgtgacccagatcgtgtctgccgaagcctggggcagagccgattgcgacgtgaagctggtggaaaagagcttcgagacagacaccaacctgaacttccagaacctgagcgtgatcggcttcagaatcctgctgctgaaagtggccggctttaacctgctgatgaccctgcggctgtggtccagcagggccaagcgatctggatctggagcaacaaacttctcactactcaaacaagcaggtgacgtggaggagaatcccgggcctactagtatggactggatttggcgcatccttttccttgtcggcgctgctaccggcgcgcattccttcgaagaagtgcaactggttgaatctggcggcggactggttaagcctggcggatctctgaagctgagctgtgccgcctctggcttcgccttcagcatctacgatatgagctgggtccgacagacccctgagaagagactggaatgggtcgcctacatctctagcggcggagggacctactatcccgacacagtgaagggcagattcaccatctccagagacaacgccaagaacaccctgtacctccagatgagcagcctgaagtccgaggacaccgccatgtactactgcgccagacacagcggctatggcacacattggggagtgctgtttgcctactggggccagggaacactggtcacagtttctgctacgcgtatccagaaccctgatcctgccgtgtaccagctgcgggatagcaagagcagcgacaagagcgtgtgtctgttcaccgacttcgacagccagaccaacgtgtcccagagcaaggactccgacgtgtacatcaccgataagtgcgtgctggacatgcggagcatggacttcaagagcaactccgccgtggcctggtccaacaagtccgatttcgcctgcgccaacgccttcaacaacagcattatccccgaggacacattcttcccaagccccgagagcagctgcggctttaccagcgagagctaccagcagggcgtgctgagcgccaccatcctgtacgagatcctgctgggcaaggccaccctgtacgccgtgctggtgtctgccctggtgctgatggctatggtcaagcggaaggacagccgggga

SEQ ID NO: 4083 - DNA, 1899 bp, synthetic construct
  source 1..1899: mol_type = other DNA
atggccttaccagtgaccgccttgctcctgccgctggccttgctgctccacgccgccaggccggacatcgtgatgacacagagccctgatagcctggccgtgtctctgggagagagagccaccatcaactgcaagagcagccagagcctgctgtacagaagcaaccagaagaactacctggcctggtatcagcagaagcccggccagcctcctaagctgctgatctactgggccagcaccagagaaagcggcgtgcccgatagattttctggctctggcagcggcaccgacttcaccctgacaatttctagcctgcaagccgaggacgtggccgtgtactactgccagcagtattacaactaccccagaaccttcggccagggcaccaaggtggaaatcaagagaacagttctcgaggacctgaagaacgtgttcccacctgaggtggccgtgttcgagcctagcgaggccgagatcagccacacccagaaagccaccctcgtgtgcctggctaccggcttctaccccgaccatgtggaactgtcttggtgggtcaacggcaaagaggtgcacagcggcgtgtgtaccgacccccagccactgaaagaacagcccgccctgaacgacagccggtactgcctgagcagcagactgagagtgtccgccaccttctggcagaacccccggaaccacttcagatgccaggtgcagttctacggcctgagcgagaacgacgagtggacccaggacagagccaagcccgtgacccagatcgtgtctgccgaagcctggggcagagccgattgcgacgtgaagctggtggaaaagagcttcgagacagacaccaacctgaacttccagaacctgagcgtgatcggcttcagaatcctgctgctgaaagtggccggctttaacctgctgatgaccctgcggctgtggtccagcagggccaagcgatctggatctggagcaacaaacttctcactactcaaacaagcaggtgacgtggaggagaatcccgggcctactagtatggactggatttggcgcatccttttccttgtcggcgctgctaccggcgcgcattccttcgaagaagttcagctgcttgaatcaggcggcggactggttcaacctggcggatctctgagactgagctgtgccgccagcggctacagcatcacaagcgactatgcctggaactgggtccgacaggcccctggcaaaggactggaatgggtgtcctacatcagcaacagcggcagcaccagctacaaccccagcctgaagtcccggttcaccatcagcagagacaacagcaagaacaccctgtacctccagatgaacagcctgagagctgaggacaccgccgtgtattattgcgccaaagagcggaactacgactacgacgattactactacgctatggactactggggccagggaaccctggtcacagtctcttctacgcgtatccagaaccctgatcctgccgtgtaccagctgcgggatagcaagagcagcgacaagagcgtgtgtctgttcaccgacttcgacagccagaccaacgtgtcccagagcaaggactccgacgtgtacatcaccgataagtgcgtgctggacatgcggagcatggacttcaagagcaactccgccgtggcctggtccaacaagtccgatttcgcctgcgccaacgccttcaacaacagcattatccccgaggacacattcttcccaagccccgagagcagctgcggctttaccagcgagagctaccagcagggcgtgctgagcgccaccatcctgtacgagatcctgctgggcaaggccaccctgtacgccgtgctggtgtctgccctggtgctgatggctatggtcaagcggaaggacagccgggga

SEQ ID NO: 4084 - DNA, 1878 bp, synthetic construct
  source 1..1878: mol_type = other DNA
atggccttaccagtgaccgccttgctcctgccgctggccttgctgctccacgccgccaggccggacgtggtcatgacacagagccctctgagcctgcctgtgacacttggacagcctgccagcatcagctgtagaagcagccagagcctgctgcacagcagcggcaatacctacctggaatggtatcagcagaggcccggacagagccccagacctctgatctacaagatcagcacccggttcagcggcgtgcccgatagattttctggctctggcagcggcaccgacttcaccctgaagattagcagagtggaagccgaggacgtgggcgtgtactactgcttccaaggcagccacgtgccatacacctttggcggcggaacaaaggtggaaatcaagagactcgaggacctgaagaacgtgttcccacctgaggtggccgtgttcgagcctagcgaggccgagatcagccacacccagaaagccaccctcgtgtgcctggctaccggcttctaccccgaccatgtggaactgtcttggtgggtcaacggcaaagaggtgcacagcggcgtgtgtaccgacccccagccactgaaagaacagcccgccctgaacgacagccggtactgcctgagcagcagactgagagtgtccgccaccttctggcagaacccccggaaccacttcagatgccaggtgcagttctacggcctgagcgagaacgacgagtggacccaggacagagccaagcccgtgacccagatcgtgtctgccgaagcctggggcagagccgattgcgacgtgaagctggtggaaaagagcttcgagacagacaccaacctgaacttccagaacctgagcgtgatcggcttcagaatcctgctgctgaaagtggccggctttaacctgctgatgaccctgcggctgtggtccagcagggccaagcgatctggatctggagcaacaaacttctcactactcaaacaagcaggtgacgtggaggagaatcccgggcctactagtatggactggatttggcgcatccttttccttgtcggcgctgctaccggcgcgcattccttcgaacaagttcagctggttcagagcggagccgaagtgaagaaacctggggcctctgtgaaggtgtcctgcaaagcctctggcctgaccatcgaggactactacatgcactgggtccgacaggcccctggacaaggacttgaatggatgggctggatcgaccccgagaacggcgatacagagtacggccctaagttccagggcagagtgaccatgaccagagacaccagcatcaacaccgcctacatggaactgagccggctgagatccgatgacaccgccgtgtactattgcgccgtgcacaatgcccactacggcacttggtttgcctattggggccagggcacactggtcaccgttagctctacgcgtatccagaaccctgatcctgccgtgtaccagctgcgggatagcaagagcagcgacaagagcgtgtgtctgttcaccgacttcgacagccagaccaacgtgtcccagagcaaggactccgacgtgtacatcaccgataagtgcgtgctggacatgcggagcatggacttcaagagcaactccgccgtggcctggtccaacaagtccgatttcgcctgcgccaacgccttcaacaacagcattatccccgaggacacattcttcccaagccccgagagcagctgcggctttaccagcgagagctaccagcagggcgtgctgagcgccaccatcctgtacgagatcctgctgggcaaggccaccctgtacgccgtgctggtgtctgccctggtgctgatggctatggtcaagcggaaggacagccgggga

SEQ ID NO: 4085 - DNA, 1854 bp, synthetic construct
  source 1..1854: mol_type = other DNA
atggccttaccagtgaccgccttgctcctgccgctggccttgctgctccacgccgccaggccggacatccagatgacacagagccctagcagcctgtctgccagcgtgggagacagagtgaccatcacctgtagagccagcgagaacatctacagcaacctggcctggtatcagcagaagcctggcaaggcccctaagctgctgatctacgccgccaccaatctggctgatggcgtgccaagcagattttccggctctggcagcggcaccgatttcaccctgacaatatccagcctccagcctgaggacttcgccacctactactgccagcacttttggggcacccctacattcggccagggcaccaaggtggaaatcaagagaacagttctcgaggacctgaagaacgtgttcccacctgaggtggccgtgttcgagcctagcgaggccgagatcagccacacccagaaagccaccctcgtgtgcctggctaccggcttctaccccgaccatgtggaactgtcttggtgggtcaacggcaaagaggtgcacagcggcgtgtgtaccgacccccagccactgaaagaacagcccgccctgaacgacagccggtactgcctgagcagcagactgagagtgtccgccaccttctggcagaacccccggaaccacttcagatgccaggtgcagttctacggcctgagcgagaacgacgagtggacccaggacagagccaagcccgtgacccagatcgtgtctgccgaagcctggggcagagccgattgcgacgtgaagctggtggaaaagagcttcgagacagacaccaacctgaacttccagaacctgagcgtgatcggcttcagaatcctgctgctgaaagtggccggctttaacctgctgatgaccctgcggctgtggtccagcagggccaagcgatctggatctggagcaacaaacttctcactactcaaacaagcaggtgacgtggaggagaatcccgggcctactagtatggactggatttggcgcatccttttccttgtcggcgctgctaccggcgcgcattccttcgaagaagtgcagctggttgaatcaggtggcggcctggttcaacctggcggatctctgagactgagctgtgccgcctctggcttcagcctgacaaattacggcgtgcactgggtccgacaggcccctggaaaaggactggaatgggtgtccgtgatttggagcggcggcagcaccgattacaacgccgccttcatcagccggttcaccatcagcgccgacaccagcaagaataccgcctacctccagatgaactccctgagagccgaggacaccgccgtgtactattgcgccagagaactgatccacgctatggacaactggggccagggaaccctggtcacagtctcttctacgcgtatccagaaccctgatcctgccgtgtaccagctgcgggatagcaagagcagcgacaagagcgtgtgtctgttcaccgacttcgacagccagaccaacgtgtcccagagcaaggactccgacgtgtacatcaccgataagtgcgtgctggacatgcggagcatggacttcaagagcaactccgccgtggcctggtccaacaagtccgatttcgcctgcgccaacgccttcaacaacagcattatccccgaggacacattcttcccaagccccgagagcagctgcggctttaccagcgagagctaccagcagggcgtgctgagcgccaccatcctgtacgagatcctgctgggcaaggccaccctgtacgccgtgctggtgtctgccctggtgctgatggctatggtcaagcggaaggacagccgggga

SEQ ID NO: 4086 - DNA, 1875 bp, synthetic construct
  source 1..1875: mol_type = other DNA
atggccttaccagtgaccgccttgctcctgccgctggccttgctgctccacgccgccaggccggacttcgtgatgacacagagccctctgagcctgcctgtgacacctggcgaacctgccagcatcagctgtagaagcagccagagcatcgtgcacagcaacggcaacacctacctggaatggtatctccagaagcctggacagagcccacagctgctgatctacaaggtgtccaacagattcagcggcgtgcccgacagattttctggcagcggctctggcaccgacttcaccctgaagattagcagagtggaagccgaggacgtgggcgtgtactactgcttccaaggctctcacgtgcccctgacctttggacagggcaccaagctggaaatcaagagactcgaggacctgaagaacgtgttcccacctgaggtggccgtgttcgagcctagcgaggccgagatcagccacacccagaaagccaccctcgtgtgcctggctaccggcttctaccccgaccatgtggaactgtcttggtgggtcaacggcaaagaggtgcacagcggcgtgtgtaccgacccccagccactgaaagaacagcccgccctgaacgacagccggtactgcctgagcagcagactgagagtgtccgccaccttctggcagaacccccggaaccacttcagatgccaggtgcagttctacggcctgagcgagaacgacgagtggacccaggacagagccaagcccgtgacccagatcgtgtctgccgaagcctggggcagagccgattgcgacgtgaagctggtggaaaagagcttcgagacagacaccaacctgaacttccagaacctgagcgtgatcggcttcagaatcctgctgctgaaagtggccggctttaacctgctgatgaccctgcggctgtggtccagcagggccaagcgatctggatctggagcaacaaacttctcactactcaaacaagcaggtgacgtggaggagaatcccgggcctactagtatggactggatttggcgcatccttttccttgtcggcgctgctaccggcgcgcattccttcgaagaagtgcagctggttgaaagcggagccgaagtgaagaaacctggggcctctgtgaaggtgtcctgcaaggccagcggctacacctttaccagctactggattcactgggtccgacaggcccctggacaaggacttgagtggatgggcgagaacgacccctccaacggcaggaccaactacaacgagaagttcaagaaccgcgtgaccctgaccgtggacaccagcatctctaccgcctacatggaactgagccggctgagatccgatgacaccgccgtgtactattgcgccagaggacccaactacttttacagcatggactactggggccagggcacaatggtcaccgttagctctacgcgtatccagaaccctgatcctgccgtgtaccagctgcgggatagcaagagcagcgacaagagcgtgtgtctgttcaccgacttcgacagccagaccaacgtgtcccagagcaaggactccgacgtgtacatcaccgataagtgcgtgctggacatgcggagcatggacttcaagagcaactccgccgtggcctggtccaacaagtccgatttcgcctgcgccaacgccttcaacaacagcattatccccgaggacacattcttcccaagccccgagagcagctgcggctttaccagcgagagctaccagcagggcgtgctgagcgccaccatcctgtacgagatcctgctgggcaaggccaccctgtacgccgtgctggtgtctgccctggtgctgatggctatggtcaagcggaaggacagccgggga

SEQ ID NO: 4087 - DNA, 1854 bp, synthetic construct
  source 1..1854: mol_type = other DNA
atggccttaccagtgaccgccttgctcctgccgctggccttgctgctccacgccgccaggccggacatccagctgactcagagccctagctttctgagcgccagcgtgggcgacagagtgaccatcacatgtagcgccagatccagcatcagcttcatgtactggtatcagcagaagcccggcaaggcccctaagctgctgatctacgacaccagcaatctggcctctggcgtgcccagcagattttctggaagcggcagcggcaccgagttcaccctgacaatctctagcctggaagccgaggatgccgccacctactattgccagcagtggtccagctatcccctgacatttggacagggcaccaagctggaaatcaaactcgaggacctgaagaacgtgttcccacctgaggtggccgtgttcgagcctagcgaggccgagatcagccacacccagaaagccaccctcgtgtgcctggctaccggcttctaccccgaccatgtggaactgtcttggtgggtcaacggcaaagaggtgcacagcggcgtgtgtaccgacccccagccactgaaagaacagcccgccctgaacgacagccggtactgcctgagcagcagactgagagtgtccgccaccttctggcagaacccccggaaccacttcagatgccaggtgcagttctacggcctgagcgagaacgacgagtggacccaggacagagccaagcccgtgacccagatcgtgtctgccgaagcctggggcagagccgattgcgacgtgaagctggtggaaaagagcttcgagacagacaccaacctgaacttccagaacctgagcgtgatcggcttcagaatcctgctgctgaaagtggccggctttaacctgctgatgaccctgcggctgtggtccagcagggccaagcgatctggatctggagcaacaaacttctcactactcaaacaagcaggtgacgtggaggagaatcccgggcctactagtatggactggatttggcgcatccttttccttgtcggcgctgctaccggcgcgcattccttcgaacaggttcagctggttcagtctggggccgaagtgaagaaacctggggcctctgtgaaggtgtcctgcaaggcttccggctacacctttaccggctcttggatgaactgggtccgacaggctcctggacagggactcgaatggatcggcagaatctatcctggcgacggcgagacaaactacaacggcaagttcaaggaccgcgtgacaatcaccgccgacaagagcacaagcaccgcctacatggaactgagcagcctgcggagcgaagataccgccgtgtactactgcgcccggatctacggcaacaacgtgtacttcgatgtgtggggccagggcacaaccgtgacagtctcttctacgcgtatccagaaccctgatcctgccgtgtaccagctgcgggatagcaagagcagcgacaagagcgtgtgtctgttcaccgacttcgacagccagaccaacgtgtcccagagcaaggactccgacgtgtacatcaccgataagtgcgtgctggacatgcggagcatggacttcaagagcaactccgccgtggcctggtccaacaagtccgatttcgcctgcgccaacgccttcaacaacagcattatccccgaggacacattcttcccaagccccgagagcagctgcggctttaccagcgagagctaccagcagggcgtgctgagcgccaccatcctgtacgagatcctgctgggcaaggccaccctgtacgccgtgctggtgtctgccctggtgctgatggctatggtcaagcggaaggacagccgggga

SEQ ID NO: 4088 - DNA, 1878 bp, synthetic construct
  source 1..1878: mol_type = other DNA
atggccttaccagtgaccgccttgctcctgccgctggccttgctgctccacgccgccaggccgcagctggtgctgacacagtctccaagcgcctctgccagcctgggatctagcgtgaagctgacctgtacactgagcagcggccacaagaccgacaccatcgactggtatcagcagcagcctggcaaggcccctagatacctgatgaagctggaaggcagcggcagctacaacaaaggctctggcgtgcccgatagattcagcggcagttcttctggcgctgattggtatctgaccatcagcagcctccagagcgaggacgaggccgattactactgcggcacagactaccccggcaactacctgtttggcggcggaacacagctgacagtgcttggcctcgaggacctgaagaacgtgttcccacctgaggtggccgtgttcgagcctagcgaggccgagatcagccacacccagaaagccaccctcgtgtgcctggctaccggcttctaccccgaccatgtggaactgtcttggtgggtcaacggcaaagaggtgcacagcggcgtgtgtaccgacccccagccactgaaagaacagcccgccctgaacgacagccggtactgcctgagcagcagactgagagtgtccgccaccttctggcagaacccccggaaccacttcagatgccaggtgcagttctacggcctgagcgagaacgacgagtggacccaggacagagccaagcccgtgacccagatcgtgtctgccgaagcctggggcagagccgattgcgacgtgaagctggtggaaaagagcttcgagacagacaccaacctgaacttccagaacctgagcgtgatcggcttcagaatcctgctgctgaaagtggccggctttaacctgctgatgaccctgcggctgtggtccagcagggccaagcgatctggatctggagcaacaaacttctcactactcaaacaagcaggtgacgtggaggagaatcccgggcctactagtatggactggatttggcgcatccttttccttgtcggcgctgctaccggcgcgcattccttcgaacaagaacagctggttgaaagcggcggaggactggttcaacctggcggttctctgagactgagctgtgccgccagcggcttcaccttcagcgactactacatgagctggatcagacaggccccaggcaaaggactggaatgggtcgccacaatctaccccagcagcggcaagacctactacgccgattctgccaagggcagactgaccatctccagcgacaacgccaaggacagcctgtacctccagatgaacagcctgagagccgaggacaccgccgtgtactactgcaccagagatagctacgccgacgacgccgctctgtttgacatttggggccagggcaccaccgtgaccgtttcttctacgcgtatccagaaccctgatcctgccgtgtaccagctgcgggatagcaagagcagcgacaagagcgtgtgtctgttcaccgacttcgacagccagaccaacgtgtcccagagcaaggactccgacgtgtacatcaccgataagtgcgtgctggacatgcggagcatggacttcaagagcaactccgccgtggcctggtccaacaagtccgatttcgcctgcgccaacgccttcaacaacagcattatccccgaggacacattcttcccaagccccgagagcagctgcggctttaccagcgagagctaccagcagggcgtgctgagcgccaccatcctgtacgagatcctgctgggcaaggccaccctgtacgccgtgctggtgtctgccctggtgctgatggctatggtcaagcggaaggacagccgggga

SEQ ID NO: 4089 - DNA, 1854 bp, synthetic construct; identical to SEQ ID NO: 4085
  source 1..1854: mol_type = other DNA

SEQ ID NO: 4090 - DNA, 1875 bp, synthetic construct; identical to SEQ ID NO: 4086
  source 1..1875: mol_type = other DNA

SEQ ID NO: 4091 - DNA, 1854 bp, synthetic construct; identical to SEQ ID NO: 4087
  source 1..1854: mol_type = other DNA

SEQ ID NO: 4092 - DNA, 1878 bp, synthetic construct; identical to SEQ ID NO: 4088
  source 1..1878: mol_type = other DNA

SEQ ID NO: 4093 - DNA, 1875 bp, synthetic construct
  source 1..1875: mol_type = other DNA
atggccttaccagtgaccgccttgctcctgccgctggccttgctgctccacgccgccaggccggatatccagctcactcaaagcccctctagtctctctgcctcagtgggggatcgggtcagttttacttgtcaagcttcacaggatatcaacaacttccttaattggtatcagcagaagccaggaaaagcacccaagctgctcatctatgatgcctcaaatttggagacgggtgttcccagtcgattctctgggtcagggtccgggaccgactttacgtttacgatctcctctctgcagcccgaagacatcgccacatactattgtcaacagtacggcaacttgcctttcacatttgggggcgggactaaggttgaaatcaagaggctcgaggacctgaagaacgtgttcccacctgaggtggccgtgttcgagcctagcgaggccgagatcagccacacccagaaagccaccctcgtgtgcctggctaccggcttctaccccgaccatgtggaactgtcttggtgggtcaacggcaaagaggtgcacagcggcgtgtgtaccgacccccagccactgaaagaacagcccgccctgaacgacagccggtactgcctgagcagcagactgagagtgtccgccaccttctggcagaacccccggaaccacttcagatgccaggtgcagttctacggcctgagcgagaacgacgagtggacccaggacagagccaagcccgtgacccagatcgtgtctgccgaagcctggggcagagccgattgcgacgtgaagctggtggaaaagagcttcgagacagacaccaacctgaacttccagaacctgagcgtgatcggcttcagaatcctgctgctgaaagtggccggctttaacctgctgatgaccctgcggctgtggtccagcagggccaagcgatctggatctggagcaacaaacttctcactactcaaacaagcaggtgacgtggaggagaatcccgggcctactagtatggactggatttggcgcatccttttccttgtcggcgctgctaccggcgcgcattccttcgaacaggtacagctgcaggaatctgggcccggacttgtcaagccaagtcagacactttctcttacatgtaccgtgagcggcggaagtataagcagtggaggcttttactggtcttggatacggcagcacccaggcaaaggcttggagtggattggatacattcatcattcaggatctacacactataatccatcccttaagtcccgggtcaccattagcattgatacgtctaagaatctgttcagtctcaggctgtcctccgtcactgctgccgacacagccgtgtactactgcgcctccttggtttactgcggaggcgactgttatagcggctttgattattgggggcaggggaccctcgtaaccgtgagctctacgcgtatccagaaccctgatcctgccgtgtaccagctgcgggatagcaagagcagcgacaagagcgtgtgtctgttcaccgacttcgacagccagaccaacgtgtcccagagcaaggactccgacgtgtacatcaccgataagtgcgtgctggacatgcggagcatggacttcaagagcaactccgccgtggcctggtccaacaagtccgatttcgcctgcgccaacgccttcaacaacagcattatccccgaggacacattcttcccaagccccgagagcagctgcggctttaccagcgagagctaccagcagggcgtgctgagcgccaccatcctgtacgagatcctgctgggcaaggccaccctgtacgccgtgctggtgtctgccctggtgctgatggctatggtcaagcggaaggacagccgggga

SEQ ID NO: 4094 - DNA, 1863 bp, synthetic construct
  source 1..1863: mol_type = other DNA
atggccttaccagtgaccgccttgctcctgccgctggccttgctgctccacgccgccaggccggacattcagatgacacagagccctagcagcctgagcgcctctgtgggagacagagtgaccatcacatgcaagagcagccagagcgtgctgtactccagcaatcagaagaactacctggcctggttccagcagaagcctggcaaggctcctaagctgctgatctactgggccagcaccagagaaagcggcgtgccaagcagattttctggcagcggctctggcaccgacttcaccctgacaatatccagcctccagcctgaggacttcgccacctacttttgccaccagtacctgagcagctacacattcggacagggcaccaaggtggaaatcaagcggctcgaggacctgaagaacgtgttcccacctgaggtggccgtgttcgagcctagcgaggccgagatcagccacacccagaaagccaccctcgtgtgcctggctaccggcttctaccccgaccatgtggaactgtcttggtgggtcaacggcaaagaggtgcacagcggcgtgtgtaccgacccccagccactgaaagaacagcccgccctgaacgacagccggtactgcctgagcagcagactgagagtgtccgccaccttctggcagaacccccggaaccacttcagatgccaggtgcagttctacggcctgagcgagaacgacgagtggacccaggacagagccaagcccgtgacccagatcgtgtctgccgaagcctggggcagagccgattgcgacgtgaagctggtggaaaagagcttcgagacagacaccaacctgaacttccagaacctgagcgtgatcggcttcagaatcctgctgctgaaagtggccggctttaacctgctgatgaccctgcggctgtggtccagcagggccaagcgatctggatctggagcaacaaacttctcactactcaaacaagcaggtgacgtggaggagaatcccgggcctactagtatggactggatttggcgcatccttttccttgtcggcgctgctaccggcgcgcattccttcgaagaggtgcagctggttgaatctggcggaggactggttcagcctggcggatctctgagactgtcttgtgccgccagcggctacaccttcaccacctattggatgcactgggtccgacaggcccctggcaaaggacttgagtgggtcggatatatcaggcccagcaccggctacacagagtacaaccagaagttcaaggaccgcttcaccatcagcgccgacaccagcaagaataccgcctacctccagatgaacagcctgagagccgaggacaccgccgtgtactactgtgccagatccagatggctgctggactattggggccagggcacactggttacagtttctacgcgtatccagaaccctgatcctgccgtgtaccagctgcgggatagcaagagcagcgacaagagcgtgtgtctgttcaccgacttcgacagccagaccaacgtgtcccagagcaaggactccgacgtgtacatcaccgataagtgcgtgctggacatgcggagcatggacttcaagagcaactccgccgtggcctggtccaacaagtccgatttcgcctgcgccaacgccttcaacaacagcattatccccgaggacacattcttcccaagccccgagagcagctgcggctttaccagcgagagctaccagcagggcgtgctgagcgccaccatcctgtacgagatcctgctgggcaaggccaccctgtacgccgtgctggtgtctgccctggtgctgatggctatggtcaagcggaaggacagccgggga

SEQ ID NO: 4095 - DNA, 1854 bp, synthetic construct
  source 1..1854: mol_type = other DNA
atggccttaccagtgaccgccttgctcctgccgctggccttgctgctccacgccgccaggccggacatccagatgacacagagccctagcagcctgtctgccagcgtgggagacagagtgaccatcacctgtagagccagccaggacatcagcaactacctgaactggtatcagcagaagcccggcaaggcccctaagctgctgatctactacaccagcagactgcacagcggcgtgcccagcagattttctggctctggcagcggcaccgacttcaccctgacaatatctagcctccagcctgaggacttcgccacctactattgccagcagggcaacaccctgccttacacatttggacagggcaccaaggtggaaatcaagagactcgaggacctgaagaacgtgttcccacctgaggtggccgtgttcgagcctagcgaggccgagatcagccacacccagaaagccaccctcgtgtgcctggctaccggcttctaccccgaccatgtggaactgtcttggtgggtcaacggcaaagaggtgcacagcggcgtgtgtaccgacccccagccactgaaagaacagcccgccctgaacgacagccggtactgcctgagcagcagactgagagtgtccgccaccttctggcagaacccccggaaccacttcagatgccaggtgcagttctacggcctgagcgagaacgacgagtggacccaggacagagccaagcccgtgacccagatcgtgtctgccgaagcctggggcagagccgattgcgacgtgaagctggtggaaaagagcttcgagacagacaccaacctgaacttccagaacctgagcgtgatcggcttcagaatcctgctgctgaaagtggccggctttaacctgctgatgaccctgcggctgtggtccagcagggccaagcgatctggatctggagcaacaaacttctcactactcaaacaagcaggtgacgtggaggagaatcccgggcctactagtatggactggatttggcgcatccttttccttgtcggcgctgctaccggcgcgcattccttcgaagaagtgcagctggttgaatcaggtggcggcctggttcaacctggcggatctctgagactgagctgtgccgccagcggcttcaccttcagcgactactttatgagctgggtccgacaggcccctggcaaaggacttgaatgggtcgccaccatcagcaatggcggcacctacacttactaccccgacagcgtgaagggcagattcaccatctccagagacaacagcaagaacaccctgtacctccagatgaactccctgagagccgaggacaccgccgtgtactactgcgccagattcgacggctacatcttcgactattggggccagggcaccctggtcacagtctcttctacgcgtatccagaaccctgatcctgccgtgtaccagctgcgggatagcaagagcagcgacaagagcgtgtgtctgttcaccgacttcgacagccagaccaacgtgtcccagagcaaggactccgacgtgtacatcaccgataagtgcgtgctggacatgcggagcatggacttcaagagcaactccgccgtggcctggtccaacaagtccgatttcgcctgcgccaacgccttcaacaacagcattatccccgaggacacattcttcccaagccccgagagcagctgcggctttaccagcgagagctaccagcagggcgtgctgagcgccaccatcctgtacgagatcctgctgggcaaggccaccctgtacgccgtgctggtgtctgccctggtgctgatggctatggtcaagcggaaggacagccgggga

SEQ ID NO: 4096 - DNA, 1869 bp, synthetic construct
  source 1..1869: mol_type = other DNA
atggccttaccagtgaccgccttgctcctgccgctggccttgctgctccacgccgccaggccggacatccagatgacacagactacatcctccctgtctgcctctctgggagacagagtcaccatcagttgcagggcaagtcaggacattagtaagtacctgaactggtatcagcagaaaccagatggaactgttaaactcctgatctaccatacatcaagattacactcaggagtcccatcaaggttcagtggcagtgggtctggaacagattattctctcaccattagcaacctggagcaagaagatattgccacttacttttgccaacagggtaatacgcttccgtacacgttcggaggggggaccaagctggagatcacactcgagatccagaaccctgatcctgccgtgtaccagctgcgggatagcaagagcagcgacaagagcgtgtgtctgttcaccgacttcgacagccagaccaacgtgtcccagagcaaggactccgacgtgtacatcaccgataagtgcgtgctggacatgcggagcatggacttcaagagcaactccgccgtggcctggtccaacaagtccgatttcgcctgcgccaacgccttcaacaacagcattatccccgaggacacattcttcccaagccccgagagcagctgcggctttaccagcgagagctaccagcagggcgtgctgagcgccaccatcctgtacgagatcctgctgggcaaggccaccctgtacgccgtgctggtgtctgccctggtgctgatggctatggtcaagcggaaggacagccggggacgcgccaagagaagcggatctggcgtgaagcagaccctgaatttcgacctgctgaagctggctggcgacgtggaatccaacccaggccctactagtatggactggatttggcgcatccttttccttgtcggcgctgctaccggcgcgcattccttcgaagtgaaactgcaggagtcaggacctggcctggtggcgccctcacagagcctgtccgtcacatgcactgtctcaggggtctcattacccgactatggtgtaagctggattcgccagcctccacgaaagggtctggagtggctgggagtaatatggggtagtgaaaccacatactataattcagctctcaaatccagactgaccatcatcaaggacaactccaagagccaagttttcttaaaaatgaacagtctgcaaactgatgacacagccatttactactgtgccaaacattattactacggtggtagctatgctatggactactggggccaaggaacctcagtcaccgtctcctcaacgcgtgaggacctgaagaacgtgttcccacctgaggtggccgtgttcgagcctagcgaggccgagatcagccacacccagaaagccaccctcgtgtgcctggctaccggcttctaccccgaccatgtggaactgtcttggtgggtcaacggcaaagaggtgcacagcggcgtgtgtaccgacccccagccactgaaagaacagcccgccctgaacgacagccggtactgcctgagcagcagactgagagtgtccgccaccttctggcagaacccccggaaccacttcagatgccaggtgcagttctacggcctgagcgagaacgacgagtggacccaggacagagccaagcccgtgacccagatcgtgtctgccgaagcctggggcagagccgattgcgacgtgaagctggtggaaaagagcttcgagacagacaccaacctgaacttccagaacctgagcgtgatcggcttcagaatcctgctgctgaaagtggccggctttaacctgctgatgaccctgcggctgtggtccagc

SEQ ID NO: 4097 - DNA, 1872 bp, synthetic construct
  source 1..1872: mol_type = other DNA
atggccttaccagtgaccgccttgctcctgccgctggccttgctgctccacgccgccaggccggagatcgtgatgacccagagccctgccaccctgtctctgagccctggcgaaagagccaccctgagctgtagagccagccaggacatcagcaagtacctgaactggtatcagcagaagcccggccaggcccccagactgctgatctaccacaccagcagactgcacagcggcatccccgccagattttctggctctggcagcggcaccgactacaccctgacaatcagcagcctccagcccgaggacttcgccgtgtacttctgtcagcaaggcaacaccctgccctacaccttcggccagggcaccaagctggaaatcaagctcgagatccagaaccctgatcctgccgtgtaccagctgcgggatagcaagagcagcgacaagagcgtgtgtctgttcaccgacttcgacagccagaccaacgtgtcccagagcaaggactccgacgtgtacatcaccgataagtgcgtgctggacatgcggagcatggacttcaagagcaactccgccgtggcctggtccaacaagtccgatttcgcctgcgccaacgccttcaacaacagcattatccccgaggacacattcttcccaagccccgagagcagctgcggctttaccagcgagagctaccagcagggcgtgctgagcgccaccatcctgtacgagatcctgctgggcaaggccaccctgtacgccgtgctggtgtctgccctggtgctgatggctatggtcaagcggaaggacagccggggacgcgccaagagaagcggatctggcgtgaagcagaccctgaatttcgacctgctgaagctggctggcgacgtggaatccaacccaggccctactagtatggactggatttggcgcatccttttccttgtcggcgctgctaccggcgcgcattccttcgaacaggtgcaactccaggaatctggccctggcctcgtgaagcccagcgagacactgagcctgacctgtaccgtgtccggcgtgtccctgcctgactatggcgtgtcctggatcagacagccccctggcaagggcctggaatggatcggagtgatttggggcagcgaaaccacctactacaacagctccctgaagtccagagtgaccatctccaaggacaactccaagaaccaggtgtccctgaagctgagcagcgtgacagccgccgacaccgccgtgtattactgcgccaagcactactactacggcggcagctacgctatggactactggggccagggaaccctcgtgaccgtgtctagtacgcgtgaggacctgaagaacgtgttcccacctgaggtggccgtgttcgagcctagcgaggccgagatcagccacacccagaaagccaccctcgtgtgcctggctaccggcttctaccccgaccatgtggaactgtcttggtgggtcaacggcaaagaggtgcacagcggcgtgtgtaccgacccccagccactgaaagaacagcccgccctgaacgacagccggtactgcctgagcagcagactgagagtgtccgccaccttctggcagaacccccggaaccacttcagatgccaggtgcagttctacggcctgagcgagaacgacgagtggacccaggacagagccaagcccgtgacccagatcgtgtctgccgaagcctggggcagagccgattgcgacgtgaagctggtggaaaagagcttcgagacagacaccaacctgaacttccagaacctgagcgtgatcggcttcagaatcctgctgctgaaagtggccggctttaacctgctgatgaccctgcggctgtggtccagc

SEQ ID NO: 4098 - DNA, 1875 bp, synthetic construct
  source 1..1875: mol_type = other DNA
atggccttaccagtgaccgccttgctcctgccgctggccttgctgctccacgccgccaggccggacgagatcgtgctgacacagagccccgccaccctgtcactgtctccaggcgaaagagccaccctgagctgtagcgccagcagcagcgtgtcctacatgcactggtatcagcagaagcccggccaggcccccagactgctgatctacgataccagcaagctggcctccggcatccccgccagattttctggcagcggctccggcaccgacttcaccctgacaatcagcagcctggaacccgaggacgtggccgtgtactactgttttcaaggcagcgtgtaccccttcaccttcggccagggcaccaagctggaaatcaagagactcgagatccagaaccctgatcctgccgtgtaccagctgcgggatagcaagagcagcgacaagagcgtgtgtctgttcaccgacttcgacagccagaccaacgtgtcccagagcaaggactccgacgtgtacatcaccgataagtgcgtgctggacatgcggagcatggacttcaagagcaactccgccgtggcctggtccaacaagtccgatttcgcctgcgccaacgccttcaacaacagcattatccccgaggacacattcttcccaagccccgagagcagctgcggctttaccagcgagagctaccagcagggcgtgctgagcgccaccatcctgtacgagatcctgctgggcaaggccaccctgtacgccgtgctggtgtctgccctggtgctgatggctatggtcaagcggaaggacagccggggacgcgccaagagaagcggatctggcgtgaagcagaccctgaatttcgacctgctgaagctggctggcgacgtggaatccaacccaggccctactagtatggactggatttggcgcatccttttccttgtcggcgctgctaccggcgcgcattccttcgaacaggtgcagctccaggaatctggccctggcctcgtgaagcctagccagaccctgagcctgacctgtaccgtgtctggcggcagcatcagcacaagcggcatgggcgtgggctggatcagacagcaccctggcaagggcctggaatggatcggccacatttggtgggacgacgacaagcggtacaaccccgccctgaagtccagagtgaccatcagcgtggacaccagcaagaaccagttcagcctgaagctgagcagcgtgacagccgccgataccgccgtgtattattgcgcccggatggaactgtggtcctactacttcgactactggggccagggaaccctcgtgaccgtgtctagtacgcgtgaggacctgaagaacgtgttcccacctgaggtggccgtgttcgagcctagcgaggccgagatcagccacacccagaaagccaccctcgtgtgcctggctaccggcttctaccccgaccatgtggaactgtcttggtgggtcaacggcaaagaggtgcacagcggcgtgtgtaccgacccccagccactgaaagaacagcccgccctgaacgacagccggtactgcctgagcagcagactgagagtgtccgccaccttctggcagaacccccggaaccacttcagatgccaggtgcagttctacggcctgagcgagaacgacgagtggacccaggacagagccaagcccgtgacccagatcgtgtctgccgaagcctggggcagagccgattgcgacgtgaagctggtggaaaagagcttcgagacagacaccaacctgaacttccagaacctgagcgtgatcggcttcagaatcctgctgctgaaagtggccggctttaacctgctgatgaccctgcggctgtggtccagc

SEQ ID NO: 4099 - DNA, 1869 bp, synthetic construct
  source 1..1869: mol_type = other DNA
atggccttaccagtgaccgccttgctcctgccgctggccttgctgctccacgccgccaggccggactacatccacgtgacacagagccctagcagcctgtccgtgtccatcggcgatagagtgaccatcaactgccagacctctcaaggcgtgggcagcgacctgcactggtatcagcacaaacctggcagagcccctaagctgctgatccaccatgccagctctgtggaagatggcgtgcccagcagattttccggcaccggatttcacaccagcttcaacctgacaatcaacgacctccaggccgacgacatcggcacctactactgtcaagtgctccagagcttcggcagaggcagcagactggatacaaaactcgagatccagaaccctgatcctgccgtgtaccagctgcgggatagcaagagcagcgacaagagcgtgtgtctgttcaccgacttcgacagccagaccaacgtgtcccagagcaaggactccgacgtgtacatcaccgataagtgcgtgctggacatgcggagcatggacttcaagagcaactccgccgtggcctggtccaacaagtccgatttcgcctgcgccaacgccttcaacaacagcattatccccgaggacacattcttcccaagccccgagagcagctgcggctttaccagcgagagctaccagcagggcgtgctgagcgccaccatcctgtacgagatcctgctgggcaaggccaccctgtacgccgtgctggtgtctgccctggtgctgatggctatggtcaagcggaaggacagccggggacgcgccaagagaagcggatctggcgtgaagcagaccctgaatttcgacctgctgaagctggctggcgacgtggaatccaacccaggccctactagtatggactggatttggcgcatccttttccttgtcggcgctgctaccggcgcgcattccttcgaaagggcacacctggtgcagtctggcaccgccatgaagaaacctggcgcttccgtcagagtgtcctgtcagacaagcggctacaccttcacagcccacatcctgttctggttcagacaggccccaggcagaggactggaatgggtcggatggatcaagccccagtacggggccgtgaatttcggcggaggcttcagagacagagtgaccctgaccagggacgtgtaccgggaaatcgcctacatggacatccggggcctgaagcctgatgacaccgccgtgtactactgcgccagggatagaagctacggcgacagctcttgggctctcgatgcttggggacagggcacaacagtggtggtgtctgctacgcgtgaggacctgaagaacgtgttcccacctgaggtggccgtgttcgagcctagcgaggccgagatcagccacacccagaaagccaccctcgtgtgcctggctaccggcttctaccccgaccatgtggaactgtcttggtgggtcaacggcaaagaggtgcacagcggcgtgtgtaccgacccccagccactgaaagaacagcccgccctgaacgacagccggtactgcctgagcagcagactgagagtgtccgccaccttctggcagaacccccggaaccacttcagatgccaggtgcagttctacggcctgagcgagaacgacgagtggacccaggacagagccaagcccgtgacccagatcgtgtctgccgaagcctggggcagagccgattgcgacgtgaagctggtggaaaagagcttcgagacagacaccaacctgaacttccagaacctgagcgtgatcggcttcagaatcctgctgctgaaagtggccggctttaacctgctgatgaccctgcggctgtggtccagc

SEQ ID NO: 4100 - DNA, 1899 bp, synthetic construct
  source 1..1899: mol_type = other DNA
atggccttaccagtgaccgccttgctcctgccgctggccttgctgctccacgccgccaggccggacgtgcagatgatccagacccccgatagcctggccgtgtccctgggacagagagccaccatctcttgcagagccagcgagagcgtggacaactacggcatcagcttcatgcactggtatcagcagaagcccggccagagccccaagctgctgatctacagagcctccaacctggaaagcggcatccccgccagattttccggcagcggcagcagaaccgacttcaccctgaccatcaaccccgtggaaaccgacgacgtggcaacctactactgccagcagaacaacaaggacccccccacctttggcggaggcaccaagctggaaatcaagctcgagatccagaaccctgatcctgccgtgtaccagctgcgggatagcaagagcagcgacaagagcgtgtgtctgttcaccgacttcgacagccagaccaacgtgtcccagagcaaggactccgacgtgtacatcaccgataagtgcgtgctggacatgcggagcatggacttcaagagcaactccgccgtggcctggtccaacaagtccgatttcgcctgcgccaacgccttcaacaacagcattatccccgaggacacattcttcccaagccccgagagcagctgcggctttaccagcgagagctaccagcagggcgtgctgagcgccaccatcctgtacgagatcctgctgggcaaggccaccctgtacgccgtgctggtgtctgccctggtgctgatggctatggtcaagcggaaggacagccggggacgcgccaagagaagcggatctggcgtgaagcagaccctgaatttcgacctgctgaagctggctggcgacgtggaatccaacccaggccctactagtatggactggatttggcgcatccttttccttgtcggcgctgctaccggcgcgcattccttcgaagggggaggcggctctcaggtgcaactccagcagtctggcgctgagcttgtgaagcctggggccagcgtgaagattagctgcaaggccagcggctacgccttcagcagctactggatgaactgggtcaagcagcggcctggcaagggcctggaatggatcggccaaatctaccccggcgacggcgacaccacctacaacggcaagttcaagggcaaggccaccctgacagccgacaagagcagcagcaccgtgtacatgcaactgaacagcctgaccagcgaggacagcgccgtgtacttctgcgtgcggtactactacggcagctccggctacttcgactattggggccagggcaccacactgaccgtgtcctctacgcgtgaggacctgaagaacgtgttcccacctgaggtggccgtgttcgagcctagcgaggccgagatcagccacacccagaaagccaccctcgtgtgcctggctaccggcttctaccccgaccatgtggaactgtcttggtgggtcaacggcaaagaggtgcacagcggcgtgtgtaccgacccccagccactgaaagaacagcccgccctgaacgacagccggtactgcctgagcagcagactgagagtgtccgccaccttctggcagaacccccggaaccacttcagatgccaggtgcagttctacggcctgagcgagaacgacgagtggacccaggacagagccaagcccgtgacccagatcgtgtctgccgaagcctggggcagagccgattgcgacgtgaagctggtggaaaagagcttcgagacagacaccaacctgaacttccagaacctgagcgtgatcggcttcagaatcctgctgctgaaagtggccggctttaacctgctgatgaccctgcggctgtggtccagc

SEQ ID NO: 4101 - DNA, 1872 bp, synthetic construct
  source 1..1872: mol_type = other DNA
atggccttaccagtgaccgccttgctcctgccgctggccttgctgctccacgccgccaggccggacgtgcagatgatccagacccccagcagcctgtctgccagcctgggcgatagagtgaccatcagctgtcgggccagccaggacatcggcaactacctgaactggtatcagcagaaacccgacggcaccgtgaagctgctgatctactacaccagcagactgcacagcggcgtgcccagcagattttctggcagcggctctggcaccgagtacagcctgaccatctccaacctggaacaggaagatattgctacctacttctgtcagcaaggcagcgccctgccccctacatttggcggcggaacaaagctggaaatcaacctcgagatccagaaccctgatcctgccgtgtaccagctgcgggatagcaagagcagcgacaagagcgtgtgtctgttcaccgacttcgacagccagaccaacgtgtcccagagcaaggactccgacgtgtacatcaccgataagtgcgtgctggacatgcggagcatggacttcaagagcaactccgccgtggcctggtccaacaagtccgatttcgcctgcgccaacgccttcaacaacagcattatccccgaggacacattcttcccaagccccgagagcagctgcggctttaccagcgagagctaccagcagggcgtgctgagcgccaccatcctgtacgagatcctgctgggcaaggccaccctgtacgccgtgctggtgtctgccctggtgctgatggctatggtcaagcggaaggacagccggggacgcgccaagagaagcggatctggcgtgaagcagaccctgaatttcgacctgctgaagctggctggcgacgtggaatccaacccaggccctactagtatggactggatttggcgcatccttttccttgtcggcgctgctaccggcgcgcattccttcgaagctctccagctccagcagtctggcgcagaactcgtgcggcctggcgcttctgtgaccctgagctgtaaagccagcggctacaccttcaccgactacgagatgcactgggtcaagcagacccctgtgcacggcctggaatggatcggagccatcgaccctgagacaggcggcaccgcctacaaccagaagttcgagggcaaggccatcctgaccgccgacaagagcagcagcacagcctacatggaactgcggagcctgacctccgaggacagccccgtgtactactgtgccagacggcggtactacggcagcagctccttcgactattggggccagggcaccaccctgaccgtgtctagtacgcgtgaggacctgaagaacgtgttcccacctgaggtggccgtgttcgagcctagcgaggccgagatcagccacacccagaaagccaccctcgtgtgcctggctaccggcttctaccccgaccatgtggaactgtcttggtgggtcaacggcaaagaggtgcacagcggcgtgtgtaccgacccccagccactgaaagaacagcccgccctgaacgacagccggtactgcctgagcagcagactgagagtgtccgccaccttctggcagaacccccggaaccacttcagatgccaggtgcagttctacggcctgagcgagaacgacgagtggacccaggacagagccaagcccgtgacccagatcgtgtctgccgaagcctggggcagagccgattgcgacgtgaagctggtggaaaagagcttcgagacagacaccaacctgaacttccagaacctgagcgtgatcggcttcagaatcctgctgctgaaagtggccggctttaacctgctgatgaccctgcggctgtggtccagc

SEQ ID NO: 4102 - DNA, 1884 bp, synthetic construct
  source 1..1884: mol_type = other DNA
atggccttaccagtgaccgccttgctcctgccgctggccttgctgctccacgccgccaggccggacatcgtcctgacccagtccccagccagcctggcggtgtccctgggtcaacgagctaccatttcctgcagagcctctaagtccgtatccacttccggctatagttacctgcattggtaccaacagaaaccagggcagccacccaagctgctcatctatctggcctcaaacctggagtccggcgtgcccgccagattctccggaagtgggagcggcaccgactttacattgaacatccacccagtcgaagaggaagatgctgccacttattactgtcagcactccagggagctgccatttacatttggctctggcacaaaactggagatcaaactcgagatccagaaccctgatcctgccgtgtaccagctgcgggatagcaagagcagcgacaagagcgtgtgtctgttcaccgacttcgacagccagaccaacgtgtcccagagcaaggactccgacgtgtacatcaccgataagtgcgtgctggacatgcggagcatggacttcaagagcaactccgccgtggcctggtccaacaagtccgatttcgcctgcgccaacgccttcaacaacagcattatccccgaggacacattcttcccaagccccgagagcagctgcggctttaccagcgagagctaccagcagggcgtgctgagcgccaccatcctgtacgagatcctgctgggcaaggccaccctgtacgccgtgctggtgtctgccctggtgctgatggctatggtcaagcggaaggacagccggggacgcgccaagagaagcggatctggcgtgaagcagaccctgaatttcgacctgctgaagctggctggcgacgtggaatccaacccaggccctactagtatggactggatttggcgcatccttttccttgtcggcgctgctaccggcgcgcattccttcgaacaggttcagctggtcgagtccgggggaggtctggtacagccgggtggcagcctcaagctgtcatgtgccgcatctggttttgactttagcaggtattggatgagctgggtccgccaggccccgggcaagggacttgagtggattggagaaataaaccctacttccagcacaatcaacttcacaccttctttgaaagataaggtttttatctctcgggataacgctaaaaacacactgtacttgcagatgtctaaggtgcgaagcgaagacaccgccctctattattgcgcccggggtaattactaccgctatggggatgcgatggactattgggggcaaggtacctccgtcacggtctcaacgcgtgaggacctgaagaacgtgttcccacctgaggtggccgtgttcgagcctagcgaggccgagatcagccacacccagaaagccaccctcgtgtgcctggctaccggcttctaccccgaccatgtggaactgtcttggtgggtcaacggcaaagaggtgcacagcggcgtgtgtaccgacccccagccactgaaagaacagcccgccctgaacgacagccggtactgcctgagcagcagactgagagtgtccgccaccttctggcagaacccccggaaccacttcagatgccaggtgcagttctacggcctgagcgagaacgacgagtggacccaggacagagccaagcccgtgacccagatcgtgtctgccgaagcctggggcagagccgattgcgacgtgaagctggtggaaaagagcttcgagacagacaccaacctgaacttccagaacctgagcgtgatcggcttcagaatcctgctgctgaaagtggccggctttaacctgctgatgaccctgcggctgtggtccagc

SEQ ID NO: 4103 - DNA, 1878 bp, synthetic construct
  source 1..1878: mol_type = other DNA
atggccttaccagtgaccgccttgctcctgccgctggccttgctgctccacgccgccaggccggacatccagatgacccagagccctagctcactgagcgccagcgtgggcgacagggtgaccattacctgctccgccagccaggacatcagcaactacctgaactggtaccagcagaagcccggcaaggcccccaagctgctgatctactacacctccaacctgcactccggcgtgcccagcaggttcagcggaagcggcagcggcaccgatttcaccctgaccatctccagcctgcagcccgaggacttcgccacctactactgccagcagtacaggaagctcccctggactttcggccagggcaccaaactggagatcaagcgtctcgagatccagaaccctgatcctgccgtgtaccagctgcgggatagcaagagcagcgacaagagcgtgtgtctgttcaccgacttcgacagccagaccaacgtgtcccagagcaaggactccgacgtgtacatcaccgataagtgcgtgctggacatgcggagcatggacttcaagagcaactccgccgtggcctggtccaacaagtccgatttcgcctgcgccaacgccttcaacaacagcattatccccgaggacacattcttcccaagccccgagagcagctgcggctttaccagcgagagctaccagcagggcgtgctgagcgccaccatcctgtacgagatcctgctgggcaaggccaccctgtacgccgtgctggtgtctgccctggtgctgatggctatggtcaagcggaaggacagccggggacgcgccaagagaagcggatctggcgtgaagcagaccctgaatttcgacctgctgaagctggctggcgacgtggaatccaacccaggccctactagtatggactggatttggcgcatccttttccttgtcggcgctgctaccggcgcgcattccttcgaacaggtgcagctggtccagagcggcgccgaagtgaagaagcccggcagctccgtgaaagtgagctgcaaggccagcggcggcaccttcagcaactactggatgcactgggtgaggcaggcccccggacagggcctggagtggatgggcgccacctacaggggccacagcgacacctactacaaccagaagttcaagggccgggtgaccatcaccgccgacaagagcaccagcaccgcctacatggaactgagcagcctcaggagcgaggacaccgctgtgtattactgcgccaggggcgccatctacgacggctacgacgtgctggacaactggggccagggcacactggtgaccgtgtccagcacgcgtgaggacctgaagaacgtgttcccacctgaggtggccgtgttcgagcctagcgaggccgagatcagccacacccagaaagccaccctcgtgtgcctggctaccggcttctaccccgaccatgtggaactgtcttggtgggtcaacggcaaagaggtgcacagcggcgtgtgtaccgacccccagccactgaaagaacagcccgccctgaacgacagccggtactgcctgagcagcagactgagagtgtccgccaccttctggcagaacccccggaaccacttcagatgccaggtgcagttctacggcctgagcgagaacgacgagtggacccaggacagagccaagcccgtgacccagatcgtgtctgccgaagcctggggcagagccgattgcgacgtgaagctggtggaaaagagcttcgagacagacaccaacctgaacttccagaacctgagcgtgatcggcttcagaatcctgctgctgaaagtggccggctttaacctgctgatgaccctgcggctgtggtccagc

SEQ ID NO: 4104 - DNA, 1878 bp, synthetic construct
  source 1..1878: mol_type = other DNA
atggccttaccagtgaccgccttgctcctgccgctggccttgctgctccacgccgccaggccggacatcgtgctgacacagagccctgccaccctgtctctgagccctggcgatagagccaccatcagctgtagagccagcgagagcgtgaccatcctgggcagccacctgatctactggtatcagcagaagcccggccagccccccagactgctgattcagctggcctccaatgtgcagaccggcgtgccagccagattttccggcagcggcagcagaaccgacttcaccctgaccatcagcagcgtggaacccgaggacttcgccgtgtactactgcctccagagccggaccatccccagaacattcggccagggcaccaagctggaaatcaagagactcgagatccagaaccctgatcctgccgtgtaccagctgcgggatagcaagagcagcgacaagagcgtgtgtctgttcaccgacttcgacagccagaccaacgtgtcccagagcaaggactccgacgtgtacatcaccgataagtgcgtgctggacatgcggagcatggacttcaagagcaactccgccgtggcctggtccaacaagtccgatttcgcctgcgccaacgccttcaacaacagcattatccccgaggacacattcttcccaagccccgagagcagctgcggctttaccagcgagagctaccagcagggcgtgctgagcgccaccatcctgtacgagatcctgctgggcaaggccaccctgtacgccgtgctggtgtctgccctggtgctgatggctatggtcaagcggaaggacagccggggacgcgccaagagaagcggatctggcgtgaagcagaccctgaatttcgacctgctgaagctggctggcgacgtggaatccaacccaggccctactagtatggactggatttggcgcatccttttccttgtcggcgctgctaccggcgcgcattccttcgaacaggtgcagctggtgcagtctggccccgaagtgaagaaacccggcgagtccgtgaagatcagctgcaaggccagcggctacaccttccggcactacagcatgaactgggtcaagcaggccccaggccagggcctgaagtggatgggcagaatcaacaccgagagcggcgtgcccatctacgccgacgacttcaagggccggttcagcttcaccgtggacaccagcgccagcaccgcctacctggaaatctccagcctgaccagcgaggataccgccgtgtatttctgctccaacgactacctgtacagcctggatttctggggccagggaaccaccctgacagtgtcctctacgcgtgaggacctgaagaacgtgttcccacctgaggtggccgtgttcgagcctagcgaggccgagatcagccacacccagaaagccaccctcgtgtgcctggctaccggcttctaccccgaccatgtggaactgtcttggtgggtcaacggcaaagaggtgcacagcggcgtgtgtaccgacccccagccactgaaagaacagcccgccctgaacgacagccggtactgcctgagcagcagactgagagtgtccgccaccttctggcagaacccccggaaccacttcagatgccaggtgcagttctacggcctgagcgagaacgacgagtggacccaggacagagccaagcccgtgacccagatcgtgtctgccgaagcctggggcagagccgattgcgacgtgaagctggtggaaaagagcttcgagacagacaccaacctgaacttccagaacctgagcgtgatcggcttcagaatcctgctgctgaaagtggccggctttaacctgctgatgaccctgcggctgtggtccagc

SEQ ID NO: 4105 - DNA, 1881 bp, synthetic construct
  source 1..1881: mol_type = other DNA
atggccttaccagtgaccgccttgctcctgccgctggccttgctgctccacgccgccaggccgcagtctgtgctgacacagcctcctagtgtgtctggcgctcctggacagagagtgaccatcagctgtacaggcagcagcagcaatatcggagccggctttgacgtgcactggtatcagcagctgcctggcacagcccctaaactgctgatctacggcaacagcaacagacccagcggcgtgcccgatagattttccggctctaagagcggcacaagcgccagcctggctattactggactccaggccgaggacgaggccgactactactgtcagagctacgacagcagcctgagcggctacgttttcggcaccggcaccaaagtgacagtgcttggtctcgagatccagaaccctgatcctgccgtgtaccagctgcgggatagcaagagcagcgacaagagcgtgtgtctgttcaccgacttcgacagccagaccaacgtgtcccagagcaaggactccgacgtgtacatcaccgataagtgcgtgctggacatgcggagcatggacttcaagagcaactccgccgtggcctggtccaacaagtccgatttcgcctgcgccaacgccttcaacaacagcattatccccgaggacacattcttcccaagccccgagagcagctgcggctttaccagcgagagctaccagcagggcgtgctgagcgccaccatcctgtacgagatcctgctgggcaaggccaccctgtacgccgtgctggtgtctgccctggtgctgatggctatggtcaagcggaaggacagccggggacgcgccaagagaagcggatctggcgtgaagcagaccctgaatttcgacctgctgaagctggctggcgacgtggaatccaacccaggccctactagtatggactggatttggcgcatccttttccttgtcggcgctgctaccggcgcgcattccttcgaacaagttcagctggttcagagcggagccgaagtgaagaaacctggggcctctgtgaaggtgtcctgcaaggcttccggctacacctttaccgattactacatgcactgggtccgacaggctcccggccaaagacttgaatggatgggctggatcaaccccaacagcggcggcacaaattacgcccagaagttccaggaccggatcaccgtgaccagagacaccagctccaacaccggctacatggaactgacccggctgagatccgatgacaccgccgtgtactactgcgctagaagcccttactccggcgtgctggataagtggggacagggcacactggtcaccgtgtcatctacgcgtgaggacctgaagaacgtgttcccacctgaggtggccgtgttcgagcctagcgaggccgagatcagccacacccagaaagccaccctcgtgtgcctggctaccggcttctaccccgaccatgtggaactgtcttggtgggtcaacggcaaagaggtgcacagcggcgtgtgtaccgacccccagccactgaaagaacagcccgccctgaacgacagccggtactgcctgagcagcagactgagagtgtccgccaccttctggcagaacccccggaaccacttcagatgccaggtgcagttctacggcctgagcgagaacgacgagtggacccaggacagagccaagcccgtgacccagatcgtgtctgccgaagcctggggcagagccgattgcgacgtgaagctggtggaaaagagcttcgagacagacaccaacctgaacttccagaacctgagcgtgatcggcttcagaatcctgctgctgaaagtggccggctttaacctgctgatgaccctgcggctgtggtccagc

SEQ ID NO: 4106 - DNA, 1872 bp, synthetic construct
  source 1..1872: mol_type = other DNA
atggccttaccagtgaccgccttgctcctgccgctggccttgctgctccacgccgccaggccgcaggctgttctgacacagcctccatctgcctctggcacacctggacagagagtgaccatctcctgtagcggcagcagcagcaacatcggcagctacaccgtgtcctggtatcagcagctccctggaacagcccctaagttcctgatctacagcaacaaccagcggcctagcggcgtgcccgatagattttctggcagcaagagcggcacaagcgccagcctggctatttctggactccagtctgaggacgaggccgactactattgtgccgcctgggacgatagcctgaacggctatgtgtttggcaccggcaccaaagtgacagtgcttggtctcgagatccagaaccctgatcctgccgtgtaccagctgcgggatagcaagagcagcgacaagagcgtgtgtctgttcaccgacttcgacagccagaccaacgtgtcccagagcaaggactccgacgtgtacatcaccgataagtgcgtgctggacatgcggagcatggacttcaagagcaactccgccgtggcctggtccaacaagtccgatttcgcctgcgccaacgccttcaacaacagcattatccccgaggacacattcttcccaagccccgagagcagctgcggctttaccagcgagagctaccagcagggcgtgctgagcgccaccatcctgtacgagatcctgctgggcaaggccaccctgtacgccgtgctggtgtctgccctggtgctgatggctatggtcaagcggaaggacagccggggacgcgccaagagaagcggatctggcgtgaagcagaccctgaatttcgacctgctgaagctggctggcgacgtggaatccaacccaggccctactagtatggactggatttggcgcatccttttccttgtcggcgctgctaccggcgcgcattccttcgaagttcaactggttcagagcggagccgaagtgaagaagcctggcgagagcctgaagattagctgcaaaggcagcggctacgacttcaccacctactggatcggctgggtccgacagatgcctggcaaaggactggaatggatgggcatcatctaccccggcgacagcgacaccagatacagccctagcgttagaggccgcgtgaccatcagcgccgacaagtctatcaacaccgcctacctccagtggtccagcctggaagcctctgacaccgccatgtactactgcgccagaatgtggaccttcagccaggatggatggggccagggaacactggtcacagtgtcatctacgcgtgaggacctgaagaacgtgttcccacctgaggtggccgtgttcgagcctagcgaggccgagatcagccacacccagaaagccaccctcgtgtgcctggctaccggcttctaccccgaccatgtggaactgtcttggtgggtcaacggcaaagaggtgcacagcggcgtgtgtaccgacccccagccactgaaagaacagcccgccctgaacgacagccggtactgcctgagcagcagactgagagtgtccgccaccttctggcagaacccccggaaccacttcagatgccaggtgcagttctacggcctgagcgagaacgacgagtggacccaggacagagccaagcccgtgacccagatcgtgtctgccgaagcctggggcagagccgattgcgacgtgaagctggtggaaaagagcttcgagacagacaccaacctgaacttccagaacctgagcgtgatcggcttcagaatcctgctgctgaaagtggccggctttaacctgctgatgaccctgcggctgtggtccagc

SEQ ID NO: 4107 - DNA, 1881 bp, synthetic construct
  source 1..1881: mol_type = other DNA
atggccttaccagtgaccgccttgctcctgccgctggccttgctgctccacgccgccaggccggacatcgtgatgacccagagccccgatagcctggccgtgtctctgggagagagagccaccatcaactgcaagagcagccagagcatcctgtacagcagcaaccagaagaactacctggcctggtatcagcagaagcccggccagagccctaagctgctgatctactgggccagcaccagagaaagcggcgtgcccgatagattcagcggcagcggctctggcaccgacttcaccctgaccatcagttctcttcaggccgaggacgtggccgtgtactactgccaccagtacatcagctcctacaccttcggccagggcaccaagctggaaatcaagctcgagatccagaaccctgatcctgccgtgtaccagctgcgggatagcaagagcagcgacaagagcgtgtgtctgttcaccgacttcgacagccagaccaacgtgtcccagagcaaggactccgacgtgtacatcaccgataagtgcgtgctggacatgcggagcatggacttcaagagcaactccgccgtggcctggtccaacaagtccgatttcgcctgcgccaacgccttcaacaacagcattatccccgaggacacattcttcccaagccccgagagcagctgcggctttaccagcgagagctaccagcagggcgtgctgagcgccaccatcctgtacgagatcctgctgggcaaggccaccctgtacgccgtgctggtgtctgccctggtgctgatggctatggtcaagcggaaggacagccggggacgcgccaagagaagcggatctggcgtgaagcagaccctgaatttcgacctgctgaagctggctggcgacgtggaatccaacccaggccctactagtatggactggatttggcgcatccttttccttgtcggcgctgctaccggcgcgcattccttcgaacaggtgcagctggtgcagtctggcgctgaagtgaagaaacctggggccagcgtgaaggtgtcctgcaaggccagcggctacacctttgccagccagtggatgcactggatgagacaggcccctggacagggcctggaatggatcggctggatcaaccccggcaacgtgaacaccaagtacaacgagaagttcaagggcagagccaccctgacagtggacaccagcaccaacaccgcctacatggaactgagcagcctgcggagcgaggacaccgccgtgtattattgcgccagaagcacctggtacagacccctggattattggggccagggaacccttgtgaccgtgtcctctacgcgtgaggacctgaagaacgtgttcccacctgaggtggccgtgttcgagcctagcgaggccgagatcagccacacccagaaagccaccctcgtgtgcctggctaccggcttctaccccgaccatgtggaactgtcttggtgggtcaacggcaaagaggtgcacagcggcgtgtgtaccgacccccagccactgaaagaacagcccgccctgaacgacagccggtactgcctgagcagcagactgagagtgtccgccaccttctggcagaacccccggaaccacttcagatgccaggtgcagttctacggcctgagcgagaacgacgagtggacccaggacagagccaagcccgtgacccagatcgtgtctgccgaagcctggggcagagccgattgcgacgtgaagctggtggaaaagagcttcgagacagacaccaacctgaacttccagaacctgagcgtgatcggcttcagaatcctgctgctgaaagtggccggctttaacctgctgatgaccctgcggctgtggtccagc

SEQ ID NO: 4108 - DNA, 1881 bp, synthetic construct
  source 1..1881: mol_type = other DNA
atggccttaccagtgaccgccttgctcctgccgctggccttgctgctccacgccgccaggccggaccacatcgtgctgacccagagccctagcagcctgtctgccagcctgggcgacagagtgaccatcagctgtagagccagccaggacatcagcacctacctgaactggtatcagcagaaacccgacggcaccgtgaagctgctgatcttctacaccagcagactgcacgccggggtgcccagcagattttctggcagcggctctggcacccaccacagcctgaccatctccaacctggaacaggaagatattgctacctacttctgtcagcaaggcaacagcctgcccttcaccttcggcagcggcaccaagctggaaatcaagagactcgagatccagaaccctgatcctgccgtgtaccagctgcgggatagcaagagcagcgacaagagcgtgtgtctgttcaccgacttcgacagccagaccaacgtgtcccagagcaaggactccgacgtgtacatcaccgataagtgcgtgctggacatgcggagcatggacttcaagagcaactccgccgtggcctggtccaacaagtccgatttcgcctgcgccaacgccttcaacaacagcattatccccgaggacacattcttcccaagccccgagagcagctgcggctttaccagcgagagctaccagcagggcgtgctgagcgccaccatcctgtacgagatcctgctgggcaaggccaccctgtacgccgtgctggtgtctgccctggtgctgatggctatggtcaagcggaaggacagccggggacgcgccaagagaagcggatctggcgtgaagcagaccctgaatttcgacctgctgaagctggctggcgacgtggaatccaacccaggccctactagtatggactggatttggcgcatccttttccttgtcggcgctgctaccggcgcgcattccttcgaacaggtgcagctgaaagagagcggccctgagctggaaaagcctggggccagcgtgaagattagctgcaaggccagcggctacagcttcaccgcctacagcatgaactgggtcaagcagaacaacggcatgagcctggaatggatcggcagcatcgacccctactacggcgacaccaaatacgcccagaagttcaagggcaaggccaccctgaccgtggataaggccagcagcaccgcctacctccagctgaagtctctgaccagcgaggacagcgccgtgtactactgcgccagacggatgattaccaccggcgactggtacttcgacgtgtggggagccggaaccaccgtgacagtgtctagcacgcgtgaggacctgaagaacgtgttcccacctgaggtggccgtgttcgagcctagcgaggccgagatcagccacacccagaaagccaccctcgtgtgcctggctaccggcttctaccccgaccatgtggaactgtcttggtgggtcaacggcaaagaggtgcacagcggcgtgtgtaccgacccccagccactgaaagaacagcccgccctgaacgacagccggtactgcctgagcagcagactgagagtgtccgccaccttctggcagaacccccggaaccacttcagatgccaggtgcagttctacggcctgagcgagaacgacgagtggacccaggacagagccaagcccgtgacccagatcgtgtctgccgaagcctggggcagagccgattgcgacgtgaagctggtggaaaagagcttcgagacagacaccaacctgaacttccagaacctgagcgtgatcggcttcagaatcctgctgctgaaagtggccggctttaacctgctgatgaccctgcggctgtggtccagc

SEQ ID NO: 4109 - DNA, 1881 bp, synthetic construct; identical to SEQ ID NO: 4108
  source 1..1881: mol_type = other DNA

SEQ ID NO: 4110 - DNA, 1881 bp, synthetic construct
  source 1..1881: mol_type = other DNA
atggccttaccagtgaccgccttgctcctgccgctggccttgctgctccacgccgccaggccggacgagatcgtgctgacacagagccctgccaccctgtctctgagccctggcgaaagagccaccctgagctgtagagccagccagagcgtgtccagctacctggcctggtatcagcagaagcccggccaggctccccggctgctgatctacgatgccagcaatagagccaccggcatccccgccagattttccggctctggcagcggcaccgacttcaccctgaccatcagctccctggaacccgaggacttcgccgtgtactactgccagcagcggagcaactggcccatcacattcggccagggcacccggctggaaatcaaactcgagatccagaaccctgatcctgccgtgtaccagctgcgggatagcaagagcagcgacaagagcgtgtgtctgttcaccgacttcgacagccagaccaacgtgtcccagagcaaggactccgacgtgtacatcaccgataagtgcgtgctggacatgcggagcatggacttcaagagcaactccgccgtggcctggtccaacaagtccgatttcgcctgcgccaacgccttcaacaacagcattatccccgaggacacattcttcccaagccccgagagcagctgcggctttaccagcgagagctaccagcagggcgtgctgagcgccaccatcctgtacgagatcctgctgggcaaggccaccctgtacgccgtgctggtgtctgccctggtgctgatggctatggtcaagcggaaggacagccggggacgcgccaagagaagcggatctggcgtgaagcagaccctgaatttcgacctgctgaagctggctggcgacgtggaatccaacccaggccctactagtatggactggatttggcgcatccttttccttgtcggcgctgctaccggcgcgcattccttcgaagaagtgcagctggtggaatcaggcggcggactggtgcagcctggcagaagcctgagactgagctgtgccgccagcggcttcaccttcaacgactacgccatgcactgggtgcgccaggcccctggaaaaggactggaatgggtgtccacaatcagctggaacagcggcagcatcggctacgccgatagcgtgaagggccggttcaccatcagccgggacaacgccaagaagtccctgtacctccagatgaacagcctgcgggccgaggacacagccctgtactattgcgccaaggacatccagtacggcaactactactacggcatggacgtgtggggccagggaaccaccgtgaccgtgtcatctacgcgtgaggacctgaagaacgtgttcccacctgaggtggccgtgttcgagcctagcgaggccgagatcagccacacccagaaagccaccctcgtgtgcctggctaccggcttctaccccgaccatgtggaactgtcttggtgggtcaacggcaaagaggtgcacagcggcgtgtgtaccgacccccagccactgaaagaacagcccgccctgaacgacagccggtactgcctgagcagcagactgagagtgtccgccaccttctggcagaacccccggaaccacttcagatgccaggtgcagttctacggcctgagcgagaacgacgagtggacccaggacagagccaagcccgtgacccagatcgtgtctgccgaagcctggggcagagccgattgcgacgtgaagctggtggaaaagagcttcgagacagacaccaacctgaacttccagaacctgagcgtgatcggcttcagaatcctgctgctgaaagtggccggctttaacctgctgatgaccctgcggctgtggtccagc

SEQ ID NO: 4111 - DNA, 1887 bp, synthetic construct
  source 1..1887: mol_type = other DNA
atggccttaccagtgaccgccttgctcctgccgctggccttgctgctccacgccgccaggccggacatcgtgatgacccagacccccctgagcctgcctgtgacacctggcgagcctgccagcatctcctgcagaagcagcaagagcctgctgcacagcaacggcatcacctacctgtactggtatctgcagaaacccggccagagcccccaactgctgatctaccagatgagcaacctggtgtccggcgtgcccgacagattttctggcagcggctccggcaccgacttcaccctgaagatcagccgggtggaagccgaggacgtgggcgtgtactactgcgcccagaacctggaactgccctacacctttggcggcggaacaaaggtggaaatcaagcggctcgagatccagaaccctgatcctgccgtgtaccagctgcgggatagcaagagcagcgacaagagcgtgtgtctgttcaccgacttcgacagccagaccaacgtgtcccagagcaaggactccgacgtgtacatcaccgataagtgcgtgctggacatgcggagcatggacttcaagagcaactccgccgtggcctggtccaacaagtccgatttcgcctgcgccaacgccttcaacaacagcattatccccgaggacacattcttcccaagccccgagagcagctgcggctttaccagcgagagctaccagcagggcgtgctgagcgccaccatcctgtacgagatcctgctgggcaaggccaccctgtacgccgtgctggtgtctgccctggtgctgatggctatggtcaagcggaaggacagccggggacgcgccaagagaagcggatctggcgtgaagcagaccctgaatttcgacctgctgaagctggctggcgacgtggaatccaacccaggccctactagtatggactggatttggcgcatccttttccttgtcggcgctgctaccggcgcgcattccttcgaacaggtgcaactggtgcagagcggagccgaagtgaaaaagcccggcagcagcgtgaaggtgtcctgcaaggccagcggctacgccttcagctactcctggatcaactgggtgcgccaggcccctggacagggcctggaatggatgggcagaatcttccccggcgacggcgacaccgactacaacggcaagttcaagggcagagtgaccatcaccgccgacaagagcaccagcaccgcctacatggaactgagcagcctgcggagcgaggataccgccgtgtactattgtgccagaaacgtgttcgacggctactggctggtgtactggggccagggaacacttgtgaccgtgtccagcacgcgtgaggacctgaagaacgtgttcccacctgaggtggccgtgttcgagcctagcgaggccgagatcagccacacccagaaagccaccctcgtgtgcctggctaccggcttctaccccgaccatgtggaactgtcttggtgggtcaacggcaaagaggtgcacagcggcgtgtgtaccgacccccagccactgaaagaacagcccgccctgaacgacagccggtactgcctgagcagcagactgagagtgtccgccaccttctggcagaacccccggaaccacttcagatgccaggtgcagttctacggcctgagcgagaacgacgagtggacccaggacagagccaagcccgtgacccagatcgtgtctgccgaagcctggggcagagccgattgcgacgtgaagctggtggaaaagagcttcgagacagacaccaacctgaacttccagaacctgagcgtgatcggcttcagaatcctgctgctgaaagtggccggctttaacctgctgatgaccctgcggctgtggtccagc

SEQ ID NO: 4112 - DNA, 1890 bp, synthetic construct
  source 1..1890: mol_type = other DNA
atggccttaccagtgaccgccttgctcctgccgctggccttgctgctccacgccgccaggccggacatccagatgacccagagccccagcagcctgtctgccagcgtgggcgacagagtgaccatcacctgtcggagcagccagagcatcgtgcactccgtgggcaacaccttcctggaatggtatcagcagaagcccggcaaggcccccaagctgctgatctacaaggtgtccaacagattcagcggcgtgcccagcaggtttagcggctctggcagcggcaccgacttcaccctgaccatctctagcctccagcccgaggacttcgccacctactactgttttcaaggcagccagttcccctacaccttcggccagggaacaaaggtggaaatcaagcggctcgagatccagaaccctgatcctgccgtgtaccagctgcgggatagcaagagcagcgacaagagcgtgtgtctgttcaccgacttcgacagccagaccaacgtgtcccagagcaaggactccgacgtgtacatcaccgataagtgcgtgctggacatgcggagcatggacttcaagagcaactccgccgtggcctggtccaacaagtccgatttcgcctgcgccaacgccttcaacaacagcattatccccgaggacacattcttcccaagccccgagagcagctgcggctttaccagcgagagctaccagcagggcgtgctgagcgccaccatcctgtacgagatcctgctgggcaaggccaccctgtacgccgtgctggtgtctgccctggtgctgatggctatggtcaagcggaaggacagccggggacgcgccaagagaagcggatctggcgtgaagcagaccctgaatttcgacctgctgaagctggctggcgacgtggaatccaacccaggccctactagtatggactggatttggcgcatccttttccttgtcggcgctgctaccggcgcgcattccttcgaagaagtgcaactggtggaaagcggaggcggcctggtgcagcctggcggatctctgagactgagctgtgccgccagcggctacgagttcagccggtcctggatgaactgggtgcgccaggcccctggcaagggactggaatgggtgggaagaatctaccccggcgacggcgacaccaactacagcggcaagttcaagggccggttcaccatcagcgccgacaccagcaagaacaccgcctacctccagatgaacagcctgcgggccgaggataccgccgtgtactactgtgccagagatggcagctcctgggactggtacttcgacgtgtggggacagggaacccttgtgaccgtgtccagcacgcgtgaggacctgaagaacgtgttcccacctgaggtggccgtgttcgagcctagcgaggccgagatcagccacacccagaaagccaccctcgtgtgcctggctaccggcttctaccccgaccatgtggaactgtcttggtgggtcaacggcaaagaggtgcacagcggcgtgtgtaccgacccccagccactgaaagaacagcccgccctgaacgacagccggtactgcctgagcagcagactgagagtgtccgccaccttctggcagaacccccggaaccacttcagatgccaggtgcagttctacggcctgagcgagaacgacgagtggacccaggacagagccaagcccgtgacccagatcgtgtctgccgaagcctggggcagagccgattgcgacgtgaagctggtggaaaagagcttcgagacagacaccaacctgaacttccagaacctgagcgtgatcggcttcagaatcctgctgctgaaagtggccggctttaacctgctgatgaccctgcggctgtggtccagc

SEQ ID NO: 4113 - DNA, 1884 bp, synthetic construct
  source 1..1884: mol_type = other DNA
atggccttaccagtgaccgccttgctcctgccgctggccttgctgctccacgccgccaggccggacatccagatgacccagagccccagcagcctgtctgccagcgtgggcgacagagtgaccatcacctgtagagccagccagaccatctggtcctacctgaactggtatcagcagaggcccggcaaggcccccaacctgctgatctatgccgccagctctctccagagcggcgtgcccagcagattttccggcagaggcagcggcaccgacttcaccctgaccatcagttccttgcaggccgaggacttcgccacctactactgccagcagagctacagcatcccccagattttcggccagggcaccaagctggaaatcaagctcgagatccagaaccctgatcctgccgtgtaccagctgcgggatagcaagagcagcgacaagagcgtgtgtctgttcaccgacttcgacagccagaccaacgtgtcccagagcaaggactccgacgtgtacatcaccgataagtgcgtgctggacatgcggagcatggacttcaagagcaactccgccgtggcctggtccaacaagtccgatttcgcctgcgccaacgccttcaacaacagcattatccccgaggacacattcttcccaagccccgagagcagctgcggctttaccagcgagagctaccagcagggcgtgctgagcgccaccatcctgtacgagatcctgctgggcaaggccaccctgtacgccgtgctggtgtctgccctggtgctgatggctatggtcaagcggaaggacagccggggacgcgccaagagaagcggatctggcgtgaagcagaccctgaatttcgacctgctgaagctggctggcgacgtggaatccaacccaggccctactagtatggactggatttggcgcatccttttccttgtcggcgctgctaccggcgcgcattccttcgaacaggtgcagctccagcagtctggacccggcctcgtgaagcctagccagacactgagcctgacctgcgccatcagcggcgatagcgtgtccagcaatagcgccgcctggaactggatcagacagtccccctctcggggcctggaatggctgggccggacctactaccgcagcaagtggtacaacgactacgccgtgtccgtgaagtcccggatcaccatcaaccccgacaccagcaagaaccagttctccttgcaactgaacagcgtgacccccgaggacaccgccgtgtactactgcgccagagaagtgaccggcgacctggaagatgccttcgacatctggggccagggaacaatggtcacagtgtccagcacgcgtgaggacctgaagaacgtgttcccacctgaggtggccgtgttcgagcctagcgaggccgagatcagccacacccagaaagccaccctcgtgtgcctggctaccggcttctaccccgaccatgtggaactgtcttggtgggtcaacggcaaagaggtgcacagcggcgtgtgtaccgacccccagccactgaaagaacagcccgccctgaacgacagccggtactgcctgagcagcagactgagagtgtccgccaccttctggcagaacccccggaaccacttcagatgccaggtgcagttctacggcctgagcgagaacgacgagtggacccaggacagagccaagcccgtgacccagatcgtgtctgccgaagcctggggcagagccgattgcgacgtgaagctggtggaaaagagcttcgagacagacaccaacctgaacttccagaacctgagcgtgatcggcttcagaatcctgctgctgaaagtggccggctttaacctgctgatgaccctgcggctgtggtccagc

SEQ ID NO: 4114 - DNA, 1863 bp, synthetic construct
  source 1..1863: mol_type = other DNA
atggccttaccagtgaccgccttgctcctgccgctggccttgctgctccacgccgccaggccggacatccagatgacccagagccccgccaccatcgagaacacaagcctgtctgccagcgtgggcgacagagtgaccatcacctgtagagccagccagggcatcagctcttggctgacctggtatcagcagaagcccgagaaggcccccaagagcctgatctacgccgccagctctctgcagtctggcgtgcccagcagattttccggcagcggctctggcaccgacttcaccctgacaatcagcagcctgcagcccgaggacttcgccacctactactgccagcagtacgacagctaccccatcaccttcggccagggcacccggctggaaatcaagctcgagatccagaaccctgatcctgccgtgtaccagctgcgggatagcaagagcagcgacaagagcgtgtgtctgttcaccgacttcgacagccagaccaacgtgtcccagagcaaggactccgacgtgtacatcaccgataagtgcgtgctggacatgcggagcatggacttcaagagcaactccgccgtggcctggtccaacaagtccgatttcgcctgcgccaacgccttcaacaacagcattatccccgaggacacattcttcccaagccccgagagcagctgcggctttaccagcgagagctaccagcagggcgtgctgagcgccaccatcctgtacgagatcctgctgggcaaggccaccctgtacgccgtgctggtgtctgccctggtgctgatggctatggtcaagcggaaggacagccggggacgcgccaagagaagcggatctggcgtgaagcagaccctgaatttcgacctgctgaagctggctggcgacgtggaatccaacccaggccctactagtatggactggatttggcgcatccttttccttgtcggcgctgctaccggcgcgcattccttcgaacaggtgcaactgcagcagtggggagccggactgctgaagcctagcgagacactgagcctgacctgcgccgtgtacggcggcagcttcagcgcctactattggagctggatcagacagccccctggcaagggcctggaatggatcggcgacatcaatcacggcggaggcaccaactacaaccccagcctgaagtcccgcgtgaccatctccgtggacaccagcaagaaccagttctccctgaagctgaacagcgtgacagccgccgacacagccgtgtactactgtgccagcctgaccgcctattggggccagggatctcttgtgaccgtgtccagcacgcgtgaggacctgaagaacgtgttcccacctgaggtggccgtgttcgagcctagcgaggccgagatcagccacacccagaaagccaccctcgtgtgcctggctaccggcttctaccccgaccatgtggaactgtcttggtgggtcaacggcaaagaggtgcacagcggcgtgtgtaccgacccccagccactgaaagaacagcccgccctgaacgacagccggtactgcctgagcagcagactgagagtgtccgccaccttctggcagaacccccggaaccacttcagatgccaggtgcagttctacggcctgagcgagaacgacgagtggacccaggacagagccaagcccgtgacccagatcgtgtctgccgaagcctggggcagagccgattgcgacgtgaagctggtggaaaagagcttcgagacagacaccaacctgaacttccagaacctgagcgtgatcggcttcagaatcctgctgctgaaagtggccggctttaacctgctgatgaccctgcggctgtggtccagc

SEQ ID NO: 4115 - DNA, 1878 bp, synthetic construct
  source 1..1878: mol_type = other DNA
atggccttaccagtgaccgccttgctcctgccgctggccttgctgctccacgccgccaggccggacgagatcgtgctgacccagagccctgatagcctggccgtgtctctgggcgagagagccaccatcaactgcaaggccagccagagcgtggacttcgacggcgacagctacctgaactggtatcagcagaagcccggccagccccccaaggtgctgatctatgccgccagcacactgcagagcggcgtgcccagcagattttctggcagcggctccggcaccgacttcaccctgaccatcaacagcctggaagccgaggacgccgccacctactactgccagcagagcaacgaggacccctggacctttggcggcggaacaaaggtggaaatcaagctcgagatccagaaccctgatcctgccgtgtaccagctgcgggatagcaagagcagcgacaagagcgtgtgtctgttcaccgacttcgacagccagaccaacgtgtcccagagcaaggactccgacgtgtacatcaccgataagtgcgtgctggacatgcggagcatggacttcaagagcaactccgccgtggcctggtccaacaagtccgatttcgcctgcgccaacgccttcaacaacagcattatccccgaggacacattcttcccaagccccgagagcagctgcggctttaccagcgagagctaccagcagggcgtgctgagcgccaccatcctgtacgagatcctgctgggcaaggccaccctgtacgccgtgctggtgtctgccctggtgctgatggctatggtcaagcggaaggacagccggggacgcgccaagagaagcggatctggcgtgaagcagaccctgaatttcgacctgctgaagctggctggcgacgtggaatccaacccaggccctactagtatggactggatttggcgcatccttttccttgtcggcgctgctaccggcgcgcattccttcgaacaggtgcaactggtgcagtccggcgctgaagtgaagaaacctggggccagcgtgaaggtgtcctgcaaggtgtccggctacacctttaccgactactacattacctgggtgcgccaggcccctggacaggccctggaatggatgggctggatctaccccggcagcggcaacaccaagtacagccagaagttccagggcagattcgtgttcagcgtggacaccagcgccagcaccgcctacctgcaactgtctagcctgaaggccgaagataccgccgtgtactactgcgccaactacggcaactattggttcgcctattggggccagggaacccttgtgaccgtgtcctctacgcgtgaggacctgaagaacgtgttcccacctgaggtggccgtgttcgagcctagcgaggccgagatcagccacacccagaaagccaccctcgtgtgcctggctaccggcttctaccccgaccatgtggaactgtcttggtgggtcaacggcaaagaggtgcacagcggcgtgtgtaccgacccccagccactgaaagaacagcccgccctgaacgacagccggtactgcctgagcagcagactgagagtgtccgccaccttctggcagaacccccggaaccacttcagatgccaggtgcagttctacggcctgagcgagaacgacgagtggacccaggacagagccaagcccgtgacccagatcgtgtctgccgaagcctggggcagagccgattgcgacgtgaagctggtggaaaagagcttcgagacagacaccaacctgaacttccagaacctgagcgtgatcggcttcagaatcctgctgctgaaagtggccggctttaacctgctgatgaccctgcggctgtggtccagc

SEQ ID NO: 4116 - DNA, 1869 bp, synthetic construct
  source 1..1869: mol_type = other DNA
atggccttaccagtgaccgccttgctcctgccgctggccttgctgctccacgccgccaggccggacatccagatgacccagagccccagcagcctgtctgccagcgtgggcgacagagtgaccatcacctgtagagccagccagggcatcagctcttggctggcctggtatcagcagaagcccgagaaggcccccaagagcctgatctacgccgcctctagtctccagagcggcgtgcccagcagattttctggcagcggctccggcaccgacttcaccctgacaatcagctccctccagcccgaggacttcgccacctactactgccagcagtacaacagctaccctcccacctttggcggaggcaccaaggtggaaatcaagctcgagatccagaaccctgatcctgccgtgtaccagctgcgggatagcaagagcagcgacaagagcgtgtgtctgttcaccgacttcgacagccagaccaacgtgtcccagagcaaggactccgacgtgtacatcaccgataagtgcgtgctggacatgcggagcatggacttcaagagcaactccgccgtggcctggtccaacaagtccgatttcgcctgcgccaacgccttcaacaacagcattatccccgaggacacattcttcccaagccccgagagcagctgcggctttaccagcgagagctaccagcagggcgtgctgagcgccaccatcctgtacgagatcctgctgggcaaggccaccctgtacgccgtgctggtgtctgccctggtgctgatggctatggtcaagcggaaggacagccggggacgcgccaagagaagcggatctggcgtgaagcagaccctgaatttcgacctgctgaagctggctggcgacgtggaatccaacccaggccctactagtatggactggatttggcgcatccttttccttgtcggcgctgctaccggcgcgcattccttcgaagaagtgcaactggtgcagtctggcggagggctggtgcatcctgggggaagcctgagactgagctgtgccggctctggcttcgccttcagcagcagcaccatgcactggatcagacaggcccctggcaagggcctggaatggatcagcctgatcggaagcggagggggcatctactacggcgacagcgtgaagggccggttcaccatcagccgggacaacgccaagaacagcctgtacctccagatgaactccctgcgggccgaggacatggccgtgtactattgtgtgcggggctacttcgactgggtggactacttcgattactggggccagggcaccctcgtgaccgtgtcatctacgcgtgaggacctgaagaacgtgttcccacctgaggtggccgtgttcgagcctagcgaggccgagatcagccacacccagaaagccaccctcgtgtgcctggctaccggcttctaccccgaccatgtggaactgtcttggtgggtcaacggcaaagaggtgcacagcggcgtgtgtaccgacccccagccactgaaagaacagcccgccctgaacgacagccggtactgcctgagcagcagactgagagtgtccgccaccttctggcagaacccccggaaccacttcagatgccaggtgcagttctacggcctgagcgagaacgacgagtggacccaggacagagccaagcccgtgacccagatcgtgtctgccgaagcctggggcagagccgattgcgacgtgaagctggtggaaaagagcttcgagacagacaccaacctgaacttccagaacctgagcgtgatcggcttcagaatcctgctgctgaaagtggccggctttaacctgctgatgaccctgcggctgtggtccagc

SEQ ID NO: 4117 - DNA, 1899 bp, synthetic construct
  source 1..1899: mol_type = other DNA
atggccttaccagtgaccgccttgctcctgccgctggccttgctgctccacgccgccaggccggacgacatcgtgatgacacagtcaccagatagcctcaccgtctccctgggggagcggaccaccattaattgtaaatccagccaaagcgtgctggactcaagcaagaacaagaatagcctcgcctggtatcagcagaagcccggtcagcctccaaagctgctgctttcttgggcctccaccagagagtccgggattcctgataggtttagtggttcaggctccggcacagattttactctgaccattgattctctccagccagaggattctgcaacttattactgccagcaaagcgcccactttcctataacttttggccagggaacccgacttgaaatcaagctcgagatccagaaccctgatcctgccgtgtaccagctgcgggatagcaagagcagcgacaagagcgtgtgtctgttcaccgacttcgacagccagaccaacgtgtcccagagcaaggactccgacgtgtacatcaccgataagtgcgtgctggacatgcggagcatggacttcaagagcaactccgccgtggcctggtccaacaagtccgatttcgcctgcgccaacgccttcaacaacagcattatccccgaggacacattcttcccaagccccgagagcagctgcggctttaccagcgagagctaccagcagggcgtgctgagcgccaccatcctgtacgagatcctgctgggcaaggccaccctgtacgccgtgctggtgtctgccctggtgctgatggctatggtcaagcggaaggacagccggggacgcgccaagagaagcggatctggcgtgaagcagaccctgaatttcgacctgctgaagctggctggcgacgtggaatccaacccaggccctactagtatggactggatttggcgcatccttttccttgtcggcgctgctaccggcgcgcattccttcgaacaggtgcagctggtgcagagcggtgccgaagtgaagaaaccaggtgcatccgttaaagtttcatgtaaggctagtggatataccttcaccaattacggaatgaactgggtgaaacaggcccctggccagggactgaagtggatggggtggattaacacctacaccggggagccgacttatgcagacgactttaaggggcgggtcacgatgacctccgacacctccaccagtaccgcctacctggagctgcacaaccttaggtcagacgataccgccgtgtattactgtgcccgatggtcttggtccgacggatactatgtctacttcgactattggggccaggggaccacagttaccgtgtcctctacgcgtgaggacctgaagaacgtgttcccacctgaggtggccgtgttcgagcctagcgaggccgagatcagccacacccagaaagccaccctcgtgtgcctggctaccggcttctaccccgaccatgtggaactgtcttggtgggtcaacggcaaagaggtgcacagcggcgtgtgtaccgacccccagccactgaaagaacagcccgccctgaacgacagccggtactgcctgagcagcagactgagagtgtccgccaccttctggcagaacccccggaaccacttcagatgccaggtgcagttctacggcctgagcgagaacgacgagtggacccaggacagagccaagcccgtgacccagatcgtgtctgccgaagcctggggcagagccgattgcgacgtgaagctggtggaaaagagcttcgagacagacaccaacctgaacttccagaacctgagcgtgatcggcttcagaatcctgctgctgaaagtggccggctttaacctgctgatgaccctgcggctgtggtccagc

SEQ ID NO: 4118 - DNA, 1887 bp, synthetic construct
  source 1..1887: mol_type = other DNA
atggccttaccagtgaccgccttgctcctgccgctggccttgctgctccacgccgccaggccggacgagatcgtgctgacacagagccctggaagcctggccgtgtctcctggcgagcgcgtgacaatgagctgcaagagcagccagagcgtgttcttcagcagctcccagaagaactacctggcctggtatcagcagatccccggccagagccccagactgctgatctactgggccagcaccagagaaagcggcgtgcccgatagattcaccggcagcggctctggcaccgacttcaccctgacaatcagcagcgtgcagcccgaggacctggctatctactactgccaccagtacctgagcagccggaccttcggccagggcaccaagctggaaatcaagagactcgagatccagaaccctgatcctgccgtgtaccagctgcgggatagcaagagcagcgacaagagcgtgtgtctgttcaccgacttcgacagccagaccaacgtgtcccagagcaaggactccgacgtgtacatcaccgataagtgcgtgctggacatgcggagcatggacttcaagagcaactccgccgtggcctggtccaacaagtccgatttcgcctgcgccaacgccttcaacaacagcattatccccgaggacacattcttcccaagccccgagagcagctgcggctttaccagcgagagctaccagcagggcgtgctgagcgccaccatcctgtacgagatcctgctgggcaaggccaccctgtacgccgtgctggtgtctgccctggtgctgatggctatggtcaagcggaaggacagccggggacgcgccaagagaagcggatctggcgtgaagcagaccctgaatttcgacctgctgaagctggctggcgacgtggaatccaacccaggccctactagtatggactggatttggcgcatccttttccttgtcggcgctgctaccggcgcgcattccttcgaacaggtgcaactgcagcagcctggcgctgaggtcgtgaagccaggcgcttccgtgaagatgtcctgcaaggccagcggctacaccttcaccagctactacatccactggatcaagcagacccctggacagggcctggaatgggtgggagtgatctaccccggcaacgacgacatcagctacaaccagaagttccagggcaaggccaccctgaccgccgacaagtctagcaccaccgcctacatgcaactgtccagcctgaccagcgaggacagcgccgtgtactactgcgccagagaagtgcggctgcggtacttcgatgtgtggggccagggaaccaccgtgaccgtgtcatctacgcgtgaggacctgaagaacgtgttcccacctgaggtggccgtgttcgagcctagcgaggccgagatcagccacacccagaaagccaccctcgtgtgcctggctaccggcttctaccccgaccatgtggaactgtcttggtgggtcaacggcaaagaggtgcacagcggcgtgtgtaccgacccccagccactgaaagaacagcccgccctgaacgacagccggtactgcctgagcagcagactgagagtgtccgccaccttctggcagaacccccggaaccacttcagatgccaggtgcagttctacggcctgagcgagaacgacgagtggacccaggacagagccaagcccgtgacccagatcgtgtctgccgaagcctggggcagagccgattgcgacgtgaagctggtggaaaagagcttcgagacagacaccaacctgaacttccagaacctgagcgtgatcggcttcagaatcctgctgctgaaagtggccggctttaacctgctgatgaccctgcggctgtggtccagc

SEQ ID NO: 4119 - DNA, 1899 bp, synthetic construct
  source 1..1899: mol_type = other DNA
atggccttaccagtgaccgccttgctcctgccgctggccttgctgctccacgccgccaggccggatgtgctgctgacccagagccctctgagcctgcctgtgacactgggacagcctgccagcatctcctgtcggagcagccagaccatcgtgcacagcaacggcaacacctacctggaatggttccagcagcggccaggccagagccccagactgctgatctaccaggtgtccaacagattcagcggcgtgcccgacagattctccggcagcggctctggcaccgacttcaccctgaagatcagccgggtggaagccgaggacgtgggcgtgtactactgttttcaaggcagccacgtgccccggacctttggcggaggaacaaaggtggaaatcaagagagccctcgagatccagaaccctgatcctgccgtgtaccagctgcgggatagcaagagcagcgacaagagcgtgtgtctgttcaccgacttcgacagccagaccaacgtgtcccagagcaaggactccgacgtgtacatcaccgataagtgcgtgctggacatgcggagcatggacttcaagagcaactccgccgtggcctggtccaacaagtccgatttcgcctgcgccaacgccttcaacaacagcattatccccgaggacacattcttcccaagccccgagagcagctgcggctttaccagcgagagctaccagcagggcgtgctgagcgccaccatcctgtacgagatcctgctgggcaaggccaccctgtacgccgtgctggtgtctgccctggtgctgatggctatggtcaagcggaaggacagccggggacgcgccaagagaagcggatctggcgtgaagcagaccctgaatttcgacctgctgaagctggctggcgacgtggaatccaacccaggccctactagtatggactggatttggcgcatccttttccttgtcggcgctgctaccggcgcgcattccttcgaacagatccaactggtgcagagcggcagcgagctgaagaaacctggggccagcgtgaaggtgtcctgcaaggccagcggctacacctttaccaactacggcatgaactgggtgcgccaggcccctggacagggcctgaaatggatgggctggatcaacaccaacaccggcgagcctaagtacgccgaagagttcaagggcagattcgccctgagcctggacaccagcgtgtccacagcctacctccagatcaacagcctgaaggccgaggataccgccgtgtacttctgcgccagaggctacggcaactacgccagaggggcttggctggcctattggggccagggaacactcgtgaccgtgtcctctacgcgtgaggacctgaagaacgtgttcccacctgaggtggccgtgttcgagcctagcgaggccgagatcagccacacccagaaagccaccctcgtgtgcctggctaccggcttctaccccgaccatgtggaactgtcttggtgggtcaacggcaaagaggtgcacagcggcgtgtgtaccgacccccagccactgaaagaacagcccgccctgaacgacagccggtactgcctgagcagcagactgagagtgtccgccaccttctggcagaacccccggaaccacttcagatgccaggtgcagttctacggcctgagcgagaacgacgagtggacccaggacagagccaagcccgtgacccagatcgtgtctgccgaagcctggggcagagccgattgcgacgtgaagctggtggaaaagagcttcgagacagacaccaacctgaacttccagaacctgagcgtgatcggcttcagaatcctgctgctgaaagtggccggctttaacctgctgatgaccctgcggctgtggtccagc

SEQ ID NO: 4120 - DNA, 1854 bp, synthetic construct
  source 1..1854: mol_type = other DNA
atggccttaccagtgaccgccttgctcctgccgctggccttgctgctccacgccgccaggccggacgagatcgtgctgacacagagccctgccacactctctctgagccctggcgaaagagccaccctgagctgtagcgccagcagcagcatcaactacatctactggctccagcagaagcccggccaggcccccagaatcctgatctacctgaccagcaacctggcctccggcgtgccagccagattttctggcagcggctccggcaccgacttcaccctgacaatcagcagcctggaacccgaggacttcgccgtgtactactgcctccagtggtccagcaaccccctgacctttggcggaggcaccaaggtggaaatcaagctcgagatccagaaccctgatcctgccgtgtaccagctgcgggatagcaagagcagcgacaagagcgtgtgtctgttcaccgacttcgacagccagaccaacgtgtcccagagcaaggactccgacgtgtacatcaccgataagtgcgtgctggacatgcggagcatggacttcaagagcaactccgccgtggcctggtccaacaagtccgatttcgcctgcgccaacgccttcaacaacagcattatccccgaggacacattcttcccaagccccgagagcagctgcggctttaccagcgagagctaccagcagggcgtgctgagcgccaccatcctgtacgagatcctgctgggcaaggccaccctgtacgccgtgctggtgtctgccctggtgctgatggctatggtcaagcggaaggacagccggggacgcgccaagagaagcggatctggcgtgaagcagaccctgaatttcgacctgctgaagctggctggcgacgtggaatccaacccaggccctactagtatggactggatttggcgcatccttttccttgtcggcgctgctaccggcgcgcattccttcgaagaagtgcaactggtggaaagcgggggaggacttgtgaagcctggcggctctctgagactgagctgtgccgcctctggcttcaccttcagcagctacgacatgagctgggtgcgccaggctcctggcaagggactggaatgggtgtccaccatcagcagcggcggcagctacacctactacctggacagcatcaagggccggttcaccatctccagagacaacgccaagaacagcctgtacctccagatgaactccctgcgggccgaggacacagccgtgtattattgcgccagacagggcctggattactggggcagaggcacccttgtgaccgtgtcctctacgcgtgaggacctgaagaacgtgttcccacctgaggtggccgtgttcgagcctagcgaggccgagatcagccacacccagaaagccaccctcgtgtgcctggctaccggcttctaccccgaccatgtggaactgtcttggtgggtcaacggcaaagaggtgcacagcggcgtgtgtaccgacccccagccactgaaagaacagcccgccctgaacgacagccggtactgcctgagcagcagactgagagtgtccgccaccttctggcagaacccccggaaccacttcagatgccaggtgcagttctacggcctgagcgagaacgacgagtggacccaggacagagccaagcccgtgacccagatcgtgtctgccgaagcctggggcagagccgattgcgacgtgaagctggtggaaaagagcttcgagacagacaccaacctgaacttccagaacctgagcgtgatcggcttcagaatcctgctgctgaaagtggccggctttaacctgctgatgaccctgcggctgtggtccagc

SEQ ID NO: 4121 - DNA, 1881 bp, synthetic construct
  source 1..1881: mol_type = other DNA
atggccttaccagtgaccgccttgctcctgccgctggccttgctgctccacgccgccaggccggacatcgtgatgacccagagccccgatagcctggccgtgtctctgggagagagagccaccatcaactgccgggccagcaagagcgtgtccaccagcggctacagcttcatgcactggtatcagcagaagcccggccagccccccaagctgctgatctacctggcctccaacctggaaagcggcgtgcccgatagattcagcggcagcggctctggcaccgacttcaccctgaccatcagttctcttcaggccgaggacgtggccgtgtactactgccagcacagcagagaggtgccctggacattcggccagggcacaaaggtggaaatcaagcggctcgagatccagaaccctgatcctgccgtgtaccagctgcgggatagcaagagcagcgacaagagcgtgtgtctgttcaccgacttcgacagccagaccaacgtgtcccagagcaaggactccgacgtgtacatcaccgataagtgcgtgctggacatgcggagcatggacttcaagagcaactccgccgtggcctggtccaacaagtccgatttcgcctgcgccaacgccttcaacaacagcattatccccgaggacacattcttcccaagccccgagagcagctgcggctttaccagcgagagctaccagcagggcgtgctgagcgccaccatcctgtacgagatcctgctgggcaaggccaccctgtacgccgtgctggtgtctgccctggtgctgatggctatggtcaagcggaaggacagccggggacgcgccaagagaagcggatctggcgtgaagcagaccctgaatttcgacctgctgaagctggctggcgacgtggaatccaacccaggccctactagtatggactggatttggcgcatccttttccttgtcggcgctgctaccggcgcgcattccttcgaacaggtgcagctggtgcagtctggggccgaagtgaagaaacctggggccagcgtgaaggtgtcctgcaaggccagcggatacacctttaccaactacggcatgaactgggtgcgccaggcccctggacagggcctggaatggatgggctggatcaacacctacaccggcgagcccacatacgccgacgccttcaagggcagattcgccttcagcctggacaccagcacctccaccgcctacctccagatcaacagcctgcggagcgacgacaccgccgtgtattattgcgccagagattacggcgactacgggatggactattggggccagggaaccaccgtgaccgtgtcctctacgcgtgaggacctgaagaacgtgttcccacctgaggtggccgtgttcgagcctagcgaggccgagatcagccacacccagaaagccaccctcgtgtgcctggctaccggcttctaccccgaccatgtggaactgtcttggtgggtcaacggcaaagaggtgcacagcggcgtgtgtaccgacccccagccactgaaagaacagcccgccctgaacgacagccggtactgcctgagcagcagactgagagtgtccgccaccttctggcagaacccccggaaccacttcagatgccaggtgcagttctacggcctgagcgagaacgacgagtggacccaggacagagccaagcccgtgacccagatcgtgtctgccgaagcctggggcagagccgattgcgacgtgaagctggtggaaaagagcttcgagacagacaccaacctgaacttccagaacctgagcgtgatcggcttcagaatcctgctgctgaaagtggccggctttaacctgctgatgaccctgcggctgtggtccagc

SEQ ID NO: 4122 - DNA, 1869 bp, synthetic construct
  source 1..1869: mol_type = other DNA
atggccttaccagtgaccgccttgctcctgccgctggccttgctgctccacgccgccaggccggacatcgtgatgacccagacccccctgaccctgagcgtgacaatcggacagcctgccagcatctcctgcaagagcagccagagcctgctggacagcgacggcaagacctacctgaactggctgctgcagaggccaggccagagccccgagagactgatctacctggtgtccaagctggactccggcgtgcccgatagattcacaggcagcggctccggcaccgacttcaccctgaagatcagccgggtggaagccgaggacctgggcgtgtactgttgttggcagggcacccacttcccttacaccttcggcggagggaccaaggtggaaatcaagggcctcgagatccagaaccctgatcctgccgtgtaccagctgcgggatagcaagagcagcgacaagagcgtgtgtctgttcaccgacttcgacagccagaccaacgtgtcccagagcaaggactccgacgtgtacatcaccgataagtgcgtgctggacatgcggagcatggacttcaagagcaactccgccgtggcctggtccaacaagtccgatttcgcctgcgccaacgccttcaacaacagcattatccccgaggacacattcttcccaagccccgagagcagctgcggctttaccagcgagagctaccagcagggcgtgctgagcgccaccatcctgtacgagatcctgctgggcaaggccaccctgtacgccgtgctggtgtctgccctggtgctgatggctatggtcaagcggaaggacagccggggacgcgccaagagaagcggatctggcgtgaagcagaccctgaatttcgacctgctgaagctggctggcgacgtggaatccaacccaggccctactagtatggactggatttggcgcatccttttccttgtcggcgctgctaccggcgcgcattccttcgaacaggtgcaactgcagcagcctggcgctgaacttgtgcggccaggcgcctctgtgaagctgagctgtaaagccagcggctacaccttcaccagctactggatgaactgggtcaagcagcgcccaggccagggcctggaatggatcggaatgatcgaccccagcgacagcgagacacactacaaccacatcttcaaggacaaggccaccctgaccgtggacaagtccagcagcacagcctacctgcaactgtccagcctgaccagcgaggacagcgccgtgtactactgcgcccggaacctgtatctgtggggccagggaacaagcgtgaccgtgtctagcacgcgtgaggacctgaagaacgtgttcccacctgaggtggccgtgttcgagcctagcgaggccgagatcagccacacccagaaagccaccctcgtgtgcctggctaccggcttctaccccgaccatgtggaactgtcttggtgggtcaacggcaaagaggtgcacagcggcgtgtgtaccgacccccagccactgaaagaacagcccgccctgaacgacagccggtactgcctgagcagcagactgagagtgtccgccaccttctggcagaacccccggaaccacttcagatgccaggtgcagttctacggcctgagcgagaacgacgagtggacccaggacagagccaagcccgtgacccagatcgtgtctgccgaagcctggggcagagccgattgcgacgtgaagctggtggaaaagagcttcgagacagacaccaacctgaacttccagaacctgagcgtgatcggcttcagaatcctgctgctgaaagtggccggctttaacctgctgatgaccctgcggctgtggtccagc

SEQ ID NO: 4123 - DNA, 1893 bp, synthetic construct
  source 1..1893: mol_type = other DNA
atggccttaccagtgaccgccttgctcctgccgctggccttgctgctccacgccgccaggccggacatcgtgatgacccagagccccgatagcctggccgtgtctctgggagagagagccaccatcaactgcgagagcagccagagcctgctgaacagcggcaaccagaagaactacctgacctggtatcagcagaagcccggccagccccccaagcccctgatctattgggccagcaccagagaaagcggcgtgcccgatagattcagcggcagcggaagcggcaccgacttcaccctgaccatcagttctcttcaggccgaggacgtggccgtgtactactgccagaacgactacagctacccctacaccttcggccagggcaccaagctggaaatcaagagactcgagatccagaaccctgatcctgccgtgtaccagctgcgggatagcaagagcagcgacaagagcgtgtgtctgttcaccgacttcgacagccagaccaacgtgtcccagagcaaggactccgacgtgtacatcaccgataagtgcgtgctggacatgcggagcatggacttcaagagcaactccgccgtggcctggtccaacaagtccgatttcgcctgcgccaacgccttcaacaacagcattatccccgaggacacattcttcccaagccccgagagcagctgcggctttaccagcgagagctaccagcagggcgtgctgagcgccaccatcctgtacgagatcctgctgggcaaggccaccctgtacgccgtgctggtgtctgccctggtgctgatggctatggtcaagcggaaggacagccggggacgcgccaagagaagcggatctggcgtgaagcagaccctgaatttcgacctgctgaagctggctggcgacgtggaatccaacccaggccctactagtatggactggatttggcgcatccttttccttgtcggcgctgctaccggcgcgcattccttcgaagaagtgcagctggtgcagtctggggccgaagtgaagaagcctggcgagagcctgaagatcagctgcaagggcagcggctacagcttcaccgactactacatgaagtgggccagacagatgcccggcaagggcctggaatggatgggcgacatcatccccagcaacggggccaccttctacaaccagaaattcaagggccaagtgaccatctccgccgacaagagcatcagcaccacctacctccagtggtccagcctgaaggccagcgacaccgccatgtactattgcgccagaagccatctgctgcgggccagttggttcgcctattggggccagggaacaatggtcacagtgtccagcacgcgtgaggacctgaagaacgtgttcccacctgaggtggccgtgttcgagcctagcgaggccgagatcagccacacccagaaagccaccctcgtgtgcctggctaccggcttctaccccgaccatgtggaactgtcttggtgggtcaacggcaaagaggtgcacagcggcgtgtgtaccgacccccagccactgaaagaacagcccgccctgaacgacagccggtactgcctgagcagcagactgagagtgtccgccaccttctggcagaacccccggaaccacttcagatgccaggtgcagttctacggcctgagcgagaacgacgagtggacccaggacagagccaagcccgtgacccagatcgtgtctgccgaagcctggggcagagccgattgcgacgtgaagctggtggaaaagagcttcgagacagacaccaacctgaacttccagaacctgagcgtgatcggcttcagaatcctgctgctgaaagtggccggctttaacctgctgatgaccctgcggctgtggtccagc

SEQ ID NO: 4124 - DNA, 1878 bp, synthetic construct
  source 1..1878: mol_type = other DNA
atggccttaccagtgaccgccttgctcctgccgctggccttgctgctccacgccgccaggccggacatccagatgacccagtctaccagttccctgagtgcatccctcggagacagggtgacgatcagttgcagcgcaagccaagggatcaataactatctgaactggtatcagcagaaaccggacggaacagtcgaactcctgatttattacaccagcacccttcagagtggcgtcccttcccggttcagtggctccggaagcgggaccgattactccctgaccatttctaatctggagccagaggacataggaacgtattattgccagcagtatagtaaactgccacgaacttttggaggggggacgaaactggagatcaaactcgagatccagaaccctgatcctgccgtgtaccagctgcgggatagcaagagcagcgacaagagcgtgtgtctgttcaccgacttcgacagccagaccaacgtgtcccagagcaaggactccgacgtgtacatcaccgataagtgcgtgctggacatgcggagcatggacttcaagagcaactccgccgtggcctggtccaacaagtccgatttcgcctgcgccaacgccttcaacaacagcattatccccgaggacacattcttcccaagccccgagagcagctgcggctttaccagcgagagctaccagcagggcgtgctgagcgccaccatcctgtacgagatcctgctgggcaaggccaccctgtacgccgtgctggtgtctgccctggtgctgatggctatggtcaagcggaaggacagccggggacgcgccaagagaagcggatctggcgtgaagcagaccctgaatttcgacctgctgaagctggctggcgacgtggaatccaacccaggccctactagtatggactggatttggcgcatccttttccttgtcggcgctgctaccggcgcgcattccttcgaacaggtgcaactccagcagtccggaagcgagcttatgatgccaggggcatcagtgaagatcagctgcaaggctactggctacaccttctctaattactggatagagtgggttaaacaaaggccagggcacggcctggaatggatcggcgagatcctgcctgggacaggccgaaccatttataacgagaagttcaaaggcaaggctactttcaccgcagatataagctctaatacagtgcaaatgcagctctcttccctgacaagtgaggatagtgccgtgtattattgcgcacgaagagattactatggaaatttttattacgctatggattattggggtcaaggaacaagtgtgaccgttagcagcacgcgtgaggacctgaagaacgtgttcccacctgaggtggccgtgttcgagcctagcgaggccgagatcagccacacccagaaagccaccctcgtgtgcctggctaccggcttctaccccgaccatgtggaactgtcttggtgggtcaacggcaaagaggtgcacagcggcgtgtgtaccgacccccagccactgaaagaacagcccgccctgaacgacagccggtactgcctgagcagcagactgagagtgtccgccaccttctggcagaacccccggaaccacttcagatgccaggtgcagttctacggcctgagcgagaacgacgagtggacccaggacagagccaagcccgtgacccagatcgtgtctgccgaagcctggggcagagccgattgcgacgtgaagctggtggaaaagagcttcgagacagacaccaacctgaacttccagaacctgagcgtgatcggcttcagaatcctgctgctgaaagtggccggctttaacctgctgatgaccctgcggctgtggtccagc

SEQ ID NO: 4125 - DNA, 1863 bp, synthetic construct
  source 1..1863: mol_type = other DNA
atggccttaccagtgaccgccttgctcctgccgctggccttgctgctccacgccgccaggccggacatccagatgacccagagccctgccagcctgtccgtgtctgtgggcgagacagtgaccatcacctgtcgggccagcgagaacatctacagcaacctggcctggtatcagcagaagcagggcaagagcccccaactgctggtgtacgccgccaccaatctggccgatggcgtgcccagcagattttccggctctggcagcggcacccagtacagcctgaagatcaacagcctccagagcgaggacttcggcagctactactgccagcacttctggggcacctggacctttggaggaggcaccaccctggaaatcaagctcgagatccagaaccctgatcctgccgtgtaccagctgcgggatagcaagagcagcgacaagagcgtgtgtctgttcaccgacttcgacagccagaccaacgtgtcccagagcaaggactccgacgtgtacatcaccgataagtgcgtgctggacatgcggagcatggacttcaagagcaactccgccgtggcctggtccaacaagtccgatttcgcctgcgccaacgccttcaacaacagcattatccccgaggacacattcttcccaagccccgagagcagctgcggctttaccagcgagagctaccagcagggcgtgctgagcgccaccatcctgtacgagatcctgctgggcaaggccaccctgtacgccgtgctggtgtctgccctggtgctgatggctatggtcaagcggaaggacagccggggacgcgccaagagaagcggatctggcgtgaagcagaccctgaatttcgacctgctgaagctggctggcgacgtggaatccaacccaggccctactagtatggactggatttggcgcatccttttccttgtcggcgctgctaccggcgcgcattccttcgaagaagtgcaactccagcagagcggccctgagcttgtgaagcctggcgcttccgtgaagatgagctgcaaggccagcggctacaccttcaccgactactacatgaagtggatgaagcagagccacggcaagtccctggaatggatcggcgacatcaaccccaacaacggcggcaccacctacaaccagaagttcaagggcaaggccaccctgaccgtggacaagagcagcagcaccgcctacatgcaactgaacagcctgaccagcgaggacagcgccgtgtactactgcgccagagactacggctacggctatttcgactactggggccagggcacaaccctgacagtgtcctctacgcgtgaggacctgaagaacgtgttcccacctgaggtggccgtgttcgagcctagcgaggccgagatcagccacacccagaaagccaccctcgtgtgcctggctaccggcttctaccccgaccatgtggaactgtcttggtgggtcaacggcaaagaggtgcacagcggcgtgtgtaccgacccccagccactgaaagaacagcccgccctgaacgacagccggtactgcctgagcagcagactgagagtgtccgccaccttctggcagaacccccggaaccacttcagatgccaggtgcagttctacggcctgagcgagaacgacgagtggacccaggacagagccaagcccgtgacccagatcgtgtctgccgaagcctggggcagagccgattgcgacgtgaagctggtggaaaagagcttcgagacagacaccaacctgaacttccagaacctgagcgtgatcggcttcagaatcctgctgctgaaagtggccggctttaacctgctgatgaccctgcggctgtggtccagc

SEQ ID NO: 4126 - DNA, 1872 bp, synthetic construct
  source 1..1872: mol_type = other DNA
atggccttaccagtgaccgccttgctcctgccgctggccttgctgctccacgccgccaggccggagatcgtgctgacacagagccctggcaccctgagcctgtctccaggcgaaagagccacactgagctgtcgggcctctcagagcgtgggaggctacctggcttggtatcagcagaagccaggccaggcccccagactgctgatctacgacgccagcaatcgggccacaggcatccccgccagattttctggcagcggctccggcaccgacttcaccctgacaatcagcagcctggaacccgaggacttcgccgtgtactactgccagcagcggaacaactggccccccatgtacacattcggccagggcaccaagctggaaatcaagagactcgagatccagaaccctgatcctgccgtgtaccagctgcgggatagcaagagcagcgacaagagcgtgtgtctgttcaccgacttcgacagccagaccaacgtgtcccagagcaaggactccgacgtgtacatcaccgataagtgcgtgctggacatgcggagcatggacttcaagagcaactccgccgtggcctggtccaacaagtccgatttcgcctgcgccaacgccttcaacaacagcattatccccgaggacacattcttcccaagccccgagagcagctgcggctttaccagcgagagctaccagcagggcgtgctgagcgccaccatcctgtacgagatcctgctgggcaaggccaccctgtacgccgtgctggtgtctgccctggtgctgatggctatggtcaagcggaaggacagccggggacgcgccaagagaagcggatctggcgtgaagcagaccctgaatttcgacctgctgaagctggctggcgacgtggaatccaacccaggccctactagtatggactggatttggcgcatccttttccttgtcggcgctgctaccggcgcgcattccttcgaacaggtgcaactggtgcagagcggagccgaagtgaagaaacccggcagcagcgtgaaggtgtcctgcaaggcttccggcggcaccttcagcagctacgccatttcttgggtgcgccaggctcctggacagggcctggaatggatgggcggcatcatccctatcctgggcaccgccaactacgcccagaaattccagggcagagtgaccatcaccgccgacgagagcaccagcaccgcctacatggaactgagcagcctgcggagcgaggacacagccgtgtattattgcgccagatggggcggaggggccttcgacatttggggccagggaacaatggtcaccgtgtccagcacgcgtgaggacctgaagaacgtgttcccacctgaggtggccgtgttcgagcctagcgaggccgagatcagccacacccagaaagccaccctcgtgtgcctggctaccggcttctaccccgaccatgtggaactgtcttggtgggtcaacggcaaagaggtgcacagcggcgtgtgtaccgacccccagccactgaaagaacagcccgccctgaacgacagccggtactgcctgagcagcagactgagagtgtccgccaccttctggcagaacccccggaaccacttcagatgccaggtgcagttctacggcctgagcgagaacgacgagtggacccaggacagagccaagcccgtgacccagatcgtgtctgccgaagcctggggcagagccgattgcgacgtgaagctggtggaaaagagcttcgagacagacaccaacctgaacttccagaacctgagcgtgatcggcttcagaatcctgctgctgaaagtggccggctttaacctgctgatgaccctgcggctgtggtccagc

SEQ ID NO: 4127 - DNA, 1857 bp, synthetic construct
  source 1..1857: mol_type = other DNA
atggccttaccagtgaccgccttgctcctgccgctggccttgctgctccacgccgccaggccgcagatcgtgctgacacagagccctgccctgatgagcgccagccctggcgagaaagtgaccatgacctgtagcgccagcagcagcgtgcgctacatgtactggtatcagcagaagcccagaagcagccccaagccctggattcacctgaccagcaatctggcctctggcgtgcccgctagattttccggctctggcagcggcaccagctacagcctgaccatcagcagcatggaagccgaggacgccgccacctactactgccagcagtggtccagccaccccttcacatttggctccggcaccaagctggaaatcaagctcgagatccagaaccctgatcctgccgtgtaccagctgcgggatagcaagagcagcgacaagagcgtgtgtctgttcaccgacttcgacagccagaccaacgtgtcccagagcaaggactccgacgtgtacatcaccgataagtgcgtgctggacatgcggagcatggacttcaagagcaactccgccgtggcctggtccaacaagtccgatttcgcctgcgccaacgccttcaacaacagcattatccccgaggacacattcttcccaagccccgagagcagctgcggctttaccagcgagagctaccagcagggcgtgctgagcgccaccatcctgtacgagatcctgctgggcaaggccaccctgtacgccgtgctggtgtctgccctggtgctgatggctatggtcaagcggaaggacagccggggacgcgccaagagaagcggatctggcgtgaagcagaccctgaatttcgacctgctgaagctggctggcgacgtggaatccaacccaggccctactagtatggactggatttggcgcatccttttccttgtcggcgctgctaccggcgcgcattccttcgaagatgtgcaactccaggaaagcggccctggccttgtgaagcctagccagagcctgtccctgacctgtaccgtgaccggcttcagcatcaccagcgactactcttggaactggatcagacagttccctggcaacaaactggaatggatgggctacatcagctactccggccacacctcctacaaccccagcctggaaagccggatctccatcaccagagacaccagcaagaaccagttcttcttgcaactgaacagcgtgaccaccgaggataccgccacatattactgtaccagaggcaactgggacgtggtgtactggggccagggcacacttgtgaccgtgtctgctacgcgtgaggacctgaagaacgtgttcccacctgaggtggccgtgttcgagcctagcgaggccgagatcagccacacccagaaagccaccctcgtgtgcctggctaccggcttctaccccgaccatgtggaactgtcttggtgggtcaacggcaaagaggtgcacagcggcgtgtgtaccgacccccagccactgaaagaacagcccgccctgaacgacagccggtactgcctgagcagcagactgagagtgtccgccaccttctggcagaacccccggaaccacttcagatgccaggtgcagttctacggcctgagcgagaacgacgagtggacccaggacagagccaagcccgtgacccagatcgtgtctgccgaagcctggggcagagccgattgcgacgtgaagctggtggaaaagagcttcgagacagacaccaacctgaacttccagaacctgagcgtgatcggcttcagaatcctgctgctgaaagtggccggctttaacctgctgatgaccctgcggctgtggtccagc

SEQ ID NO: 4128 - DNA, 1887 bp, synthetic construct
  source 1..1887: mol_type = other DNA
atggccttaccagtgaccgccttgctcctgccgctggccttgctgctccacgccgccaggccggacgtcgtgatgacccagagccctctgagcctgcctgtgacactgggacagcctgccagcatctcctgtcggagcagccagagcatcgtgcacagcgacggcaacacctacctggaatggtatcagcagcggccaggccagagccccagacggctgatctacaaggtgtccaacagattcagcggcgtgcccgacagattctccggcagcggctctggcaccgacttcaccctgaagatcagcagagtggaagccgaggacgtgggcgtgtactactgttttcaaggcagccacgccccctggacctttggcggaggaacaaaggtggaaatcaagctcgagatccagaaccctgatcctgccgtgtaccagctgcgggatagcaagagcagcgacaagagcgtgtgtctgttcaccgacttcgacagccagaccaacgtgtcccagagcaaggactccgacgtgtacatcaccgataagtgcgtgctggacatgcggagcatggacttcaagagcaactccgccgtggcctggtccaacaagtccgatttcgcctgcgccaacgccttcaacaacagcattatccccgaggacacattcttcccaagccccgagagcagctgcggctttaccagcgagagctaccagcagggcgtgctgagcgccaccatcctgtacgagatcctgctgggcaaggccaccctgtacgccgtgctggtgtctgccctggtgctgatggctatggtcaagcggaaggacagccggggacgcgccaagagaagcggatctggcgtgaagcagaccctgaatttcgacctgctgaagctggctggcgacgtggaatccaacccaggccctactagtatggactggatttggcgcatccttttccttgtcggcgctgctaccggcgcgcattccttcgaagaagtgcaactggtggaatcaggcggcggactggtgcagcctggcggatctctgagactgagctgtgccgccagcggcttcaccttcagcagctacggaatgcactgggtgcgccaggcccctggcaaaggactggaatgggtggcctacatcaccaccagaagcagcaccatctactacgccgacagcgtgaagggccggttcaccatctccagagacaacgccaagaacagcctgtacctccagatgaactccctgcgggccgaggacaccgccgtgtactattgcaccagagagcccctgaccggctactacgctatggactattggggccagggcaccagcgtgaccgtgtctagtacgcgtgaggacctgaagaacgtgttcccacctgaggtggccgtgttcgagcctagcgaggccgagatcagccacacccagaaagccaccctcgtgtgcctggctaccggcttctaccccgaccatgtggaactgtcttggtgggtcaacggcaaagaggtgcacagcggcgtgtgtaccgacccccagccactgaaagaacagcccgccctgaacgacagccggtactgcctgagcagcagactgagagtgtccgccaccttctggcagaacccccggaaccacttcagatgccaggtgcagttctacggcctgagcgagaacgacgagtggacccaggacagagccaagcccgtgacccagatcgtgtctgccgaagcctggggcagagccgattgcgacgtgaagctggtggaaaagagcttcgagacagacaccaacctgaacttccagaacctgagcgtgatcggcttcagaatcctgctgctgaaagtggccggctttaacctgctgatgaccctgcggctgtggtccagc

SEQ ID NO: 4129 - DNA, 1863 bp, synthetic construct
  source 1..1863: mol_type = other DNA
atggccttaccagtgaccgccttgctcctgccgctggccttgctgctccacgccgccaggccggacatccagatgacccagagccccagcagcctgtctgccagcgtgggcgacagagtgaccatcacctgtagagccagccagagcatcagcctgtggctgaactggtatcagcagaagcccggcaaggcccccaagctgctgatctacgccgccagcacactccagagcggcgtgccaagcagattttccggcagcggctccggcaccgacttcaccctgacaatcagctccctccagcccgaggacttcgccacctactactgccagcagtactacaccagcccctacaccttcggccagggcaccaaggtggaaatcaagagactcgagatccagaaccctgatcctgccgtgtaccagctgcgggatagcaagagcagcgacaagagcgtgtgtctgttcaccgacttcgacagccagaccaacgtgtcccagagcaaggactccgacgtgtacatcaccgataagtgcgtgctggacatgcggagcatggacttcaagagcaactccgccgtggcctggtccaacaagtccgatttcgcctgcgccaacgccttcaacaacagcattatccccgaggacacattcttcccaagccccgagagcagctgcggctttaccagcgagagctaccagcagggcgtgctgagcgccaccatcctgtacgagatcctgctgggcaaggccaccctgtacgccgtgctggtgtctgccctggtgctgatggctatggtcaagcggaaggacagccggggacgcgccaagagaagcggatctggcgtgaagcagaccctgaatttcgacctgctgaagctggctggcgacgtggaatccaacccaggccctactagtatggactggatttggcgcatccttttccttgtcggcgctgctaccggcgcgcattccttcgaacaggtgcaactgctggaatctggcggcggactggtgcagcctggcggatctctgagactgagctgtgccgccagcggcttcaccttcagcagctacgccatgagctgggtgcgccaggcccctggaaaaggactggaatgggtgtccgtgatccggtccagcggcagcagcacctattacgccgatagcgtgaagggccggttcaccatcagccgggacaacagcaagaacaccctgtacctccagatgaacagcctgcgggccgaggacaccgccgtgtactattgtgctaggggaggcggctacttcgactactggggccagggaacactcgtgaccgtgtcctctacgcgtgaggacctgaagaacgtgttcccacctgaggtggccgtgttcgagcctagcgaggccgagatcagccacacccagaaagccaccctcgtgtgcctggctaccggcttctaccccgaccatgtggaactgtcttggtgggtcaacggcaaagaggtgcacagcggcgtgtgtaccgacccccagccactgaaagaacagcccgccctgaacgacagccggtactgcctgagcagcagactgagagtgtccgccaccttctggcagaacccccggaaccacttcagatgccaggtgcagttctacggcctgagcgagaacgacgagtggacccaggacagagccaagcccgtgacccagatcgtgtctgccgaagcctggggcagagccgattgcgacgtgaagctggtggaaaagagcttcgagacagacaccaacctgaacttccagaacctgagcgtgatcggcttcagaatcctgctgctgaaagtggccggctttaacctgctgatgaccctgcggctgtggtccagc

SEQ ID NO: 4130 - DNA, 1872 bp, synthetic construct
  source 1..1872: mol_type = other DNA
atggccttaccagtgaccgccttgctcctgccgctggccttgctgctccacgccgccaggccggacatccagatgacccagagccccagcagcctgtctgccagcgtgggcgacagagtgaccatcacctgtagagccagccagagcatcagcagctacctgaactggtatcagcagaagcccggcaaggcccccaaactgctgatctacgccgtgtccacactccagagcggcgtgcccagcagattttctggcagcggctccggcaccgacttcaccctgacaatcagctccctccagcccgaggacttcgccacctactactgtcagcagagcggcaccttccctcccaccacatttggacagggcaccaaggtggaaatcaagagactcgagatccagaaccctgatcctgccgtgtaccagctgcgggatagcaagagcagcgacaagagcgtgtgtctgttcaccgacttcgacagccagaccaacgtgtcccagagcaaggactccgacgtgtacatcaccgataagtgcgtgctggacatgcggagcatggacttcaagagcaactccgccgtggcctggtccaacaagtccgatttcgcctgcgccaacgccttcaacaacagcattatccccgaggacacattcttcccaagccccgagagcagctgcggctttaccagcgagagctaccagcagggcgtgctgagcgccaccatcctgtacgagatcctgctgggcaaggccaccctgtacgccgtgctggtgtctgccctggtgctgatggctatggtcaagcggaaggacagccggggacgcgccaagagaagcggatctggcgtgaagcagaccctgaatttcgacctgctgaagctggctggcgacgtggaatccaacccaggccctactagtatggactggatttggcgcatccttttccttgtcggcgctgctaccggcgcgcattccttcgaacaggtgcaactgctggaatctggcggcggactggtgcagcctggcggatctctgagactgagctgtgccgccagcggcttcaccttcagcagccacggaatgcactgggtgcgccaggcccctggaaagggactggaatgggtgtccgtgatctccggcagcggcagcaataccggctacgccgatagcgtgaagggccggttcaccatcagccgggacaacagcaagaacaccctgtacctccagatgaacagcctgcgggccgaggacaccgccgtgtactattgtgccagacagtggggcagctacgccttcgattcttggggccagggcaccctcgtgaccgtgtcatctacgcgtgaggacctgaagaacgtgttcccacctgaggtggccgtgttcgagcctagcgaggccgagatcagccacacccagaaagccaccctcgtgtgcctggctaccggcttctaccccgaccatgtggaactgtcttggtgggtcaacggcaaagaggtgcacagcggcgtgtgtaccgacccccagccactgaaagaacagcccgccctgaacgacagccggtactgcctgagcagcagactgagagtgtccgccaccttctggcagaacccccggaaccacttcagatgccaggtgcagttctacggcctgagcgagaacgacgagtggacccaggacagagccaagcccgtgacccagatcgtgtctgccgaagcctggggcagagccgattgcgacgtgaagctggtggaaaagagcttcgagacagacaccaacctgaacttccagaacctgagcgtgatcggcttcagaatcctgctgctgaaagtggccggctttaacctgctgatgaccctgcggctgtggtccagc

SEQ ID NO: 4131 - DNA, 1902 bp, synthetic construct
  source 1..1902: mol_type = other DNA
atggccttaccagtgaccgccttgctcctgccgctggccttgctgctccacgccgccaggccggacatcgtgatgagccagagccctagcagcctggccgtgtccgtgggcgagaaagtgaccatgagctgcaagagcagccagtccctgctgcacagcagcaaccagaagaactacctggcctggtatcagcagaagcccggccagtcccccaaggtgctgatctactgggccagcaccagagaaagcggcgtgcccgatagattcaccggcagcggctctggcaccgacttcaccctgaccatcaccagcgtgaagtccgaggacctggctgtgtactactgccagcagtattacagctacccctggaccttcggcggaggcacccggctggaaatcaaaagactcgagatccagaaccctgatcctgccgtgtaccagctgcgggatagcaagagcagcgacaagagcgtgtgtctgttcaccgacttcgacagccagaccaacgtgtcccagagcaaggactccgacgtgtacatcaccgataagtgcgtgctggacatgcggagcatggacttcaagagcaactccgccgtggcctggtccaacaagtccgatttcgcctgcgccaacgccttcaacaacagcattatccccgaggacacattcttcccaagccccgagagcagctgcggctttaccagcgagagctaccagcagggcgtgctgagcgccaccatcctgtacgagatcctgctgggcaaggccaccctgtacgccgtgctggtgtctgccctggtgctgatggctatggtcaagcggaaggacagccggggacgcgccaagagaagcggatctggcgtgaagcagaccctgaatttcgacctgctgaagctggctggcgacgtggaatccaacccaggccctactagtatggactggatttggcgcatccttttccttgtcggcgctgctaccggcgcgcattccttcgaagaagtgcaactccagcagagcgtggccgagcttgtgaagcctggcgcttccgtgaagatgtcctgcaaggtgtccggctacaccctgacagaccacaccatccactggatgaagcagcggcctgagcagggcctggaatggatcggctacatctaccccagggacggcatcaccggctacaacgagaagttcaagggcaaggccacactgaccgccgacaccagcagcagcacagcctacatgcaactgaacagcctgaccagcgaggacagcgccgtgtacttctgtgccagatggggctacagctacagaaactacgcctactactacgactactggggccagggcacaaccctgaccgtgtctagtacgcgtgaggacctgaagaacgtgttcccacctgaggtggccgtgttcgagcctagcgaggccgagatcagccacacccagaaagccaccctcgtgtgcctggctaccggcttctaccccgaccatgtggaactgtcttggtgggtcaacggcaaagaggtgcacagcggcgtgtgtaccgacccccagccactgaaagaacagcccgccctgaacgacagccggtactgcctgagcagcagactgagagtgtccgccaccttctggcagaacccccggaaccacttcagatgccaggtgcagttctacggcctgagcgagaacgacgagtggacccaggacagagccaagcccgtgacccagatcgtgtctgccgaagcctggggcagagccgattgcgacgtgaagctggtggaaaagagcttcgagacagacaccaacctgaacttccagaacctgagcgtgatcggcttcagaatcctgctgctgaaagtggccggctttaacctgctgatgaccctgcggctgtggtccagc

SEQ ID NO: 4132 - DNA, 1893 bp, synthetic construct
  source 1..1893: mol_type = other DNA
atggccttaccagtgaccgccttgctcctgccgctggccttgctgctccacgccgccaggccggagatcgtgctgacacagagccctggcaccctgagcctgtctccaggcgaaagagccacactgagctgtcgggccagccagagcgtgtccagctcttacctggcctggtatcagcagaagcccggccaggctccccggctgctgatctacggaacaagcagcagagccaccggcatccccgacagattttctggcagcggctccggcaccgacttcaccctgacaatcagcagactggaacccgaggacttcgccgtgtactactgccagcagtacggcagcagccccttcacctttggcggaggcaccaaggtggaaatcaagagactcgagatccagaaccctgatcctgccgtgtaccagctgcgggatagcaagagcagcgacaagagcgtgtgtctgttcaccgacttcgacagccagaccaacgtgtcccagagcaaggactccgacgtgtacatcaccgataagtgcgtgctggacatgcggagcatggacttcaagagcaactccgccgtggcctggtccaacaagtccgatttcgcctgcgccaacgccttcaacaacagcattatccccgaggacacattcttcccaagccccgagagcagctgcggctttaccagcgagagctaccagcagggcgtgctgagcgccaccatcctgtacgagatcctgctgggcaaggccaccctgtacgccgtgctggtgtctgccctggtgctgatggctatggtcaagcggaaggacagccggggacgcgccaagagaagcggatctggcgtgaagcagaccctgaatttcgacctgctgaagctggctggcgacgtggaatccaacccaggccctactagtatggactggatttggcgcatccttttccttgtcggcgctgctaccggcgcgcattccttcgaacaggtgcaactccaggaatctggccccggactggctaagcccagcgagacactgagcctgacctgtaccgtgtccggcgacagcatcaccagctactactggtcctggatcagacagccccctggcaagggcctggaatggatcggctacatctactacagcggcagcaccaactacaaccccagcctgaagtccagagtgaccatcagcgtggacaccagcaagaaccagttctccctgaagctgagcagcgtgacagccgccgacaccgccgtgtattattgcgccagagatcagcggagaatcgccgctgccggcacccacttttacggcatggatgtgtggggccagggcaccaccgtgaccgtgtcatctacgcgtgaggacctgaagaacgtgttcccacctgaggtggccgtgttcgagcctagcgaggccgagatcagccacacccagaaagccaccctcgtgtgcctggctaccggcttctaccccgaccatgtggaactgtcttggtgggtcaacggcaaagaggtgcacagcggcgtgtgtaccgacccccagccactgaaagaacagcccgccctgaacgacagccggtactgcctgagcagcagactgagagtgtccgccaccttctggcagaacccccggaaccacttcagatgccaggtgcagttctacggcctgagcgagaacgacgagtggacccaggacagagccaagcccgtgacccagatcgtgtctgccgaagcctggggcagagccgattgcgacgtgaagctggtggaaaagagcttcgagacagacaccaacctgaacttccagaacctgagcgtgatcggcttcagaatcctgctgctgaaagtggccggctttaacctgctgatgaccctgcggctgtggtccagc

SEQ ID NO: 4133 - DNA, 1869 bp, synthetic construct
  source 1..1869: mol_type = other DNA
atggccttaccagtgaccgccttgctcctgccgctggccttgctgctccacgccgccaggccggacatcctgctgacccagagccccgtgatcctgtccgtgtctcctggcgagagagtgtccttcagctgtcgggccagccagagcatcggcaccaacatccactggtatcagcagcggaccaacggcagccccagactgctgattaagtacgccagcgagtccatcagcggcatccccagcagattttccggcagcggctccggcaccgacttcaccctgagcatcaacagcgtggaaagcgaggacattgccgactactactgccagcagaacaacaactggcccaccaccttcggagccggcaccaagctggaactgaagctcgagatccagaaccctgatcctgccgtgtaccagctgcgggatagcaagagcagcgacaagagcgtgtgtctgttcaccgacttcgacagccagaccaacgtgtcccagagcaaggactccgacgtgtacatcaccgataagtgcgtgctggacatgcggagcatggacttcaagagcaactccgccgtggcctggtccaacaagtccgatttcgcctgcgccaacgccttcaacaacagcattatccccgaggacacattcttcccaagccccgagagcagctgcggctttaccagcgagagctaccagcagggcgtgctgagcgccaccatcctgtacgagatcctgctgggcaaggccaccctgtacgccgtgctggtgtctgccctggtgctgatggctatggtcaagcggaaggacagccggggacgcgccaagagaagcggatctggcgtgaagcagaccctgaatttcgacctgctgaagctggctggcgacgtggaatccaacccaggccctactagtatggactggatttggcgcatccttttccttgtcggcgctgctaccggcgcgcattccttcgaacaggtgcagctgaagcagagcggacctggcctggtgcagcctagccagagcctgtccatcacctgtaccgtgtccggcttcagcctgaccaactacggcgtgcactgggtgcgccagagccctggaaaaggactggaatggctgggagtgatttggagcggcggcaacaccgactacaacacccccttcaccagcagactgtctatcaacaaggacaacagcaagagccaggtgttcttcaagatgaacagcctccagagcaacgacaccgccatctactactgtgctagagccctgacctactatgactacgagttcgcctactggggccagggcacactcgtgacagtgtctgctacgcgtgaggacctgaagaacgtgttcccacctgaggtggccgtgttcgagcctagcgaggccgagatcagccacacccagaaagccaccctcgtgtgcctggctaccggcttctaccccgaccatgtggaactgtcttggtgggtcaacggcaaagaggtgcacagcggcgtgtgtaccgacccccagccactgaaagaacagcccgccctgaacgacagccggtactgcctgagcagcagactgagagtgtccgccaccttctggcagaacccccggaaccacttcagatgccaggtgcagttctacggcctgagcgagaacgacgagtggacccaggacagagccaagcccgtgacccagatcgtgtctgccgaagcctggggcagagccgattgcgacgtgaagctggtggaaaagagcttcgagacagacaccaacctgaacttccagaacctgagcgtgatcggcttcagaatcctgctgctgaaagtggccggctttaacctgctgatgaccctgcggctgtggtccagc

SEQ ID NO: 4134 - DNA, 1848 bp, synthetic construct
  source 1..1848: mol_type = other DNA
atggccttaccagtgaccgccttgctcctgccgctggccttgctgctccacgccgccaggccgatgacccagagccccaagttcctgctggtgtctgccggcgacagagtgaccctgacatgcaaggccagccagagcgtgaacaacgacgtgtactggtatcagcaggaacccggccagtcccccaagctgctgatctactgggccagcaccagagaaagcggcgtgcccgatagattcaccggcagcggctctggcaccgacttcaccctgacaatcagcagcgtgcaggccgaggacctggccgtgtactactgcaagcagagctacaacctgtacaccttcggcggaggcaccaagctggaaatcaagagactcgagatccagaaccctgatcctgccgtgtaccagctgcgggatagcaagagcagcgacaagagcgtgtgtctgttcaccgacttcgacagccagaccaacgtgtcccagagcaaggactccgacgtgtacatcaccgataagtgcgtgctggacatgcggagcatggacttcaagagcaactccgccgtggcctggtccaacaagtccgatttcgcctgcgccaacgccttcaacaacagcattatccccgaggacacattcttcccaagccccgagagcagctgcggctttaccagcgagagctaccagcagggcgtgctgagcgccaccatcctgtacgagatcctgctgggcaaggccaccctgtacgccgtgctggtgtctgccctggtgctgatggctatggtcaagcggaaggacagccggggacgcgccaagagaagcggatctggcgtgaagcagaccctgaatttcgacctgctgaagctggctggcgacgtggaatccaacccaggccctactagtatggactggatttggcgcatccttttccttgtcggcgctgctaccggcgcgcattccttcgaagaatctggaagaggactggtgcagcctggcggcagcagaaagctgtcttgtgccgccagcggcttcaccttcagcaccagcggaatgcactgggtgcgccaggcccctgagaagggactggaatgggtggcctacatcagctccggcagcaccaccatctaccacgccgataccgtgaagggccggttcaccatcagccgggacaaccccaagaataccctgttcctccagatgaccagcctgcggagcgaggacaccgccatgtactattgctgcgccagaagcggccagttcggcaactacttcgactactggggccagggcaccaccctgaccgtgtcatctacgcgtgaggacctgaagaacgtgttcccacctgaggtggccgtgttcgagcctagcgaggccgagatcagccacacccagaaagccaccctcgtgtgcctggctaccggcttctaccccgaccatgtggaactgtcttggtgggtcaacggcaaagaggtgcacagcggcgtgtgtaccgacccccagccactgaaagaacagcccgccctgaacgacagccggtactgcctgagcagcagactgagagtgtccgccaccttctggcagaacccccggaaccacttcagatgccaggtgcagttctacggcctgagcgagaacgacgagtggacccaggacagagccaagcccgtgacccagatcgtgtctgccgaagcctggggcagagccgattgcgacgtgaagctggtggaaaagagcttcgagacagacaccaacctgaacttccagaacctgagcgtgatcggcttcagaatcctgctgctgaaagtggccggctttaacctgctgatgaccctgcggctgtggtccagc

SEQ ID NO: 4135 - DNA, 1863 bp, synthetic construct
  source 1..1863: mol_type = other DNA
atggccttaccagtgaccgccttgctcctgccgctggccttgctgctccacgccgccaggccgcagagcccatctagcctggctgtgtctgccggcgagaaagtgaccatgagctgcaagagcagccagagcctgctgaacagccggacccggaagaactacctggcctggtatcagcagaagcccggccagagccccaagctgctgatctactgggccagcaccagagaaagcggcgtgcccgatagattcaccggctctggcagcggcaccgacttcaccctgacaatcagcagcgtgcaggccgaggacctggccgtgtactactgcaagcagagcaacctgtacaccttcggcggaggcaccaagctggaaatcaagctcgagatccagaaccctgatcctgccgtgtaccagctgcgggatagcaagagcagcgacaagagcgtgtgtctgttcaccgacttcgacagccagaccaacgtgtcccagagcaaggactccgacgtgtacatcaccgataagtgcgtgctggacatgcggagcatggacttcaagagcaactccgccgtggcctggtccaacaagtccgatttcgcctgcgccaacgccttcaacaacagcattatccccgaggacacattcttcccaagccccgagagcagctgcggctttaccagcgagagctaccagcagggcgtgctgagcgccaccatcctgtacgagatcctgctgggcaaggccaccctgtacgccgtgctggtgtctgccctggtgctgatggctatggtcaagcggaaggacagccggggacgcgccaagagaagcggatctggcgtgaagcagaccctgaatttcgacctgctgaagctggctggcgacgtggaatccaacccaggccctactagtatggactggatttggcgcatccttttccttgtcggcgctgctaccggcgcgcattccttcgaacaggtgcagctggaagagtctggacccgagcttgtgaagcctggggccagcgtgaagctgtcctgtaaagccagcggctacaccttcaccgagtacatcatccactgggtcaagcagcggagcggccagggcctggaatggatcggctggttttaccctggctccggcagcatcaagtacaacgagaagttcaaggacaaggccaccctgaccgccgacaagtccagcagcaccgtgtacatggaactgagcggcctgaccagcgaggacagcgccgtgtatttctgcgccagacacgacggctacagctacttcgactattggggccagggcaccacactgaccgtgtcctctacgcgtgaggacctgaagaacgtgttcccacctgaggtggccgtgttcgagcctagcgaggccgagatcagccacacccagaaagccaccctcgtgtgcctggctaccggcttctaccccgaccatgtggaactgtcttggtgggtcaacggcaaagaggtgcacagcggcgtgtgtaccgacccccagccactgaaagaacagcccgccctgaacgacagccggtactgcctgagcagcagactgagagtgtccgccaccttctggcagaacccccggaaccacttcagatgccaggtgcagttctacggcctgagcgagaacgacgagtggacccaggacagagccaagcccgtgacccagatcgtgtctgccgaagcctggggcagagccgattgcgacgtgaagctggtggaaaagagcttcgagacagacaccaacctgaacttccagaacctgagcgtgatcggcttcagaatcctgctgctgaaagtggccggctttaacctgctgatgaccctgcggctgtggtccagc

SEQ ID NO: 4136 - DNA, 1872 bp, synthetic construct
  source 1..1872: mol_type = other DNA
atggccttaccagtgaccgccttgctcctgccgctggccttgctgctccacgccgccaggccggacatccagatgacccagagccccagcagcctgtctgcctctctgggcgagagagtgtccctgacctgtcgggccacacaggaactgagcggctacctgtcttggctgcagcagaagcccgacggcaccatcaagcggctgatctacgccgccagcaccctggatagcggcgtgcccaagagattcagcggcaacagaagcggcagcgactacagcctgaccatcagctccctggaaagcgaggacttcgccgactactactgcctgcagtacgccatctacccctacaccttcggcggaggcaccaagctggaaatcaagctcgagatccagaaccctgatcctgccgtgtaccagctgcgggatagcaagagcagcgacaagagcgtgtgtctgttcaccgacttcgacagccagaccaacgtgtcccagagcaaggactccgacgtgtacatcaccgataagtgcgtgctggacatgcggagcatggacttcaagagcaactccgccgtggcctggtccaacaagtccgatttcgcctgcgccaacgccttcaacaacagcattatccccgaggacacattcttcccaagccccgagagcagctgcggctttaccagcgagagctaccagcagggcgtgctgagcgccaccatcctgtacgagatcctgctgggcaaggccaccctgtacgccgtgctggtgtctgccctggtgctgatggctatggtcaagcggaaggacagccggggacgcgccaagagaagcggatctggcgtgaagcagaccctgaatttcgacctgctgaagctggctggcgacgtggaatccaacccaggccctactagtatggactggatttggcgcatccttttccttgtcggcgctgctaccggcgcgcattccttcgaagaggtgcaactgcagcagtctggccccgagcttgtgaagcctggcgcctccgtgaagatgagctgcaaggccagcggctacacctttaccagctacttcatccactgggtcaagcagaaacccggccagggcctggaatggatcggcttcatcaacccttacaacgacggcagcaagtacaacgagaagttcaagggcaaggccaccctgaccagcgacaagagcagcagcaccgcctacatggaactgtccagcctgacatccgaggacagcgccgtgtactactgcaccagggacgacggctactacggctacgccatggactactggggccagggaacaagcgtcaccgtgtcctctacgcgtgaggacctgaagaacgtgttcccacctgaggtggccgtgttcgagcctagcgaggccgagatcagccacacccagaaagccaccctcgtgtgcctggctaccggcttctaccccgaccatgtggaactgtcttggtgggtcaacggcaaagaggtgcacagcggcgtgtgtaccgacccccagccactgaaagaacagcccgccctgaacgacagccggtactgcctgagcagcagactgagagtgtccgccaccttctggcagaacccccggaaccacttcagatgccaggtgcagttctacggcctgagcgagaacgacgagtggacccaggacagagccaagcccgtgacccagatcgtgtctgccgaagcctggggcagagccgattgcgacgtgaagctggtggaaaagagcttcgagacagacaccaacctgaacttccagaacctgagcgtgatcggcttcagaatcctgctgctgaaagtggccggctttaacctgctgatgaccctgcggctgtggtccagc

SEQ ID NO: 4137 - DNA, 1887 bp, synthetic construct
  source 1..1887: mol_type = other DNA
atggccttaccagtgaccgccttgctcctgccgctggccttgctgctccacgccgccaggccggacaccatcgtgctgacacagagccctgcttccctggccgtgtccctgggacagagagccaccatctcttgcagagccagcgagagcgtggacagctacggcaacagcttcatgcactggtatcagcagaagcccggccagccccccaagctgctgatctacctggcctccaacctggaaagcggcgtgcccgccagattttctggcagcggcagcagaaccgacttcaccctgaccatcgaccccgtggaagccgatgatgccgccacctactactgccagcagaacaactacgacccctggaccttcggcggaggcaccaagctggaaatcaagctcgagatccagaaccctgatcctgccgtgtaccagctgcgggatagcaagagcagcgacaagagcgtgtgtctgttcaccgacttcgacagccagaccaacgtgtcccagagcaaggactccgacgtgtacatcaccgataagtgcgtgctggacatgcggagcatggacttcaagagcaactccgccgtggcctggtccaacaagtccgatttcgcctgcgccaacgccttcaacaacagcattatccccgaggacacattcttcccaagccccgagagcagctgcggctttaccagcgagagctaccagcagggcgtgctgagcgccaccatcctgtacgagatcctgctgggcaaggccaccctgtacgccgtgctggtgtctgccctggtgctgatggctatggtcaagcggaaggacagccggggacgcgccaagagaagcggatctggcgtgaagcagaccctgaatttcgacctgctgaagctggctggcgacgtggaatccaacccaggccctactagtatggactggatttggcgcatccttttccttgtcggcgctgctaccggcgcgcattccttcgaagaagtgcaactccagcagagcggccctgagcttgtgaagcctggcgcttccgtgaagatgagctgcaaggccagcggctacaccttcaccagctacgtgatgcactgggtcaagcagaaacctggacagggcctggaatggatcggctacatcaacccctacaacgacggcaccaagtacaacgagaagttcaagggcaaggccaccctgacaagcgacaccagcagcagcaccgcctacatggaactgaacagcctgaccagcgaggacagcgccgtgtacttctgcgccagacccatctacttcgacaacgactacttcgattactggggccagggcaccaccctgaaggtgtcctctacgcgtgaggacctgaagaacgtgttcccacctgaggtggccgtgttcgagcctagcgaggccgagatcagccacacccagaaagccaccctcgtgtgcctggctaccggcttctaccccgaccatgtggaactgtcttggtgggtcaacggcaaagaggtgcacagcggcgtgtgtaccgacccccagccactgaaagaacagcccgccctgaacgacagccggtactgcctgagcagcagactgagagtgtccgccaccttctggcagaacccccggaaccacttcagatgccaggtgcagttctacggcctgagcgagaacgacgagtggacccaggacagagccaagcccgtgacccagatcgtgtctgccgaagcctggggcagagccgattgcgacgtgaagctggtggaaaagagcttcgagacagacaccaacctgaacttccagaacctgagcgtgatcggcttcagaatcctgctgctgaaagtggccggctttaacctgctgatgaccctgcggctgtggtccagc

SEQ ID NO: 4138 - DNA, 1872 bp, synthetic construct
  source 1..1872: mol_type = other DNA
atggccttaccagtgaccgccttgctcctgccgctggccttgctgctccacgccgccaggccggacatccagatgacccagagccccagcagcctgtctgccagcgtgggcgacagagtgaccatcacatgcaaggccagccaggacgtgggaatcgccgtggcctggtatcagcagaaacccggcaaggtgcccaagctgctgatctactgggccagcaccagacacaccggcgtgcccgatagattttccggcagcggctccggcaccgacttcaccctgacaatcagctccctccagcccgaggacgtggcaacctactactgccagcagtacagcagctacccctacaccttcggccagggcaccaaggtggaaatcaagagactcgagatccagaaccctgatcctgccgtgtaccagctgcgggatagcaagagcagcgacaagagcgtgtgtctgttcaccgacttcgacagccagaccaacgtgtcccagagcaaggactccgacgtgtacatcaccgataagtgcgtgctggacatgcggagcatggacttcaagagcaactccgccgtggcctggtccaacaagtccgatttcgcctgcgccaacgccttcaacaacagcattatccccgaggacacattcttcccaagccccgagagcagctgcggctttaccagcgagagctaccagcagggcgtgctgagcgccaccatcctgtacgagatcctgctgggcaaggccaccctgtacgccgtgctggtgtctgccctggtgctgatggctatggtcaagcggaaggacagccggggacgcgccaagagaagcggatctggcgtgaagcagaccctgaatttcgacctgctgaagctggctggcgacgtggaatccaacccaggccctactagtatggactggatttggcgcatccttttccttgtcggcgctgctaccggcgcgcattccttcgaagaagtgcaactggtggaatcaggcggcggactggtgcagcctggcggatctctgagactgagctgtgccgccagcggcttcgacttcagccggtactggatgagctgggtgcgccaggcccctggcaaaggactggaatggatcggcgagatcaaccccgacagcagcaccatcaactacgcccccagcctgaaggacaagttcatcatcagccgggacaacgccaagaacagcctgtacctccagatgaactccctgcgggccgaggacaccgccgtgtactattgcgccagacccgacggcaactactggtacttcgacgtgtggggccagggaaccctcgtgaccgtgtcatctacgcgtgaggacctgaagaacgtgttcccacctgaggtggccgtgttcgagcctagcgaggccgagatcagccacacccagaaagccaccctcgtgtgcctggctaccggcttctaccccgaccatgtggaactgtcttggtgggtcaacggcaaagaggtgcacagcggcgtgtgtaccgacccccagccactgaaagaacagcccgccctgaacgacagccggtactgcctgagcagcagactgagagtgtccgccaccttctggcagaacccccggaaccacttcagatgccaggtgcagttctacggcctgagcgagaacgacgagtggacccaggacagagccaagcccgtgacccagatcgtgtctgccgaagcctggggcagagccgattgcgacgtgaagctggtggaaaagagcttcgagacagacaccaacctgaacttccagaacctgagcgtgatcggcttcagaatcctgctgctgaaagtggccggctttaacctgctgatgaccctgcggctgtggtccagc

SEQ ID NO: 4139 - DNA, 1872 bp, synthetic construct
  source 1..1872: mol_type = other DNA
atggccttaccagtgaccgccttgctcctgccgctggccttgctgctccacgccgccaggccggacatcgtgatgacccagagccagaagagcatgagcaccagcgtgggcgacagagtgagcatcacctgcaaggccagccaggacgtgatcaccggcgtggcctggtaccagcagaagcccggccagagccccaagctgctgatctacagcgccagctacagatacaccggcgtgcccgacagattcaccggcagcggcagcggcaccgacttcaccttcaccatcagcaacgtgcaggccgaggacctggccgtgtactactgccagcagcactacagcacccccctgaccttcggcgccggcaccaagctggagctgaagctcgagatccagaaccctgatcctgccgtgtaccagctgcgggatagcaagagcagcgacaagagcgtgtgtctgttcaccgacttcgacagccagaccaacgtgtcccagagcaaggactccgacgtgtacatcaccgataagtgcgtgctggacatgcggagcatggacttcaagagcaactccgccgtggcctggtccaacaagtccgatttcgcctgcgccaacgccttcaacaacagcattatccccgaggacacattcttcccaagccccgagagcagctgcggctttaccagcgagagctaccagcagggcgtgctgagcgccaccatcctgtacgagatcctgctgggcaaggccaccctgtacgccgtgctggtgtctgccctggtgctgatggctatggtcaagcggaaggacagccggggacgcgccaagagaagcggatctggcgtgaagcagaccctgaatttcgacctgctgaagctggctggcgacgtggaatccaacccaggccctactagtatggactggatttggcgcatccttttccttgtcggcgctgctaccggcgcgcattccttcgaacaggtgcagctgcagcagcccggcgccgagctggtgagacccggcgccagcgtgaagctgagctgcaaggccagcggctacagcttcaccacctactggatgaactgggtgaagcagagacccggccagggcctggagtggatcggcatgatccaccccagcgacagcgagaccagactgaaccagaagttcaaggacaaggccaccctgaccgtggacaagagcagcagcaccgcctacatgcagctgagcagccccaccagcgaggacagcgccgtgtactactgcgccagaagcaccatgatcgccaccagagccatggactactggggccagggcaccagcgtgaccgtgagcagcacgcgtgaggacctgaagaacgtgttcccacctgaggtggccgtgttcgagcctagcgaggccgagatcagccacacccagaaagccaccctcgtgtgcctggctaccggcttctaccccgaccatgtggaactgtcttggtgggtcaacggcaaagaggtgcacagcggcgtgtgtaccgacccccagccactgaaagaacagcccgccctgaacgacagccggtactgcctgagcagcagactgagagtgtccgccaccttctggcagaacccccggaaccacttcagatgccaggtgcagttctacggcctgagcgagaacgacgagtggacccaggacagagccaagcccgtgacccagatcgtgtctgccgaagcctggggcagagccgattgcgacgtgaagctggtggaaaagagcttcgagacagacaccaacctgaacttccagaacctgagcgtgatcggcttcagaatcctgctgctgaaagtggccggctttaacctgctgatgaccctgcggctgtggtccagc

SEQ ID NO: 4140 - DNA, 1890 bp, synthetic construct
  source 1..1890: mol_type = other DNA
atggccttaccagtgaccgccttgctcctgccgctggccttgctgctccacgccgccaggccgcagagcgtgctgacacagcctccatccgtgtctggcgctccaggccagagagtgaccatctcctgtaccggcagcggcagcaacatcggagccccctacgacgtgtcctggtatcagcaactgcctggcaccgcccccaagctgctgatctaccacaacaacaagcggcccagcggcgtgcccgatagattcagcggctctaagagcggcaccagcgccagcctggctatcactggactccaggccgaggacgaggccgactactactgtgccacagtggaagccggcctgagcggctctgtgtttggcggcggaacaaagctgaccgtgctgggagctctcgagatccagaaccctgatcctgccgtgtaccagctgcgggatagcaagagcagcgacaagagcgtgtgtctgttcaccgacttcgacagccagaccaacgtgtcccagagcaaggactccgacgtgtacatcaccgataagtgcgtgctggacatgcggagcatggacttcaagagcaactccgccgtggcctggtccaacaagtccgatttcgcctgcgccaacgccttcaacaacagcattatccccgaggacacattcttcccaagccccgagagcagctgcggctttaccagcgagagctaccagcagggcgtgctgagcgccaccatcctgtacgagatcctgctgggcaaggccaccctgtacgccgtgctggtgtctgccctggtgctgatggctatggtcaagcggaaggacagccggggacgcgccaagagaagcggatctggcgtgaagcagaccctgaatttcgacctgctgaagctggctggcgacgtggaatccaacccaggccctactagtatggactggatttggcgcatccttttccttgtcggcgctgctaccggcgcgcattccttcgaacaggtgcaactggtgcagagcggagccgaagtgaagaaacctggggccagcgtgaaggtgtcctgcaaggtgtccggctacaccctgaccgagctgagcattcactgggtgcgccaggcccctggcaagggactggaatggatgggcggcttcgaccccgaagagaacgagatcgtgtacgcccagcggttccagggcagagtgacaatgaccgaggacaccagcaccgacaccgcctacatggaactgagcagcctgcggagcgaggataccgccgtgtactactgcgccatcgtgggcagcttcagccctctgacactgggcctgtggggccagggaactatggtcaccgtgtccagcacgcgtgaggacctgaagaacgtgttcccacctgaggtggccgtgttcgagcctagcgaggccgagatcagccacacccagaaagccaccctcgtgtgcctggctaccggcttctaccccgaccatgtggaactgtcttggtgggtcaacggcaaagaggtgcacagcggcgtgtgtaccgacccccagccactgaaagaacagcccgccctgaacgacagccggtactgcctgagcagcagactgagagtgtccgccaccttctggcagaacccccggaaccacttcagatgccaggtgcagttctacggcctgagcgagaacgacgagtggacccaggacagagccaagcccgtgacccagatcgtgtctgccgaagcctggggcagagccgattgcgacgtgaagctggtggaaaagagcttcgagacagacaccaacctgaacttccagaacctgagcgtgatcggcttcagaatcctgctgctgaaagtggccggctttaacctgctgatgaccctgcggctgtggtccagc

SEQ ID NO: 4141 - DNA, 1890 bp, synthetic construct
  source 1..1890: mol_type = other DNA
atggccttaccagtgaccgccttgctcctgccgctggccttgctgctccacgccgccaggccgcagagcgtgctgacacagcctccatccgtgtctggcgctccaggccagagagtgaccatctcctgtaccggcagcggcagcaacatcggagccccctacgacgtgtcctggtatcagcaactgcctggcaccgcccccaagctgctgatctaccacaacaacaagcggcccagcggcgtgcccgatagattcagcggctctaagagcggcaccagcgccagcctggctatcactggactccaggccgaggacgaggccgactactactgccagagctacgacagcagcagcatcagcaccatcttcggcggaggcaccaagctgacagtgctgggagctctcgagatccagaaccctgatcctgccgtgtaccagctgcgggatagcaagagcagcgacaagagcgtgtgtctgttcaccgacttcgacagccagaccaacgtgtcccagagcaaggactccgacgtgtacatcaccgataagtgcgtgctggacatgcggagcatggacttcaagagcaactccgccgtggcctggtccaacaagtccgatttcgcctgcgccaacgccttcaacaacagcattatccccgaggacacattcttcccaagccccgagagcagctgcggctttaccagcgagagctaccagcagggcgtgctgagcgccaccatcctgtacgagatcctgctgggcaaggccaccctgtacgccgtgctggtgtctgccctggtgctgatggctatggtcaagcggaaggacagccggggacgcgccaagagaagcggatctggcgtgaagcagaccctgaatttcgacctgctgaagctggctggcgacgtggaatccaacccaggccctactagtatggactggatttggcgcatccttttccttgtcggcgctgctaccggcgcgcattccttcgaacaggtgcaactggtgcagagcggagccgaagtgaagaaacctggggccagcgtgaaggtgtcctgcaaggtgtccggctacaccctgaccgagctgagcattcactgggtgcgccaggcccctggcaagggactggaatggatgggcggcttcgaccccgaagagaacgagatcgtgtacgcccagcggttccagggcagagtgacaatgaccgaggacaccagcaccgacaccgcctacatggaactgagcagcctgcggagcgaggataccgccgtgtactactgtgccatcgtgggcagcttcagcggaatcgcctacagaccttggggccagggcacaatggtcaccgtgtctagcacgcgtgaggacctgaagaacgtgttcccacctgaggtggccgtgttcgagcctagcgaggccgagatcagccacacccagaaagccaccctcgtgtgcctggctaccggcttctaccccgaccatgtggaactgtcttggtgggtcaacggcaaagaggtgcacagcggcgtgtgtaccgacccccagccactgaaagaacagcccgccctgaacgacagccggtactgcctgagcagcagactgagagtgtccgccaccttctggcagaacccccggaaccacttcagatgccaggtgcagttctacggcctgagcgagaacgacgagtggacccaggacagagccaagcccgtgacccagatcgtgtctgccgaagcctggggcagagccgattgcgacgtgaagctggtggaaaagagcttcgagacagacaccaacctgaacttccagaacctgagcgtgatcggcttcagaatcctgctgctgaaagtggccggctttaacctgctgatgaccctgcggctgtggtccagc

SEQ ID NO: 4142 - DNA, 1854 bp, synthetic construct
  source 1..1854: mol_type = other DNA
atggccttaccagtgaccgccttgctcctgccgctggccttgctgctccacgccgccaggccggacatccagatgacccagagccccagcagcctgtctgccagcgtgggcgacagagtgaccatcacctgtagagccagccagggcatcagaaacaacctggcctggtatcagcagaagcccggcaaggcccccaagcggctgatctacgccgccagcaatctccagagcggcgtgcccagcagattcacaggctctggcagcggcaccgagttcaccctgatcgtgtctagcctccagcccgaggacttcgccacctactactgcctccagcaccacagctaccccctgacatctggcggaggcaccaaggtggaactcgagatccagaaccctgatcctgccgtgtaccagctgcgggatagcaagagcagcgacaagagcgtgtgtctgttcaccgacttcgacagccagaccaacgtgtcccagagcaaggactccgacgtgtacatcaccgataagtgcgtgctggacatgcggagcatggacttcaagagcaactccgccgtggcctggtccaacaagtccgatttcgcctgcgccaacgccttcaacaacagcattatccccgaggacacattcttcccaagccccgagagcagctgcggctttaccagcgagagctaccagcagggcgtgctgagcgccaccatcctgtacgagatcctgctgggcaaggccaccctgtacgccgtgctggtgtctgccctggtgctgatggctatggtcaagcggaaggacagccggggacgcgccaagagaagcggatctggcgtgaagcagaccctgaatttcgacctgctgaagctggctggcgacgtggaatccaacccaggccctactagtatggactggatttggcgcatccttttccttgtcggcgctgctaccggcgcgcattccttcgaagaggtgcaggtgctggaaagtggcggaggactggtgcagcctggcggctctctgagactgtcttgtgccgccagcggcttcaccttcagcagctacgccatgagctgggtgcgccaggcccctggaaaaggactggaatgggtgtccgccatcagcggctctggcgggtctaccaactacgccgatagcgtgaagggccggttcaccatcagccgggacaacagcaagaacaccctgtacctccagatgaacagcctgcgggccgaggacaccgccgtgtattattgtgccggcagcagcgggtggagcgagtattggggacagggcaccctcgtgaccgtgtcctctacgcgtgaggacctgaagaacgtgttcccacctgaggtggccgtgttcgagcctagcgaggccgagatcagccacacccagaaagccaccctcgtgtgcctggctaccggcttctaccccgaccatgtggaactgtcttggtgggtcaacggcaaagaggtgcacagcggcgtgtgtaccgacccccagccactgaaagaacagcccgccctgaacgacagccggtactgcctgagcagcagactgagagtgtccgccaccttctggcagaacccccggaaccacttcagatgccaggtgcagttctacggcctgagcgagaacgacgagtggacccaggacagagccaagcccgtgacccagatcgtgtctgccgaagcctggggcagagccgattgcgacgtgaagctggtggaaaagagcttcgagacagacaccaacctgaacttccagaacctgagcgtgatcggcttcagaatcctgctgctgaaagtggccggctttaacctgctgatgaccctgcggctgtggtccagc

SEQ ID NO: 4143 - DNA, 1872 bp, synthetic construct
  source 1..1872: mol_type = other DNA
atggccttaccagtgaccgccttgctcctgccgctggccttgctgctccacgccgccaggccggacgagatccagctggtgcagagcggagccgaagtgaagaagcctggcgagagcctgcggatcagctgcaagggcagcggcttcaacatcgaggactactacatccactgggtgcgccagatgcccggcaagggcctggaatggatgggcagaatcgaccccgagaacgacgagactaagtacggccccatcttccagggccacgtgaccatcagcgccgacaccagcatcaacaccgtgtacctccagtggtccagcctgaaggccagcgacaccgccatgtactactgcgcctttagaggcggcgtgtactggggccagggcaccacagtgacagtgtctagcctcgagatccagaaccctgatcctgccgtgtaccagctgcgggatagcaagagcagcgacaagagcgtgtgtctgttcaccgacttcgacagccagaccaacgtgtcccagagcaaggactccgacgtgtacatcaccgataagtgcgtgctggacatgcggagcatggacttcaagagcaactccgccgtggcctggtccaacaagtccgatttcgcctgcgccaacgccttcaacaacagcattatccccgaggacacattcttcccaagccccgagagcagctgcggctttaccagcgagagctaccagcagggcgtgctgagcgccaccatcctgtacgagatcctgctgggcaaggccaccctgtacgccgtgctggtgtctgccctggtgctgatggctatggtcaagcggaaggacagccggggacgcgccaagagaagcggatctggcgtgaagcagaccctgaatttcgacctgctgaagctggctggcgacgtggaatccaacccaggccctactagtatggactggatttggcgcatccttttccttgtcggcgctgctaccggcgcgcattccttcgaagatgtcgtgatgacccagagccccgacagcctggctgtgtctctgggagagagagccaccatcaactgcaagtccagccagtccctgctggacagcgacggcaagacctacctgaactggctccagcagaagcccggccagccccccaagagactgatctccctggtgtccaagctggactccggcgtgcccgatagattttccggctctggcagcggcaccgacttcaccctgacaatcagctcccttcaggccgaggacgtggccgtgtactattgctggcagggcacacacttccccggcacctttggcggaggcaccaaggtggaaatcaagacgcgtgaggacctgaagaacgtgttcccacctgaggtggccgtgttcgagcctagcgaggccgagatcagccacacccagaaagccaccctcgtgtgcctggctaccggcttctaccccgaccatgtggaactgtcttggtgggtcaacggcaaagaggtgcacagcggcgtgtgtaccgacccccagccactgaaagaacagcccgccctgaacgacagccggtactgcctgagcagcagactgagagtgtccgccaccttctggcagaacccccggaaccacttcagatgccaggtgcagttctacggcctgagcgagaacgacgagtggacccaggacagagccaagcccgtgacccagatcgtgtctgccgaagcctggggcagagccgattgcgacgtgaagctggtggaaaagagcttcgagacagacaccaacctgaacttccagaacctgagcgtgatcggcttcagaatcctgctgctgaaagtggccggctttaacctgctgatgaccctgcggctgtggtccagc

SEQ ID NO: 4144 - DNA, 1893 bp, synthetic construct
  source 1..1893: mol_type = other DNA
atggccttaccagtgaccgccttgctcctgccgctggccttgctgctccacgccgccaggccggacgagcttgtgatgacccagagccccagcagcctgacagtgacagccggcgagaaagtgaccatgagctgcaagagcagccagagcctgctgaacagcggcaaccagaagaactacctgacctggtatcagcagaagcccggccagccccccaagctgctgatctactgggccagcaccagagaaagcggcgtgcccgatagattcaccggctctggcagcggcaccgacttcaccctgacaatcagcagcgtgcaggccgaggacctggccgtgtactactgccagaacgactacagctaccccctgaccttcggagccggcaccaagctggaaatcaagctcgagatccagaaccctgatcctgccgtgtaccagctgcgggatagcaagagcagcgacaagagcgtgtgtctgttcaccgacttcgacagccagaccaacgtgtcccagagcaaggactccgacgtgtacatcaccgataagtgcgtgctggacatgcggagcatggacttcaagagcaactccgccgtggcctggtccaacaagtccgatttcgcctgcgccaacgccttcaacaacagcattatccccgaggacacattcttcccaagccccgagagcagctgcggctttaccagcgagagctaccagcagggcgtgctgagcgccaccatcctgtacgagatcctgctgggcaaggccaccctgtacgccgtgctggtgtctgccctggtgctgatggctatggtcaagcggaaggacagccggggacgcgccaagagaagcggatctggcgtgaagcagaccctgaatttcgacctgctgaagctggctggcgacgtggaatccaacccaggccctactagtatggactggatttggcgcatccttttccttgtcggcgctgctaccggcgcgcattccttcgaagaagtgcagctgctggaacagtctggcgccgaacttgtgcggcctggcaccagcgtgaagatcagctgtaaagccagcggctacgccttcaccaactactggctgggctgggtcaagcagaggcctggacacggcctggaatggatcggcgacatctttcccggctccggcaacatccactacaacgagaagttcaagggcaaggccaccctgaccgccgacaagtctagcagcaccgcctacatgcagctgtccagcctgacctttgaggacagcgccgtgtatttctgtgcccggctgcggaactgggacgagcccatggattattggggccagggcaccaccgtgaccgtgtctagtacgcgtgaggacctgaagaacgtgttcccacctgaggtggccgtgttcgagcctagcgaggccgagatcagccacacccagaaagccaccctcgtgtgcctggctaccggcttctaccccgaccatgtggaactgtcttggtgggtcaacggcaaagaggtgcacagcggcgtgtgtaccgacccccagccactgaaagaacagcccgccctgaacgacagccggtactgcctgagcagcagactgagagtgtccgccaccttctggcagaacccccggaaccacttcagatgccaggtgcagttctacggcctgagcgagaacgacgagtggacccaggacagagccaagcccgtgacccagatcgtgtctgccgaagcctggggcagagccgattgcgacgtgaagctggtggaaaagagcttcgagacagacaccaacctgaacttccagaacctgagcgtgatcggcttcagaatcctgctgctgaaagtggccggctttaacctgctgatgaccctgcggctgtggtccagc

SEQ ID NO: 4145 - DNA, 1896 bp, synthetic construct
  source 1..1896: mol_type = other DNA
atggccttaccagtgaccgccttgctcctgccgctggccttgctgctccacgccgccaggccggacgagctgcagatgacccagagccctagcagcctgtctgccagcgtgggcgacagagtgaccatcacctgtagagccagccagagcatcagcagctacctgaactggtatcagcagaagcccggccagccccccaaactgctgatctactgggccagcaccagagaaagcggcgtgcccgatagattcagcggcagcgagagcggcaccaactacaccctgaccatcagctccctgcagcccgaggacttcgccacctacttttgccagcagagcgacagcctgcccatcacctttggacagggcacccggctggacattcagctcgagatccagaaccctgatcctgccgtgtaccagctgcgggatagcaagagcagcgacaagagcgtgtgtctgttcaccgacttcgacagccagaccaacgtgtcccagagcaaggactccgacgtgtacatcaccgataagtgcgtgctggacatgcggagcatggacttcaagagcaactccgccgtggcctggtccaacaagtccgatttcgcctgcgccaacgccttcaacaacagcattatccccgaggacacattcttcccaagccccgagagcagctgcggctttaccagcgagagctaccagcagggcgtgctgagcgccaccatcctgtacgagatcctgctgggcaaggccaccctgtacgccgtgctggtgtctgccctggtgctgatggctatggtcaagcggaaggacagccggggacgcgccaagagaagcggatctggcgtgaagcagaccctgaatttcgacctgctgaagctggctggcgacgtggaatccaacccaggccctactagtatggactggatttggcgcatccttttccttgtcggcgctgctaccggcgcgcattccttcgaagaggtgcaactgctggaatctgggggcggagtggtgcagcctggcagaagcctgagactgagctgtgccgccagcggcttcaccttcagctcctacggaatgcactgggtgcgccaggcccctggcaaaggactggaatgggtggccgtgatctcctacgacggcagcaacaagtactacgccgacagcgtgaagggccggttcaccatcagccgggacaacagcaagaacaccctgtacctgcagatgaacagcctgcgggccgaggacaccgccgtgtactactgcgccaaggatatgggctggggcagcggctggcggccttactactactacggcatggacgtgtggggccagggcaccaccgtgacagtgtcatctacgcgtgaggacctgaagaacgtgttcccacctgaggtggccgtgttcgagcctagcgaggccgagatcagccacacccagaaagccaccctcgtgtgcctggctaccggcttctaccccgaccatgtggaactgtcttggtgggtcaacggcaaagaggtgcacagcggcgtgtgtaccgacccccagccactgaaagaacagcccgccctgaacgacagccggtactgcctgagcagcagactgagagtgtccgccaccttctggcagaacccccggaaccacttcagatgccaggtgcagttctacggcctgagcgagaacgacgagtggacccaggacagagccaagcccgtgacccagatcgtgtctgccgaagcctggggcagagccgattgcgacgtgaagctggtggaaaagagcttcgagacagacaccaacctgaacttccagaacctgagcgtgatcggcttcagaatcctgctgctgaaagtggccggctttaacctgctgatgaccctgcggctgtggtccagc

SEQ ID NO: 4146 - DNA, 1887 bp, synthetic construct
  source 1..1887: mol_type = other DNA
atggccttaccagtgaccgccttgctcctgccgctggccttgctgctccacgccgccaggccggacgacatccaaatgacacagagtccttctagtttgagtgcgagcgtgggggacagggtgaccattacctgcagggccagccagagcataagctcataccttaattggtaccagcaaaaaccaggtaaggcccctaagctcctgatctacgcggcctcttcacttcaatctggggtcccttcccgcttcagtggctccggcagcggcaccgacttcacgctcactatatcaagtctgcagcctgaggatctcgccacctattactgtcaacaaagttattccacccctttcacctttggaccgggcacgaaagtggatattaagctcgagatccagaaccctgatcctgccgtgtaccagctgcgggatagcaagagcagcgacaagagcgtgtgtctgttcaccgacttcgacagccagaccaacgtgtcccagagcaaggactccgacgtgtacatcaccgataagtgcgtgctggacatgcggagcatggacttcaagagcaactccgccgtggcctggtccaacaagtccgatttcgcctgcgccaacgccttcaacaacagcattatccccgaggacacattcttcccaagccccgagagcagctgcggctttaccagcgagagctaccagcagggcgtgctgagcgccaccatcctgtacgagatcctgctgggcaaggccaccctgtacgccgtgctggtgtctgccctggtgctgatggctatggtcaagcggaaggacagccggggacgcgccaagagaagcggatctggcgtgaagcagaccctgaatttcgacctgctgaagctggctggcgacgtggaatccaacccaggccctactagtatggactggatttggcgcatccttttccttgtcggcgctgctaccggcgcgcattccttcgaagtgcacgaggtccagcttgtgcagtccggggcagaggtcaagaagcctggttctagcgtaaaagtgagttgcaaagcctcaggtgggacattttcatcctacgcgatcagttgggttagacaggctcctggtcaagggctggaatggatgggcggaattattccaatcttcggaacagcgaattacgcgcagaagttccagggtagagtaaccatcactgctgacaagtccacctccaccgcatacatggaattgtctagtctccggagcgaggatacggcggtgtattattgtgctacgttcgccctgtttggcttccgcgaacaggctttcgacatctgggggcagggcacgacagtcacggttagtagtacgcgtgaggacctgaagaacgtgttcccacctgaggtggccgtgttcgagcctagcgaggccgagatcagccacacccagaaagccaccctcgtgtgcctggctaccggcttctaccccgaccatgtggaactgtcttggtgggtcaacggcaaagaggtgcacagcggcgtgtgtaccgacccccagccactgaaagaacagcccgccctgaacgacagccggtactgcctgagcagcagactgagagtgtccgccaccttctggcagaacccccggaaccacttcagatgccaggtgcagttctacggcctgagcgagaacgacgagtggacccaggacagagccaagcccgtgacccagatcgtgtctgccgaagcctggggcagagccgattgcgacgtgaagctggtggaaaagagcttcgagacagacaccaacctgaacttccagaacctgagcgtgatcggcttcagaatcctgctgctgaaagtggccggctttaacctgctgatgaccctgcggctgtggtccagc

SEQ ID NO: 4147 - DNA, 1881 bp, synthetic construct
  source 1..1881: mol_type = other DNA
atggccttaccagtgaccgccttgctcctgccgctggccttgctgctccacgccgccaggccggacatcgtgctgacccagagccctctgagcctggccgtgtctctgggacagcctgccatcatcagctgcaaggccagccagagcgtgtcctttgccggcacctctctgatgcactggtatcaccagaagcccggccagcagcccagactgctgatctacagagccagcaacctggaagccggcgtgcccgatagattttccggcagcggcagcaagaccgacttcaccctgaccatcagccccgtggaagccgaagatgccgccacctactactgccagcagagcagagagtacccctacaccttcggcggaggcaccaagctggaaatcaagaggctcgagatccagaaccctgatcctgccgtgtaccagctgcgggatagcaagagcagcgacaagagcgtgtgtctgttcaccgacttcgacagccagaccaacgtgtcccagagcaaggactccgacgtgtacatcaccgataagtgcgtgctggacatgcggagcatggacttcaagagcaactccgccgtggcctggtccaacaagtccgatttcgcctgcgccaacgccttcaacaacagcattatccccgaggacacattcttcccaagccccgagagcagctgcggctttaccagcgagagctaccagcagggcgtgctgagcgccaccatcctgtacgagatcctgctgggcaaggccaccctgtacgccgtgctggtgtctgccctggtgctgatggctatggtcaagcggaaggacagccggggacgcgccaagagaagcggatctggcgtgaagcagaccctgaatttcgacctgctgaagctggctggcgacgtggaatccaacccaggccctactagtatggactggatttggcgcatccttttccttgtcggcgctgctaccggcgcgcattccttcgaacaggtccaactggtgcagagcggagccgaggtcgtgaagcctggcgcttccgtgaagattagctgcaaagccagcggctacacctttaccggctactttatgaactgggtcaagcagagccctggccagagcctggaatggatcggcagaatccacccctacgacggcgacaccttctacaaccagaagttccagggcaaggccaccctgacagtggacaagagcagcaacaccgcccacatggaactgctgagcctgaccagcgaggacttcgccgtgtactactgcaccagatacgacggcagccgggctatggactattggggccagggcaccaccgtgaccgtgtctagtacgcgtgaggacctgaagaacgtgttcccacctgaggtggccgtgttcgagcctagcgaggccgagatcagccacacccagaaagccaccctcgtgtgcctggctaccggcttctaccccgaccatgtggaactgtcttggtgggtcaacggcaaagaggtgcacagcggcgtgtgtaccgacccccagccactgaaagaacagcccgccctgaacgacagccggtactgcctgagcagcagactgagagtgtccgccaccttctggcagaacccccggaaccacttcagatgccaggtgcagttctacggcctgagcgagaacgacgagtggacccaggacagagccaagcccgtgacccagatcgtgtctgccgaagcctggggcagagccgattgcgacgtgaagctggtggaaaagagcttcgagacagacaccaacctgaacttccagaacctgagcgtgatcggcttcagaatcctgctgctgaaagtggccggctttaacctgctgatgaccctgcggctgtggtccagc

SEQ ID NO: 4148 - DNA, 1872 bp, synthetic construct
  source 1..1872: mol_type = other DNA
atggccttaccagtgaccgccttgctcctgccgctggccttgctgctccacgccgccaggccggacgacgttgtgatgacccagacccccctgagcctgcctgtgacacctggcgaacctgccagcatcagctgtcggagcagccagagcctggtgcacagaaacggcaacacctacctgcactggtatctccagaagcccggccagagccccaagctgctgatccacaaggtgtccaacagattcagcggcgtgcccgacagattctccggcagcggctctggcaccgacttcaccctgaagatcagccgggtggaagccgaggacctgggcgtgtacttctgtagccagagcacccatgtgccccccctgacatttggagccggcaccaagctggaactgaagctcgagatccagaaccctgatcctgccgtgtaccagctgcgggatagcaagagcagcgacaagagcgtgtgtctgttcaccgacttcgacagccagaccaacgtgtcccagagcaaggactccgacgtgtacatcaccgataagtgcgtgctggacatgcggagcatggacttcaagagcaactccgccgtggcctggtccaacaagtccgatttcgcctgcgccaacgccttcaacaacagcattatccccgaggacacattcttcccaagccccgagagcagctgcggctttaccagcgagagctaccagcagggcgtgctgagcgccaccatcctgtacgagatcctgctgggcaaggccaccctgtacgccgtgctggtgtctgccctggtgctgatggctatggtcaagcggaaggacagccggggacgcgccaagagaagcggatctggcgtgaagcagaccctgaatttcgacctgctgaagctggctggcgacgtggaatccaacccaggccctactagtatggactggatttggcgcatccttttccttgtcggcgctgctaccggcgcgcattccttcgaagaagtgcagctggtgcagtctggcgctgaggtggaaaagcctggggccagcgtgaagattagctgcaaggccagcggcagcagcttcaccggctacaacatgaactgggtgcgccagaacatcggcaagagcctggaatggatcggagccatcgacccctactacggcggcaccagctacaaccagaagttcaagggcagagccaccctgaccgtggacaagagcaccagcaccgcctacatgcacctgaagtccctgcggagcgaggacaccgccgtgtactactgtgtgtccggcatggaatattggggccagggcaccagcgtgaccgtgtctagtacgcgtgaggacctgaagaacgtgttcccacctgaggtggccgtgttcgagcctagcgaggccgagatcagccacacccagaaagccaccctcgtgtgcctggctaccggcttctaccccgaccatgtggaactgtcttggtgggtcaacggcaaagaggtgcacagcggcgtgtgtaccgacccccagccactgaaagaacagcccgccctgaacgacagccggtactgcctgagcagcagactgagagtgtccgccaccttctggcagaacccccggaaccacttcagatgccaggtgcagttctacggcctgagcgagaacgacgagtggacccaggacagagccaagcccgtgacccagatcgtgtctgccgaagcctggggcagagccgattgcgacgtgaagctggtggaaaagagcttcgagacagacaccaacctgaacttccagaacctgagcgtgatcggcttcagaatcctgctgctgaaagtggccggctttaacctgctgatgaccctgcggctgtggtccagc

SEQ ID NO: 4149 - DNA, 1866 bp, synthetic construct
  source 1..1866: mol_type = other DNA
atggccttaccagtgaccgccttgctcctgccgctggccttgctgctccacgccgccaggccggacgagatcgtgatgacccagacccctgccaccctgtctgtgtctgccggcgagagagtgaccattacctgcaaggccagccagagcgtgtccaacgacgtgacctggtatcagcagaagcccggccaggcccccagactgctgatctacagcgccagcaacagatacagcggcgtgcccgccagattttccggcagcggctacggcaccgagttcaccttcaccatcagcagcgtgcagagcgaggacttcgccgtgtacttctgtcagcaagactacagcagcttcggccagggcaccaagctggaaatcaagaggctcgagatccagaaccctgatcctgccgtgtaccagctgcgggatagcaagagcagcgacaagagcgtgtgtctgttcaccgacttcgacagccagaccaacgtgtcccagagcaaggactccgacgtgtacatcaccgataagtgcgtgctggacatgcggagcatggacttcaagagcaactccgccgtggcctggtccaacaagtccgatttcgcctgcgccaacgccttcaacaacagcattatccccgaggacacattcttcccaagccccgagagcagctgcggctttaccagcgagagctaccagcagggcgtgctgagcgccaccatcctgtacgagatcctgctgggcaaggccaccctgtacgccgtgctggtgtctgccctggtgctgatggctatggtcaagcggaaggacagccggggacgcgccaagagaagcggatctggcgtgaagcagaccctgaatttcgacctgctgaagctggctggcgacgtggaatccaacccaggccctactagtatggactggatttggcgcatccttttccttgtcggcgctgctaccggcgcgcattccttcgaacaggtgcagctggtggaatctggacctggcgtggtgcagcctggcagaagcctgagaatcagctgtgccgtgtccggcttcagcgtgaccaactacggcgtgcactgggtgcgccagccacctggaaaaggactggaatggctgggcgtgatctgggctggcggcatcaccaactacaacagcgccttcatgtcccggctgaccatctccaaggacaacagcaagaacaccgtgtacctccagatgaacagcctgcgggccgaggacaccgccatgtactactgtgcttccagaggcggccactacggctacgccctggattattggggccagggaaccctcgtgaccgtgtcctctacgcgtgaggacctgaagaacgtgttcccacctgaggtggccgtgttcgagcctagcgaggccgagatcagccacacccagaaagccaccctcgtgtgcctggctaccggcttctaccccgaccatgtggaactgtcttggtgggtcaacggcaaagaggtgcacagcggcgtgtgtaccgacccccagccactgaaagaacagcccgccctgaacgacagccggtactgcctgagcagcagactgagagtgtccgccaccttctggcagaacccccggaaccacttcagatgccaggtgcagttctacggcctgagcgagaacgacgagtggacccaggacagagccaagcccgtgacccagatcgtgtctgccgaagcctggggcagagccgattgcgacgtgaagctggtggaaaagagcttcgagacagacaccaacctgaacttccagaacctgagcgtgatcggcttcagaatcctgctgctgaaagtggccggctttaacctgctgatgaccctgcggctgtggtccagc

SEQ ID NO: 4150 - DNA, 1872 bp, synthetic construct
  source 1..1872: mol_type = other DNA
atggccttaccagtgaccgccttgctcctgccgctggccttgctgctccacgccgccaggccggacatccagatgacccagaccgccagcagcctgcctgcctctctgggcgacagagtgaccatctcctgtagcgccagccaggacatcagcaactacctgaactggtatcagcagaaacccgacggcaccgtgaagctgctgatcttctacagcagcaacctgcacagcggcgtgcccagcagattttctggcggcggaagcggcaccgactacagcctgaccatcagcaatctggaacccgaggacattgccacctacttttgccaccagtacagcaagctgccctggacctttggcggaggcaccaagctggaaatcaagagactcgagatccagaaccctgatcctgccgtgtaccagctgcgggatagcaagagcagcgacaagagcgtgtgtctgttcaccgacttcgacagccagaccaacgtgtcccagagcaaggactccgacgtgtacatcaccgataagtgcgtgctggacatgcggagcatggacttcaagagcaactccgccgtggcctggtccaacaagtccgatttcgcctgcgccaacgccttcaacaacagcattatccccgaggacacattcttcccaagccccgagagcagctgcggctttaccagcgagagctaccagcagggcgtgctgagcgccaccatcctgtacgagatcctgctgggcaaggccaccctgtacgccgtgctggtgtctgccctggtgctgatggctatggtcaagcggaaggacagccggggacgcgccaagagaagcggatctggcgtgaagcagaccctgaatttcgacctgctgaagctggctggcgacgtggaatccaacccaggccctactagtatggactggatttggcgcatccttttccttgtcggcgctgctaccggcgcgcattccttcgaagaagtgaccctggtggaaagcggcggagacttcgtgaagcctggcggctctctgaaggtgtcctgtgccgccagcggcttcgcctttagccactacgccatgagctgggtgcgccagacccctgccaagagactggaatgggtggcctacatcagcagcggcggctccggcacctactactccgatagcgtgaagggccggttcaccatcagccgggacaacgccaagaacaccctgtacctccagatgcggagcctgcggagcgaggacagcgccatgtatttctgcaccagagtgaagctgggcacctattacttcgactcttggggccagggcaccaccctgaccgtgtcatctacgcgtgaggacctgaagaacgtgttcccacctgaggtggccgtgttcgagcctagcgaggccgagatcagccacacccagaaagccaccctcgtgtgcctggctaccggcttctaccccgaccatgtggaactgtcttggtgggtcaacggcaaagaggtgcacagcggcgtgtgtaccgacccccagccactgaaagaacagcccgccctgaacgacagccggtactgcctgagcagcagactgagagtgtccgccaccttctggcagaacccccggaaccacttcagatgccaggtgcagttctacggcctgagcgagaacgacgagtggacccaggacagagccaagcccgtgacccagatcgtgtctgccgaagcctggggcagagccgattgcgacgtgaagctggtggaaaagagcttcgagacagacaccaacctgaacttccagaacctgagcgtgatcggcttcagaatcctgctgctgaaagtggccggctttaacctgctgatgaccctgcggctgtggtccagc

SEQ ID NO: 4151 - DNA, 1878 bp, synthetic construct
  source 1..1878: mol_type = other DNA
atggccttaccagtgaccgccttgctcctgccgctggccttgctgctccacgccgccaggccgcagttcgtgctgacccagagcccttctgcctctgctgccctgggagcctctgccaagctgacctgtacactgagcagcgcccacaagacctacaccatcgactggtatcagcagcagaagggaaaggcccccagatacctgatccaagtgaagtccgacggcacctacacaaaggccaccggcgtgcccgatagattcagcggcagtagcagcggagccgatagatacctgattatccccagcgtgcaggccgacgacgaggccgattactactgcggcaccgattacaccggcggctacgtgttcggcggaggcacacaactgaccgtgacactcgagatccagaaccctgatcctgccgtgtaccagctgcgggatagcaagagcagcgacaagagcgtgtgtctgttcaccgacttcgacagccagaccaacgtgtcccagagcaaggactccgacgtgtacatcaccgataagtgcgtgctggacatgcggagcatggacttcaagagcaactccgccgtggcctggtccaacaagtccgatttcgcctgcgccaacgccttcaacaacagcattatccccgaggacacattcttcccaagccccgagagcagctgcggctttaccagcgagagctaccagcagggcgtgctgagcgccaccatcctgtacgagatcctgctgggcaaggccaccctgtacgccgtgctggtgtctgccctggtgctgatggctatggtcaagcggaaggacagccggggacgcgccaagagaagcggatctggcgtgaagcagaccctgaatttcgacctgctgaagctggctggcgacgtggaatccaacccaggccctactagtatggactggatttggcgcatccttttccttgtcggcgctgctaccggcgcgcattccttcgaagagcaactgaaagagtctggcggcggactgttcaagcccaccgataccctgaccctgacctgcaccgtgtccggcttcagcctgagctactacggcgtgaactgggtgcgccaggcccctggcaatggcctggaatggatcggcacaatcggcggcagcggcgacacctactatgcctcttgggccaagtccagaagcaccatcatcagaaacaccaacgagaacaccgtgaccctgaagatgaccagcctgacagccgccgacaccgccacctacttttgcgtcagatacgccaacatcggctacgagtatttcaacgtgtggggacccggcaccctcgtgaccgtgtcatctacgcgtgaggacctgaagaacgtgttcccacctgaggtggccgtgttcgagcctagcgaggccgagatcagccacacccagaaagccaccctcgtgtgcctggctaccggcttctaccccgaccatgtggaactgtcttggtgggtcaacggcaaagaggtgcacagcggcgtgtgtaccgacccccagccactgaaagaacagcccgccctgaacgacagccggtactgcctgagcagcagactgagagtgtccgccaccttctggcagaacccccggaaccacttcagatgccaggtgcagttctacggcctgagcgagaacgacgagtggacccaggacagagccaagcccgtgacccagatcgtgtctgccgaagcctggggcagagccgattgcgacgtgaagctggtggaaaagagcttcgagacagacaccaacctgaacttccagaacctgagcgtgatcggcttcagaatcctgctgctgaaagtggccggctttaacctgctgatgaccctgcggctgtggtccagc

SEQ ID NO: 4152 - DNA, 1893 bp, synthetic construct
  source 1..1893: mol_type = other DNA
atggccttaccagtgaccgccttgctcctgccgctggccttgctgctccacgccgccaggccgcagttcgtgctgacccagagcccttctgtgtctgccgccctgggagcctctgccaagctgacctgtacactgagcagcgcccacaagacctacaccatcgactggtatcagcagcagcagggcgaggcccccagatacctgatgcaagtgaagtccgacggcagctacaccaagggcaccggcgtgcccgatagattcagcggcagtagcagcggagccgatagatacctgattatccccagcgtgcaggccgacgacgaggccggatatgtgtgcggcgctgacgacaatggcggctacgtgttcggcggaggcacccaactgacagtgacactcgagatccagaaccctgatcctgccgtgtaccagctgcgggatagcaagagcagcgacaagagcgtgtgtctgttcaccgacttcgacagccagaccaacgtgtcccagagcaaggactccgacgtgtacatcaccgataagtgcgtgctggacatgcggagcatggacttcaagagcaactccgccgtggcctggtccaacaagtccgatttcgcctgcgccaacgccttcaacaacagcattatccccgaggacacattcttcccaagccccgagagcagctgcggctttaccagcgagagctaccagcagggcgtgctgagcgccaccatcctgtacgagatcctgctgggcaaggccaccctgtacgccgtgctggtgtctgccctggtgctgatggctatggtcaagcggaaggacagccggggacgcgccaagagaagcggatctggcgtgaagcagaccctgaatttcgacctgctgaagctggctggcgacgtggaatccaacccaggccctactagtatggactggatttggcgcatccttttccttgtcggcgctgctaccggcgcgcattccttcgaacagagcgtgaaagagtctgagggcggcctgttcaagcccaccgataccctgaccctgacctgcaccgtgtccggcttcagcctgagcagacacgccctgacatgggtgcgccaggcccctggaaatggcctggaatggatcggagccatcgacaacgccggcaccacctactatgcctcttgggccaagtccagaagcaccatcacccggaacaccgacctgcacaccgtgaccctgaagatgaccagcctgaccgccagcgacaccgccacctacttttgcgccagagtgttctacgacatcaacagcggctactacctggacggcatggacctgtggggacctggcacacttgtgaccgtgtccagcacgcgtgaggacctgaagaacgtgttcccacctgaggtggccgtgttcgagcctagcgaggccgagatcagccacacccagaaagccaccctcgtgtgcctggctaccggcttctaccccgaccatgtggaactgtcttggtgggtcaacggcaaagaggtgcacagcggcgtgtgtaccgacccccagccactgaaagaacagcccgccctgaacgacagccggtactgcctgagcagcagactgagagtgtccgccaccttctggcagaacccccggaaccacttcagatgccaggtgcagttctacggcctgagcgagaacgacgagtggacccaggacagagccaagcccgtgacccagatcgtgtctgccgaagcctggggcagagccgattgcgacgtgaagctggtggaaaagagcttcgagacagacaccaacctgaacttccagaacctgagcgtgatcggcttcagaatcctgctgctgaaagtggccggctttaacctgctgatgaccctgcggctgtggtccagc

SEQ ID NO: 4153 - DNA, 1875 bp, synthetic construct
  source 1..1875: mol_type = other DNA
atggccttaccagtgaccgccttgctcctgccgctggccttgctgctccacgccgccaggccggacatccagatgacccagagccccagcagcctgtctgccagcgtgggcgacagagtgaccatcacctgtagagccagccagggcatcagctcttggctggcctggtatcagcagaagcccgagaaggcccccaagagcctgatctacgccgcctctagtctccagagcggcgtgcccagcagattttctggcagcggctccggcaccgacttcaccctgacaatcagctccctccagcccgaggacttcgccacctactactgccagcagtacaacagctacccccccacctttggcggaggcaccaaggtggaaatcaagctcgagatccagaaccctgatcctgccgtgtaccagctgcgggatagcaagagcagcgacaagagcgtgtgtctgttcaccgacttcgacagccagaccaacgtgtcccagagcaaggactccgacgtgtacatcaccgataagtgcgtgctggacatgcggagcatggacttcaagagcaactccgccgtggcctggtccaacaagtccgatttcgcctgcgccaacgccttcaacaacagcattatccccgaggacacattcttcccaagccccgagagcagctgcggctttaccagcgagagctaccagcagggcgtgctgagcgccaccatcctgtacgagatcctgctgggcaaggccaccctgtacgccgtgctggtgtctgccctggtgctgatggctatggtcaagcggaaggacagccggggacgcgccaagagaagcggatctggcgtgaagcagaccctgaatttcgacctgctgaagctggctggcgacgtggaatccaacccaggccctactagtatggactggatttggcgcatccttttccttgtcggcgctgctaccggcgcgcattccttcgaagaagtgcaactggtggaatcaggcggcggactggtgcagcctggcgagtctctgagactgagctgtgtggcctccggcttcaccttcagccggtacaagatgaactgggtgcgccaggcccctggcaagggactggaatgggtgtcctacatcagccgcagcggcagagacatctactacgccgacagcgtgaagggccggttcaccatcagcagagacaacgccaagaacagcctgtacctccagatgaactccctgcgggacgaggacaccgccgtgtactactgtgccggaaccgtgaccacctattactacttcggcatggacgtgtggggccacggcaccaccgtgacagtgtcatctacgcgtgaggacctgaagaacgtgttcccacctgaggtggccgtgttcgagcctagcgaggccgagatcagccacacccagaaagccaccctcgtgtgcctggctaccggcttctaccccgaccatgtggaactgtcttggtgggtcaacggcaaagaggtgcacagcggcgtgtgtaccgacccccagccactgaaagaacagcccgccctgaacgacagccggtactgcctgagcagcagactgagagtgtccgccaccttctggcagaacccccggaaccacttcagatgccaggtgcagttctacggcctgagcgagaacgacgagtggacccaggacagagccaagcccgtgacccagatcgtgtctgccgaagcctggggcagagccgattgcgacgtgaagctggtggaaaagagcttcgagacagacaccaacctgaacttccagaacctgagcgtgatcggcttcagaatcctgctgctgaaagtggccggctttaacctgctgatgaccctgcggctgtggtccagc

SEQ ID NO: 4154 - DNA, 1878 bp, synthetic construct
  source 1..1878: mol_type = other DNA
atggccttaccagtgaccgccttgctcctgccgctggccttgctgctccacgccgccaggccggacatccagatgacccagagccccagcagcctgtctgccagcgtgggcgacagagtgaccatcacctgtagagccagccagggcatcagctcttggctggcctggtatcagcagaagcccgagaaggcccccaagagcctgatctacgccgcctctagtctccagagcggcgtgcccagcagattttctggcagcggctccggcaccgacttcaccctgacaatcagctccctccagcccgaggacttcgccacctactactgccagcagtacaacagctaccctcccacctttggcggaggcaccaaggtggaaatcaagctcgagatccagaaccctgatcctgccgtgtaccagctgcgggatagcaagagcagcgacaagagcgtgtgtctgttcaccgacttcgacagccagaccaacgtgtcccagagcaaggactccgacgtgtacatcaccgataagtgcgtgctggacatgcggagcatggacttcaagagcaactccgccgtggcctggtccaacaagtccgatttcgcctgcgccaacgccttcaacaacagcattatccccgaggacacattcttcccaagccccgagagcagctgcggctttaccagcgagagctaccagcagggcgtgctgagcgccaccatcctgtacgagatcctgctgggcaaggccaccctgtacgccgtgctggtgtctgccctggtgctgatggctatggtcaagcggaaggacagccggggacgcgccaagagaagcggatctggcgtgaagcagaccctgaatttcgacctgctgaagctggctggcgacgtggaatccaacccaggccctactagtatggactggatttggcgcatccttttccttgtcggcgctgctaccggcgcgcattccttcgaagaagtgcaactggtggaatccgggggaggctctgtgcagcctggcgagtctctgagactgagctgtgtggcctccggcttcaccttcagccggtacaagatgaactgggtgcgccaggcccctggcaagggactggaatgggtgtcctacatcagccgcagcggcagagacatctactacgccgacagcgtgaagggccggttcaccatcagcagagacaacgccaagaacagcctgtacctccagatgaactccctgcgggacgaggacaccgccgtgtactactgtgccggaaccgtgaccacctattactacgacttcggcatggacgtgtggggccagggcacaaccgtgacagtgtctagcacgcgtgaggacctgaagaacgtgttcccacctgaggtggccgtgttcgagcctagcgaggccgagatcagccacacccagaaagccaccctcgtgtgcctggctaccggcttctaccccgaccatgtggaactgtcttggtgggtcaacggcaaagaggtgcacagcggcgtgtgtaccgacccccagccactgaaagaacagcccgccctgaacgacagccggtactgcctgagcagcagactgagagtgtccgccaccttctggcagaacccccggaaccacttcagatgccaggtgcagttctacggcctgagcgagaacgacgagtggacccaggacagagccaagcccgtgacccagatcgtgtctgccgaagcctggggcagagccgattgcgacgtgaagctggtggaaaagagcttcgagacagacaccaacctgaacttccagaacctgagcgtgatcggcttcagaatcctgctgctgaaagtggccggctttaacctgctgatgaccctgcggctgtggtccagc

SEQ ID NO: 4155 - DNA, 1872 bp, synthetic construct
  source 1..1872: mol_type = other DNA
atggccttaccagtgaccgccttgctcctgccgctggccttgctgctccacgccgccaggccgcagtctgtgctgacacagcctccatctgcctctggcacacctggacagagagtgaccatcagctgtagcggcagcagaagcaacgtcggcggcaactacgtgttctggtatcagcaggtcccaggcgctacccctaagctgctgatctacagaagcaatcagcggcctagcggcgtgcccgatagatttgccggaagcaagagcggcagctctgccagccttgccatctctggactgagaagcgaggacgaggccgactactactgtgccacctgggatgatagcctgagcggcttcgtgtttggcaccggcaccaaagtgacagtgcttggtctcgagatccagaaccctgatcctgccgtgtaccagctgcgggatagcaagagcagcgacaagagcgtgtgtctgttcaccgacttcgacagccagaccaacgtgtcccagagcaaggactccgacgtgtacatcaccgataagtgcgtgctggacatgcggagcatggacttcaagagcaactccgccgtggcctggtccaacaagtccgatttcgcctgcgccaacgccttcaacaacagcattatccccgaggacacattcttcccaagccccgagagcagctgcggctttaccagcgagagctaccagcagggcgtgctgagcgccaccatcctgtacgagatcctgctgggcaaggccaccctgtacgccgtgctggtgtctgccctggtgctgatggctatggtcaagcggaaggacagccggggacgcgccaagagaagcggatctggcgtgaagcagaccctgaatttcgacctgctgaagctggctggcgacgtggaatccaacccaggccctactagtatggactggatttggcgcatccttttccttgtcggcgctgctaccggcgcgcattccttcgaagttcagctggttgaatctggcggcggactggttaagcctggcggatctctgagactgtcttgtgccgccagcggcttcaccttcagcgattactacatgagctggatcagacaggcccctggcaaaggactggaatgggtgtcctacatcagcagcagcggctccaccatctactacgccgatagcgtgaagggcagattcaccatcagccgggacaacgccaagaacagcctgtacctccagatgaactccctgagagccgaggacaccgccgtgtactattgcgccagaggctacggcaaagcctacgatcaatggggccagggcacactggtcaccgtttcttctacgcgtgaggacctgaagaacgtgttcccacctgaggtggccgtgttcgagcctagcgaggccgagatcagccacacccagaaagccaccctcgtgtgcctggctaccggcttctaccccgaccatgtggaactgtcttggtgggtcaacggcaaagaggtgcacagcggcgtgtgtaccgacccccagccactgaaagaacagcccgccctgaacgacagccggtactgcctgagcagcagactgagagtgtccgccaccttctggcagaacccccggaaccacttcagatgccaggtgcagttctacggcctgagcgagaacgacgagtggacccaggacagagccaagcccgtgacccagatcgtgtctgccgaagcctggggcagagccgattgcgacgtgaagctggtggaaaagagcttcgagacagacaccaacctgaacttccagaacctgagcgtgatcggcttcagaatcctgctgctgaaagtggccggctttaacctgctgatgaccctgcggctgtggtccagc

SEQ ID NO: 4156 - DNA, 1869 bp, synthetic construct
  source 1..1869: mol_type = other DNA
atggccttaccagtgaccgccttgctcctgccgctggccttgctgctccacgccgccaggccgcagtctgtggtcacacagccacctagcatgtctgccgctccaggccagcaagtgaccatctcttgtagcggcggcaacagcaacatcgagcggaactacgtgtcctggtatctgcaactgcctggcacagcccctaagctggtcatcttcgacaacgacagacggcccagcggcatccccgatagattttctggcagcaagagcggcaccagcgccacactgggaattaccggacttcagacaggcgacgaggccgactactactgtggcacatgggactctagcctgagaggctgggttttcggcggaggcacaaagctgacagtgcttggtctcgagatccagaaccctgatcctgccgtgtaccagctgcgggatagcaagagcagcgacaagagcgtgtgtctgttcaccgacttcgacagccagaccaacgtgtcccagagcaaggactccgacgtgtacatcaccgataagtgcgtgctggacatgcggagcatggacttcaagagcaactccgccgtggcctggtccaacaagtccgatttcgcctgcgccaacgccttcaacaacagcattatccccgaggacacattcttcccaagccccgagagcagctgcggctttaccagcgagagctaccagcagggcgtgctgagcgccaccatcctgtacgagatcctgctgggcaaggccaccctgtacgccgtgctggtgtctgccctggtgctgatggctatggtcaagcggaaggacagccggggacgcgccaagagaagcggatctggcgtgaagcagaccctgaatttcgacctgctgaagctggctggcgacgtggaatccaacccaggccctactagtatggactggatttggcgcatccttttccttgtcggcgctgctaccggcgcgcattccttcgaagtgcagctcgttgagtctggcggcggactgattcaacctggcggaagcctgagactgagctgtgccgcttccggcttcaccttcagcaactacgccatgaactgggttcgacaggcccctggcaaaggactggaatgggtgtccaccatcaacggcagaggcagcagcaccatctacgccgattctgtgaagggcagattcaccatcagccgggacaacagcaagaacaccctgtacctccagatgaactccctgagagccgaggacaccgccacctattactgtgcccggtacatcagcagaggactgggcgattcttggggccagggcacactggttacagtgacgcgtgaggacctgaagaacgtgttcccacctgaggtggccgtgttcgagcctagcgaggccgagatcagccacacccagaaagccaccctcgtgtgcctggctaccggcttctaccccgaccatgtggaactgtcttggtgggtcaacggcaaagaggtgcacagcggcgtgtgtaccgacccccagccactgaaagaacagcccgccctgaacgacagccggtactgcctgagcagcagactgagagtgtccgccaccttctggcagaacccccggaaccacttcagatgccaggtgcagttctacggcctgagcgagaacgacgagtggacccaggacagagccaagcccgtgacccagatcgtgtctgccgaagcctggggcagagccgattgcgacgtgaagctggtggaaaagagcttcgagacagacaccaacctgaacttccagaacctgagcgtgatcggcttcagaatcctgctgctgaaagtggccggctttaacctgctgatgaccctgcggctgtggtccagc

SEQ ID NO: 4157 - DNA, 1872 bp, synthetic construct
  source 1..1872: mol_type = other DNA
atggccttaccagtgaccgccttgctcctgccgctggccttgctgctccacgccgccaggccggacgtcgtgatgacccagacccctctgagcctgcctgtgtccctgggcgatcaggccagcatcagctgtagaagcagccagagcctggtgcacagcaacggcaacacctacctgcactggtatctccagaagcccggccagagccccaagctgctgatctacaaggtgtccaacagattcagcggcgtgcccgacagattctccggcagcggctctggcaccgacttcaccctgaagatcagccgggtggaagccgaggacctgggcgtgtacttctgtagccagaacacccccgtgccccccaagtttggcagcggcaccaagctggaaatcaagctcgagatccagaaccctgatcctgccgtgtaccagctgcgggatagcaagagcagcgacaagagcgtgtgtctgttcaccgacttcgacagccagaccaacgtgtcccagagcaaggactccgacgtgtacatcaccgataagtgcgtgctggacatgcggagcatggacttcaagagcaactccgccgtggcctggtccaacaagtccgatttcgcctgcgccaacgccttcaacaacagcattatccccgaggacacattcttcccaagccccgagagcagctgcggctttaccagcgagagctaccagcagggcgtgctgagcgccaccatcctgtacgagatcctgctgggcaaggccaccctgtacgccgtgctggtgtctgccctggtgctgatggctatggtcaagcggaaggacagccggggacgcgccaagagaagcggatctggcgtgaagcagaccctgaatttcgacctgctgaagctggctggcgacgtggaatccaacccaggccctactagtatggactggatttggcgcatccttttccttgtcggcgctgctaccggcgcgcattccttcgaacaggtgcagctccagcagtctggcgctgaactcgtgcggcctggcgcttctgtgaagctgtcttgcaaggccagcggctacaccttcaacgactacgagatgcactgggtcaagcagacccctgtgcacggcctgaagtggatcggagccctggaacccaagaccggcgataccgcctacagccagaagttcaagggcaaggccaccctgaccgccgacaagagcagcagcacagcctacatggaactgcggagcctgaccagcgaggacagcgccgtgtactactgcaccagctgctactactacacctacagcggccagggcaccctcgtgacagtgtctgctacgcgtgaggacctgaagaacgtgttcccacctgaggtggccgtgttcgagcctagcgaggccgagatcagccacacccagaaagccaccctcgtgtgcctggctaccggcttctaccccgaccatgtggaactgtcttggtgggtcaacggcaaagaggtgcacagcggcgtgtgtaccgacccccagccactgaaagaacagcccgccctgaacgacagccggtactgcctgagcagcagactgagagtgtccgccaccttctggcagaacccccggaaccacttcagatgccaggtgcagttctacggcctgagcgagaacgacgagtggacccaggacagagccaagcccgtgacccagatcgtgtctgccgaagcctggggcagagccgattgcgacgtgaagctggtggaaaagagcttcgagacagacaccaacctgaacttccagaacctgagcgtgatcggcttcagaatcctgctgctgaaagtggccggctttaacctgctgatgaccctgcggctgtggtccagc

SEQ ID NO: 4158 - DNA, 1869 bp, synthetic construct
  source 1..1869: mol_type = other DNA
atggccttaccagtgaccgccttgctcctgccgctggccttgctgctccacgccgccaggccggacatccaactgacccagagccccagcagcctgtctgcctctgtgggcgacagagtgaccatcacctgtagagccagccagggcatcagaaacgacctgggctggtatcagcagaagcccggcaaggcccccaagcggctgatctatgctgccagctccctccagaatggcgtgcccagcagattttccggcagcggctctggcaccgagttcaccctgaccatcagctccctccagcccgaggacttcgccacctactactgcctccagcacaacacctaccccgccttcggccagggcaccaaggtggaaatcaagagactcgagatccagaaccctgatcctgccgtgtaccagctgcgggatagcaagagcagcgacaagagcgtgtgtctgttcaccgacttcgacagccagaccaacgtgtcccagagcaaggactccgacgtgtacatcaccgataagtgcgtgctggacatgcggagcatggacttcaagagcaactccgccgtggcctggtccaacaagtccgatttcgcctgcgccaacgccttcaacaacagcattatccccgaggacacattcttcccaagccccgagagcagctgcggctttaccagcgagagctaccagcagggcgtgctgagcgccaccatcctgtacgagatcctgctgggcaaggccaccctgtacgccgtgctggtgtctgccctggtgctgatggctatggtcaagcggaaggacagccggggacgcgccaagagaagcggatctggcgtgaagcagaccctgaatttcgacctgctgaagctggctggcgacgtggaatccaacccaggccctactagtatggactggatttggcgcatccttttccttgtcggcgctgctaccggcgcgcattccttcgaacaggtgcaactccaggaatctggccctggcctcgtgaagcctagccagaccctgagcctgacctgtaccgtgtctggcggcagcatcagcagcttcaactactactggtcctggatcagacaccaccctggcaagggcctggaatggatcggctacatctactacagcggcagcacctacagcaaccccagcctgaagtcccgcgtgaccatctccgtggacaccagcaagaaccagtttagcctgaccctgtccagcgtgacagccgccgataccgccgtgtactactgcgccagaggctacaactggaactacttcgactactggggccagggaaccctcgtgaccgtgtctagtacgcgtgaggacctgaagaacgtgttcccacctgaggtggccgtgttcgagcctagcgaggccgagatcagccacacccagaaagccaccctcgtgtgcctggctaccggcttctaccccgaccatgtggaactgtcttggtgggtcaacggcaaagaggtgcacagcggcgtgtgtaccgacccccagccactgaaagaacagcccgccctgaacgacagccggtactgcctgagcagcagactgagagtgtccgccaccttctggcagaacccccggaaccacttcagatgccaggtgcagttctacggcctgagcgagaacgacgagtggacccaggacagagccaagcccgtgacccagatcgtgtctgccgaagcctggggcagagccgattgcgacgtgaagctggtggaaaagagcttcgagacagacaccaacctgaacttccagaacctgagcgtgatcggcttcagaatcctgctgctgaaagtggccggctttaacctgctgatgaccctgcggctgtggtccagc

SEQ ID NO: 4159 - DNA, 1875 bp, synthetic construct
  source 1..1875: mol_type = other DNA
atggccttaccagtgaccgccttgctcctgccgctggccttgctgctccacgccgccaggccggacgacatcgtgctgacccagagccccgccagcctggccgtgagcctgggccagagcgtgaccatcagctgcagagccagcgagagcgtggagtactacggcaccagcctgatgcagtggtaccagcagaagcccggccagccccccaagctgctgatctacgccaccagcaacgtggagagcggcgtgcccgccagattcagcggcagcggcagcggcaccgacttcagcctgaacatccaccccgtggaggaggacgacatcgccatgtacttctgccagcagagcagaaagctgcccagcaccttcggcggcggcaccaagctggagatcaagctcgagatccagaaccctgatcctgccgtgtaccagctgcgggatagcaagagcagcgacaagagcgtgtgtctgttcaccgacttcgacagccagaccaacgtgtcccagagcaaggactccgacgtgtacatcaccgataagtgcgtgctggacatgcggagcatggacttcaagagcaactccgccgtggcctggtccaacaagtccgatttcgcctgcgccaacgccttcaacaacagcattatccccgaggacacattcttcccaagccccgagagcagctgcggctttaccagcgagagctaccagcagggcgtgctgagcgccaccatcctgtacgagatcctgctgggcaaggccaccctgtacgccgtgctggtgtctgccctggtgctgatggctatggtcaagcggaaggacagccggggacgcgccaagagaagcggatctggcgtgaagcagaccctgaatttcgacctgctgaagctggctggcgacgtggaatccaacccaggccctactagtatggactggatttggcgcatccttttccttgtcggcgctgctaccggcgcgcattccttcgaagacgtgagactgcaggagagcggccccggccaggtgaagcccagccagaccgtgagcctgacctgcagcgtgaccggctacagcatcaccaacggcaaccactggtggaactggatcagacaggtgagcggcagcaagctggagtggatcggctacatcagcagcagcggcagcaccgacagcaaccccagcctgaagagcagaatcagcatcaccagagacaccagcaagaaccagctgttcctgcagctgaacagcgtgaccaccgaggacatcgccacctactactgcgccagaggctactacttcgactactggggccagggcaccaccctgaccgtgagcagcacgcgtgaggacctgaagaacgtgttcccacctgaggtggccgtgttcgagcctagcgaggccgagatcagccacacccagaaagccaccctcgtgtgcctggctaccggcttctaccccgaccatgtggaactgtcttggtgggtcaacggcaaagaggtgcacagcggcgtgtgtaccgacccccagccactgaaagaacagcccgccctgaacgacagccggtactgcctgagcagcagactgagagtgtccgccaccttctggcagaacccccggaaccacttcagatgccaggtgcagttctacggcctgagcgagaacgacgagtggacccaggacagagccaagcccgtgacccagatcgtgtctgccgaagcctggggcagagccgattgcgacgtgaagctggtggaaaagagcttcgagacagacaccaacctgaacttccagaacctgagcgtgatcggcttcagaatcctgctgctgaaagtggccggctttaacctgctgatgaccctgcggctgtggtccagc

SEQ ID NO: 4160 - DNA, 1872 bp, synthetic construct
  source 1..1872: mol_type = other DNA
atggccttaccagtgaccgccttgctcctgccgctggccttgctgctccacgccgccaggccggacatccagatgacccagagccccagcagcctgtctgccagcgtgggcgacagagtgaccatcacctgtagagccagccaggacgtgaacaccgccgtggcctggtatcagcagaagcctggcaaggcccccaagctgctgatctacagcgccagcttcctggaaagcggcgtgcccagcagattcagcggaagcagaagcggcaccgacttcaccctgaccatcagctccctccagcccgaggacttcgccacctactactgccagcagcactacaccacccctcccaccttcggccagaccaaggtggaaatcaagagactcgagatccagaaccctgatcctgccgtgtaccagctgcgggatagcaagagcagcgacaagagcgtgtgtctgttcaccgacttcgacagccagaccaacgtgtcccagagcaaggactccgacgtgtacatcaccgataagtgcgtgctggacatgcggagcatggacttcaagagcaactccgccgtggcctggtccaacaagtccgatttcgcctgcgccaacgccttcaacaacagcattatccccgaggacacattcttcccaagccccgagagcagctgcggctttaccagcgagagctaccagcagggcgtgctgagcgccaccatcctgtacgagatcctgctgggcaaggccaccctgtacgccgtgctggtgtctgccctggtgctgatggctatggtcaagcggaaggacagccggggacgcgccaagagaagcggatctggcgtgaagcagaccctgaatttcgacctgctgaagctggctggcgacgtggaatccaacccaggccctactagtatggactggatttggcgcatccttttccttgtcggcgctgctaccggcgcgcattccttcgaagaagtgcaactggtggaatctggcggcggactggtgcagcctggcggatctctgagactgagctgtgccgccagcggcttcaacatcaaggacacctacatccactgggtgcgccaggcccctggaaagggactggaatgggtggcccggatctaccccaccaacggctacaccagatacgccgacagcgtgaagggccggttcaccatcagcgccgacaccagcaagaataccgcctacctccagatgaacagcctgcgggccgaggataccgccgtgtactactgctcaagatggggaggcgacggcttctacgctatggacgtgtggggccagggcacccttgtgaccgtgtcatctacgcgtgaggacctgaagaacgtgttcccacctgaggtggccgtgttcgagcctagcgaggccgagatcagccacacccagaaagccaccctcgtgtgcctggctaccggcttctaccccgaccatgtggaactgtcttggtgggtcaacggcaaagaggtgcacagcggcgtgtgtaccgacccccagccactgaaagaacagcccgccctgaacgacagccggtactgcctgagcagcagactgagagtgtccgccaccttctggcagaacccccggaaccacttcagatgccaggtgcagttctacggcctgagcgagaacgacgagtggacccaggacagagccaagcccgtgacccagatcgtgtctgccgaagcctggggcagagccgattgcgacgtgaagctggtggaaaagagcttcgagacagacaccaacctgaacttccagaacctgagcgtgatcggcttcagaatcctgctgctgaaagtggccggctttaacctgctgatgaccctgcggctgtggtccagc

SEQ ID NO: 4161 - DNA, 1869 bp, synthetic construct
  source 1..1869: mol_type = other DNA
atggccttaccagtgaccgccttgctcctgccgctggccttgctgctccacgccgccaggccggaccagagcgtgctgacacagcctcctagcgtgtcagtggcccctggcaagaccgccagaatcccctgcgagggcaactacatcggcagcagcaacgtgcactggtatcagcagaagcccggccaggctcccgtgctcgtgatccacttcgacagcgacagacccagcggcatccccgacagattcagcggcagcaacagcggcaacatggctaccctgaccatcagcagagtggaagccggggacgaggccgactactactgtcaagtgtgggagaaccacggctgggtgttcggcggaggcaccaagctgacagtgctgtctctcgagatccagaaccctgatcctgccgtgtaccagctgcgggatagcaagagcagcgacaagagcgtgtgtctgttcaccgacttcgacagccagaccaacgtgtcccagagcaaggactccgacgtgtacatcaccgataagtgcgtgctggacatgcggagcatggacttcaagagcaactccgccgtggcctggtccaacaagtccgatttcgcctgcgccaacgccttcaacaacagcattatccccgaggacacattcttcccaagccccgagagcagctgcggctttaccagcgagagctaccagcagggcgtgctgagcgccaccatcctgtacgagatcctgctgggcaaggccaccctgtacgccgtgctggtgtctgccctggtgctgatggctatggtcaagcggaaggacagccggggacgcgccaagagaagcggatctggcgtgaagcagaccctgaatttcgacctgctgaagctggctggcgacgtggaatccaacccaggccctactagtatggactggatttggcgcatccttttccttgtcggcgctgctaccggcgcgcattccttcgaagaggtgcaactggtggaaacaggcggcggactggtgcagcctggcgagtctctgagactgagctgtgccgccagcggcttcaccttcagcgactacgagatgaactgggtgcgccaggcccctggaaagggcctggaatgggtgtcctacatcagcagctccggcagcaccatctactacgccgacagcgtgaagggccggtttaccatctaccgggacaacgccaagaacagcctgtacctccagatgaactccctgcgggccgaggacaccgccctgtactattgtgccagagcctggggcgtgggaccccctgattattggggacagggcaccctcgtgaccgtgtcctctacgcgtgaggacctgaagaacgtgttcccacctgaggtggccgtgttcgagcctagcgaggccgagatcagccacacccagaaagccaccctcgtgtgcctggctaccggcttctaccccgaccatgtggaactgtcttggtgggtcaacggcaaagaggtgcacagcggcgtgtgtaccgacccccagccactgaaagaacagcccgccctgaacgacagccggtactgcctgagcagcagactgagagtgtccgccaccttctggcagaacccccggaaccacttcagatgccaggtgcagttctacggcctgagcgagaacgacgagtggacccaggacagagccaagcccgtgacccagatcgtgtctgccgaagcctggggcagagccgattgcgacgtgaagctggtggaaaagagcttcgagacagacaccaacctgaacttccagaacctgagcgtgatcggcttcagaatcctgctgctgaaagtggccggctttaacctgctgatgaccctgcggctgtggtccagc

SEQ ID NO: 4162 - DNA, 1893 bp, synthetic construct
  source 1..1893: mol_type = other DNA
atggccttaccagtgaccgccttgctcctgccgctggccttgctgctccacgccgccaggccggacatccagatgacccagagccccagcagcctgtctgccagcgtgggcgataccgtgaccatcacctgtcaggccaacggctacctgaactggtatcagcagcggagaggcaaggcccccaagctgctgatctacgacggcagcaagctggaaagaggcgtgcccagcagattcagcggcagaagatggggccaggagtacaacctgaccatcaacaacctccagcccgaggatattgccacatacttttgccaggtgtacgagttcgtggtgcccggcacacggctggacctgaagagaacagtggctgctcctctcgagatccagaaccctgatcctgccgtgtaccagctgcgggatagcaagagcagcgacaagagcgtgtgtctgttcaccgacttcgacagccagaccaacgtgtcccagagcaaggactccgacgtgtacatcaccgataagtgcgtgctggacatgcggagcatggacttcaagagcaactccgccgtggcctggtccaacaagtccgatttcgcctgcgccaacgccttcaacaacagcattatccccgaggacacattcttcccaagccccgagagcagctgcggctttaccagcgagagctaccagcagggcgtgctgagcgccaccatcctgtacgagatcctgctgggcaaggccaccctgtacgccgtgctggtgtctgccctggtgctgatggctatggtcaagcggaaggacagccggggacgcgccaagagaagcggatctggcgtgaagcagaccctgaatttcgacctgctgaagctggctggcgacgtggaatccaacccaggccctactagtatggactggatttggcgcatccttttccttgtcggcgctgctaccggcgcgcattccttcgaacaggtgcagctgctccagtctggcgctgccgtgacaaagcctggcgcttctgtgcgggtgtcctgtgaagccagcggctacaacatccgggactacttcatccactggtggcggcaggctccaggccagggactccagtgggtgggatggatcaaccccaagaccggccagcccaacaaccccagacagttccagggcagagtgtccctgaccagacacgccagctgggacttcgacaccttcagcttctacatggatctgaaggccctgcggagcgacgataccgccgtgtacttctgcgccagacagagaagcgactactgggatttcgacgtgtggggcagcggcacccaagtgacagtgtctagcgccagcaccaagggacccacgcgtgaggacctgaagaacgtgttcccacctgaggtggccgtgttcgagcctagcgaggccgagatcagccacacccagaaagccaccctcgtgtgcctggctaccggcttctaccccgaccatgtggaactgtcttggtgggtcaacggcaaagaggtgcacagcggcgtgtgtaccgacccccagccactgaaagaacagcccgccctgaacgacagccggtactgcctgagcagcagactgagagtgtccgccaccttctggcagaacccccggaaccacttcagatgccaggtgcagttctacggcctgagcgagaacgacgagtggacccaggacagagccaagcccgtgacccagatcgtgtctgccgaagcctggggcagagccgattgcgacgtgaagctggtggaaaagagcttcgagacagacaccaacctgaacttccagaacctgagcgtgatcggcttcagaatcctgctgctgaaagtggccggctttaacctgctgatgaccctgcggctgtggtccagc

SEQ ID NO: 4163 - DNA, 1911 bp, synthetic construct
  source 1..1911: mol_type = other DNA
atggccttaccagtgaccgccttgctcctgccgctggccttgctgctccacgccgccaggccgcagtctgccctgacacagcctcctagcgcctctggctctcccggccagagcatcaccatcagctgtaccggcaccagcaacaacttcgtgtcctggtatcagcagcacgccggcaaggcccccaagctcgtgatctacgacgtgaacaagcggcccagcggcgtgcccgatagattcagcggcagcaagagcggcaacaccgccagcctgacagtgtctggcctccagaccgatgacgaggccgtgtactactgcggcagcctcgtgggcaactgggacgtgatctttggcggaggcaccaagctgaccgtgctgctcgagatccagaaccctgatcctgccgtgtaccagctgcgggatagcaagagcagcgacaagagcgtgtgtctgttcaccgacttcgacagccagaccaacgtgtcccagagcaaggactccgacgtgtacatcaccgataagtgcgtgctggacatgcggagcatggacttcaagagcaactccgccgtggcctggtccaacaagtccgatttcgcctgcgccaacgccttcaacaacagcattatccccgaggacacattcttcccaagccccgagagcagctgcggctttaccagcgagagctaccagcagggcgtgctgagcgccaccatcctgtacgagatcctgctgggcaaggccaccctgtacgccgtgctggtgtctgccctggtgctgatggctatggtcaagcggaaggacagccggggacgcgccaagagaagcggatctggcgtgaagcagaccctgaatttcgacctgctgaagctggctggcgacgtggaatccaacccaggccctactagtatggactggatttggcgcatccttttccttgtcggcgctgctaccggcgcgcattccttcgaacagccccagctccaggaatctggccccacactggtggaagccagcgagacactgagcctgacctgtgccgtgtccggcgattctaccgccgcctgcaatagcttctggggctgggtgcgccagcctcctggaaagggactggaatgggtgggaagcctgagccactgcgccagctattggaaccggggctggacctaccacaaccccagcctgaagtccagactgaccctggccctggacacccccaagaacctggtgttcctgaagctgaacagcgtgacagccgccgacaccgccacctactactgtgccagatttggcggcgaggtgctgcggtacaccgactggcctaaacctgcctgggtggacctgtggggcagaggaacactcgtgaccgtgtccagcacgcgtgaggacctgaagaacgtgttcccacctgaggtggccgtgttcgagcctagcgaggccgagatcagccacacccagaaagccaccctcgtgtgcctggctaccggcttctaccccgaccatgtggaactgtcttggtgggtcaacggcaaagaggtgcacagcggcgtgtgtaccgacccccagccactgaaagaacagcccgccctgaacgacagccggtactgcctgagcagcagactgagagtgtccgccaccttctggcagaacccccggaaccacttcagatgccaggtgcagttctacggcctgagcgagaacgacgagtggacccaggacagagccaagcccgtgacccagatcgtgtctgccgaagcctggggcagagccgattgcgacgtgaagctggtggaaaagagcttcgagacagacaccaacctgaacttccagaacctgagcgtgatcggcttcagaatcctgctgctgaaagtggccggctttaacctgctgatgaccctgcggctgtggtccagc

SEQ ID NO: 4164 - DNA, 1866 bp, synthetic construct
  source 1..1866: mol_type = other DNA
atggccttaccagtgaccgccttgctcctgccgctggccttgctgctccacgccgccaggccggagatcgtgctgacacagagccctggcaccctgagcctgtctccaggcgagacagccatcatcagctgccggacaagccagtacggcagcctggcctggtatcagcagaggccaggacaggcccccagactcgtgatctacagcggcagcacaagagccgccggaatccccgatagattcagcggctccagatggggacccgactacaacctgaccatcagcaacctggaaagcggcgacttcggcgtgtactactgccagcagtacgagttcttcggccagggcaccaaggtgcaggtggacatcaaaagactcgagatccagaaccctgatcctgccgtgtaccagctgcgggatagcaagagcagcgacaagagcgtgtgtctgttcaccgacttcgacagccagaccaacgtgtcccagagcaaggactccgacgtgtacatcaccgataagtgcgtgctggacatgcggagcatggacttcaagagcaactccgccgtggcctggtccaacaagtccgatttcgcctgcgccaacgccttcaacaacagcattatccccgaggacacattcttcccaagccccgagagcagctgcggctttaccagcgagagctaccagcagggcgtgctgagcgccaccatcctgtacgagatcctgctgggcaaggccaccctgtacgccgtgctggtgtctgccctggtgctgatggctatggtcaagcggaaggacagccggggacgcgccaagagaagcggatctggcgtgaagcagaccctgaatttcgacctgctgaagctggctggcgacgtggaatccaacccaggccctactagtatggactggatttggcgcatccttttccttgtcggcgctgctaccggcgcgcattccttcgaacaggtgcagctggtgcagtctggcggccagatgaagaaacccggcgagagcatgagaatcagctgtcgggcctccggctacgagttcatcgactgcaccctgaactggatcagactggcccctggcaagcggcctgagtggatgggatggctgaagcctagaggcggagccgtgaactacgccagacctctccagggcagagtgaccatgaccagggacgtgtacagcgataccgccttcctggaactgcggagcctgaccgtggatgataccgccgtgtacttctgcaccagaggcaagaactgcgattacaactgggacttcgagcactggggcagaggcacccctgtgatcgtgtctagcacgcgtgaggacctgaagaacgtgttcccacctgaggtggccgtgttcgagcctagcgaggccgagatcagccacacccagaaagccaccctcgtgtgcctggctaccggcttctaccccgaccatgtggaactgtcttggtgggtcaacggcaaagaggtgcacagcggcgtgtgtaccgacccccagccactgaaagaacagcccgccctgaacgacagccggtactgcctgagcagcagactgagagtgtccgccaccttctggcagaacccccggaaccacttcagatgccaggtgcagttctacggcctgagcgagaacgacgagtggacccaggacagagccaagcccgtgacccagatcgtgtctgccgaagcctggggcagagccgattgcgacgtgaagctggtggaaaagagcttcgagacagacaccaacctgaacttccagaacctgagcgtgatcggcttcagaatcctgctgctgaaagtggccggctttaacctgctgatgaccctgcggctgtggtccagc

SEQ ID NO: 4165 - DNA, 1896 bp, synthetic construct
  source 1..1896: mol_type = other DNA
atggccttaccagtgaccgccttgctcctgccgctggccttgctgctccacgccgccaggccggagctggtgctgacacagagccctggcaccctgtctctgtctgccggcgaaagagccaccctgagctgtagagccagccagagcgtgtcctctggcagcctggcttggtatcagcagaagccaggccaggcccccagactgctgatctacggcgcttctaccagagccaccggcatccccgatagattcagcggctctggctccggcaccgacttcaccctgacaatcggcagactggaacccgaggacctggccgtgtactactgccagcagtacggcaccagcccctacacattcggccagggcaccaagctggaaatcctcgagatccagaaccctgatcctgccgtgtaccagctgcgggatagcaagagcagcgacaagagcgtgtgtctgttcaccgacttcgacagccagaccaacgtgtcccagagcaaggactccgacgtgtacatcaccgataagtgcgtgctggacatgcggagcatggacttcaagagcaactccgccgtggcctggtccaacaagtccgatttcgcctgcgccaacgccttcaacaacagcattatccccgaggacacattcttcccaagccccgagagcagctgcggctttaccagcgagagctaccagcagggcgtgctgagcgccaccatcctgtacgagatcctgctgggcaaggccaccctgtacgccgtgctggtgtctgccctggtgctgatggctatggtcaagcggaaggacagccggggacgcgccaagagaagcggatctggcgtgaagcagaccctgaatttcgacctgctgaagctggctggcgacgtggaatccaacccaggccctactagtatggactggatttggcgcatccttttccttgtcggcgctgctaccggcgcgcattccttcgaactggaacagagcggagccgaagtgaagaaacccggcagcagcgtgcaggtgtcctgcaaagcaagcggcggcaccttctctatgtacggcttcaactgggtgcgccaggctcctggacacggcctggaatggatgggcggcatcatccccatcttcggcacctccaactacgcccagaaattccggggcagagtgaccttcaccgccgaccaggccacaagcaccgcctacatggaactgaccaacctgcggagcgacgacaccgccgtgtattattgcgccagagacttcggccccgactgggaggatggcgacagctacgatggcagcggcagaggcttcttcgacttctggggccagggaacccttgtgaccgtgtcctcaacgcgtgaggacctgaagaacgtgttcccacctgaggtggccgtgttcgagcctagcgaggccgagatcagccacacccagaaagccaccctcgtgtgcctggctaccggcttctaccccgaccatgtggaactgtcttggtgggtcaacggcaaagaggtgcacagcggcgtgtgtaccgacccccagccactgaaagaacagcccgccctgaacgacagccggtactgcctgagcagcagactgagagtgtccgccaccttctggcagaacccccggaaccacttcagatgccaggtgcagttctacggcctgagcgagaacgacgagtggacccaggacagagccaagcccgtgacccagatcgtgtctgccgaagcctggggcagagccgattgcgacgtgaagctggtggaaaagagcttcgagacagacaccaacctgaacttccagaacctgagcgtgatcggcttcagaatcctgctgctgaaagtggccggctttaacctgctgatgaccctgcggctgtggtccagc

SEQ ID NO: 4166 - DNA, 1836 bp, synthetic construct
  source 1..1836: mol_type = other DNA
atggccttaccagtgaccgccttgctcctgccgctggccttgctgctccacgccgccaggccggacatccagatgacccagagccccagcagcctgtctgccagcgtgggcgacagagtgaccatcacctgtcaggccagccaggacatcaacaactacctgaactggtatcagcagaagcccggcaaggcccccaagctgctgatctacgacgccagcaatctgcagaccggcgtgcccagcagattttccggctctggcagcggcaccgacttcaccttcaccatcgaggacattgccacctactactgccagcagtacaccttcggccctggcaccaaggtggacatcaaactcgagatccagaaccctgatcctgccgtgtaccagctgcgggatagcaagagcagcgacaagagcgtgtgtctgttcaccgacttcgacagccagaccaacgtgtcccagagcaaggactccgacgtgtacatcaccgataagtgcgtgctggacatgcggagcatggacttcaagagcaactccgccgtggcctggtccaacaagtccgatttcgcctgcgccaacgccttcaacaacagcattatccccgaggacacattcttcccaagccccgagagcagctgcggctttaccagcgagagctaccagcagggcgtgctgagcgccaccatcctgtacgagatcctgctgggcaaggccaccctgtacgccgtgctggtgtctgccctggtgctgatggctatggtcaagcggaaggacagccggggacgcgccaagagaagcggatctggcgtgaagcagaccctgaatttcgacctgctgaagctggctggcgacgtggaatccaacccaggccctactagtatggactggatttggcgcatccttttccttgtcggcgctgctaccggcgcgcattccttcgaagaagtgcaactgctggaatctggcggcggactggtgcagcctggcggatctctgagactgagctgtgccgccagcggcttcacctttagctggtacagcatgacctgggtgcgccaggcccctggcaaaggactggaatgggtgtccagcatcgtgccctggggcgatttcacccagtacgccgatagcgtgaagggccggttcaccatcagccgggacaacagcaagaacaccctgtacctgcagatgaacagcctgcgggccgaggacaccgccgtgtactattgtgccaagggacctggctggggcagcttcgatctgtggggcagaggaacccttgtgaccgtgtccagcacgcgtgaggacctgaagaacgtgttcccacctgaggtggccgtgttcgagcctagcgaggccgagatcagccacacccagaaagccaccctcgtgtgcctggctaccggcttctaccccgaccatgtggaactgtcttggtgggtcaacggcaaagaggtgcacagcggcgtgtgtaccgacccccagccactgaaagaacagcccgccctgaacgacagccggtactgcctgagcagcagactgagagtgtccgccaccttctggcagaacccccggaaccacttcagatgccaggtgcagttctacggcctgagcgagaacgacgagtggacccaggacagagccaagcccgtgacccagatcgtgtctgccgaagcctggggcagagccgattgcgacgtgaagctggtggaaaagagcttcgagacagacaccaacctgaacttccagaacctgagcgtgatcggcttcagaatcctgctgctgaaagtggccggctttaacctgctgatgaccctgcggctgtggtccagc

SEQ ID NO: 4167 - DNA, 1866 bp, synthetic construct
  source 1..1866: mol_type = other DNA
atggccttaccagtgaccgccttgctcctgccgctggccttgctgctccacgccgccaggccggacatccagatgacccagagccccagcagcctgtctgccagcgtgggcgacagagtgaccatcacctgtaccgccagcctgagcgtgtccagcacctacctgcactggtatcagcagaagcccggcagcagccccaagctgtggatctacagcaccagcaacctggcctccggcgtgcccagcagattttctggcagcggctctggcaccagctacaccctgaccatcagctccctccagcccgaggacttcgccacctactactgccaccagtaccacagaagccccctgacctttggcggaggcaccaaggtggaaatcaagagactcgagatccagaaccctgatcctgccgtgtaccagctgcgggatagcaagagcagcgacaagagcgtgtgtctgttcaccgacttcgacagccagaccaacgtgtcccagagcaaggactccgacgtgtacatcaccgataagtgcgtgctggacatgcggagcatggacttcaagagcaactccgccgtggcctggtccaacaagtccgatttcgcctgcgccaacgccttcaacaacagcattatccccgaggacacattcttcccaagccccgagagcagctgcggctttaccagcgagagctaccagcagggcgtgctgagcgccaccatcctgtacgagatcctgctgggcaaggccaccctgtacgccgtgctggtgtctgccctggtgctgatggctatggtcaagcggaaggacagccggggacgcgccaagagaagcggatctggcgtgaagcagaccctgaatttcgacctgctgaagctggctggcgacgtggaatccaacccaggccctactagtatggactggatttggcgcatccttttccttgtcggcgctgctaccggcgcgcattccttcgaagaagtgcaactggtggaatctggcggcggactggtgcagcctggcggatctctgagactgagctgtgccgccagcggcttcagcctgaccaaatacggcgtgcactgggtgcgccaggcccctggaaaaggactggaatgggtgggagtgaagtgggctggcggctccaccgactacaacagcgccctgatgagccggttcaccatcagcaaggacaacgccaagaacagcctgtacctccagatgaactccctgcgggccgaggacaccgccgtgtactactgtgccagagatcaccgggacgctatggactactggggccagggaacactcgtgaccgtgtcctctacgcgtgaggacctgaagaacgtgttcccacctgaggtggccgtgttcgagcctagcgaggccgagatcagccacacccagaaagccaccctcgtgtgcctggctaccggcttctaccccgaccatgtggaactgtcttggtgggtcaacggcaaagaggtgcacagcggcgtgtgtaccgacccccagccactgaaagaacagcccgccctgaacgacagccggtactgcctgagcagcagactgagagtgtccgccaccttctggcagaacccccggaaccacttcagatgccaggtgcagttctacggcctgagcgagaacgacgagtggacccaggacagagccaagcccgtgacccagatcgtgtctgccgaagcctggggcagagccgattgcgacgtgaagctggtggaaaagagcttcgagacagacaccaacctgaacttccagaacctgagcgtgatcggcttcagaatcctgctgctgaaagtggccggctttaacctgctgatgaccctgcggctgtggtccagc

SEQ ID NO: 4168 - DNA, 1878 bp, synthetic construct
  source 1..1878: mol_type = other DNA
atggccttaccagtgaccgccttgctcctgccgctggccttgctgctccacgccgccaggccggacatccagatgacccagagccccagcagcctgtctgccagcgtgggcgacagagtgaccatcacatgcaaggccagccaggacgtgggaacagccgtggcctggtatcagcagaagcctggcaaggcccccaagctgctgatctacagcgccagctacagatccaccggcgtgcccagcagattttccggctctggcagcggcaccgacttcaccctgaccatctctagcctccagcccgaggacttcgccacctactactgccagcaccactactccgccccctggacatttggcggaggcaccaaggtggaaatcaagctcgagatccagaaccctgatcctgccgtgtaccagctgcgggatagcaagagcagcgacaagagcgtgtgtctgttcaccgacttcgacagccagaccaacgtgtcccagagcaaggactccgacgtgtacatcaccgataagtgcgtgctggacatgcggagcatggacttcaagagcaactccgccgtggcctggtccaacaagtccgatttcgcctgcgccaacgccttcaacaacagcattatccccgaggacacattcttcccaagccccgagagcagctgcggctttaccagcgagagctaccagcagggcgtgctgagcgccaccatcctgtacgagatcctgctgggcaaggccaccctgtacgccgtgctggtgtctgccctggtgctgatggctatggtcaagcggaaggacagccggggacgcgccaagagaagcggatctggcgtgaagcagaccctgaatttcgacctgctgaagctggctggcgacgtggaatccaacccaggccctactagtatggactggatttggcgcatccttttccttgtcggcgctgctaccggcgcgcattccttcgaagaagtgcaactggtggaatcaggcggcggactggtgcagcctggcggatctctgagactgagctgtgccgccagcggcttcaccttcagcagaaacggcatgagctgggtgcgccaggcccctggaaaaggactggaatgggtggcaaccgtgtccagcggcggcagctacatctactacgccgacagcgtgaagggccggttcaccatctccagagacaacgccaagaacagcctgtacctccagatgaactccctgcgggccgaggacaccgccgtgtactattgtgccagacagggcaccaccgccctggctaccagattcttcgatgtgtggggccagggcaccctcgtgaccgtgtcatctacgcgtgaggacctgaagaacgtgttcccacctgaggtggccgtgttcgagcctagcgaggccgagatcagccacacccagaaagccaccctcgtgtgcctggctaccggcttctaccccgaccatgtggaactgtcttggtgggtcaacggcaaagaggtgcacagcggcgtgtgtaccgacccccagccactgaaagaacagcccgccctgaacgacagccggtactgcctgagcagcagactgagagtgtccgccaccttctggcagaacccccggaaccacttcagatgccaggtgcagttctacggcctgagcgagaacgacgagtggacccaggacagagccaagcccgtgacccagatcgtgtctgccgaagcctggggcagagccgattgcgacgtgaagctggtggaaaagagcttcgagacagacaccaacctgaacttccagaacctgagcgtgatcggcttcagaatcctgctgctgaaagtggccggctttaacctgctgatgaccctgcggctgtggtccagc

SEQ ID NO: 4169 - DNA, 1866 bp, synthetic construct
  source 1..1866: mol_type = other DNA
atggccttaccagtgaccgccttgctcctgccgctggccttgctgctccacgccgccaggccggacatccagatgacccagagcccccctagcctgtctgcctctgtgggcggcaaagtgaccatcacatgcaaggccagccaggacatcgaccgctacatggcctggtatcaggacaagcccggcaagggacccaagctgctgatccacgataccagcaccctccagcccggcatccccagcagattttctggcagcggctccggcagagactacagcttcagcatcagcaacctggaacccgaggacattgccacctactactgcctccagtacgacaacctgtggaccttcggcggaggcaccaagctggaaatcaagagactcgagatccagaaccctgatcctgccgtgtaccagctgcgggatagcaagagcagcgacaagagcgtgtgtctgttcaccgacttcgacagccagaccaacgtgtcccagagcaaggactccgacgtgtacatcaccgataagtgcgtgctggacatgcggagcatggacttcaagagcaactccgccgtggcctggtccaacaagtccgatttcgcctgcgccaacgccttcaacaacagcattatccccgaggacacattcttcccaagccccgagagcagctgcggctttaccagcgagagctaccagcagggcgtgctgagcgccaccatcctgtacgagatcctgctgggcaaggccaccctgtacgccgtgctggtgtctgccctggtgctgatggctatggtcaagcggaaggacagccggggacgcgccaagagaagcggatctggcgtgaagcagaccctgaatttcgacctgctgaagctggctggcgacgtggaatccaacccaggccctactagtatggactggatttggcgcatccttttccttgtcggcgctgctaccggcgcgcattccttcgaacaggtgcaactggtgcagagcggagccgagcttgtgaagcctggcgcttccgtgaagatgagctgcaaagccagcggctacatcttcaccaactacaacatccactgggtcaagaagtccccaggccagggcctggaatggatcggagccatctaccccggaaacggcgacgccccttacagccagaagttccaggacagagccaccctgaccgccgacaccagcagcagcaccacctacatggaactgagcagcctgaccagcgaggacagcgccgtgtactattgcgtgcgggccaactgggatgtggccttcgcctattggggccagggcacactggtgtccgtgtcctctacgcgtgaggacctgaagaacgtgttcccacctgaggtggccgtgttcgagcctagcgaggccgagatcagccacacccagaaagccaccctcgtgtgcctggctaccggcttctaccccgaccatgtggaactgtcttggtgggtcaacggcaaagaggtgcacagcggcgtgtgtaccgacccccagccactgaaagaacagcccgccctgaacgacagccggtactgcctgagcagcagactgagagtgtccgccaccttctggcagaacccccggaaccacttcagatgccaggtgcagttctacggcctgagcgagaacgacgagtggacccaggacagagccaagcccgtgacccagatcgtgtctgccgaagcctggggcagagccgattgcgacgtgaagctggtggaaaagagcttcgagacagacaccaacctgaacttccagaacctgagcgtgatcggcttcagaatcctgctgctgaaagtggccggctttaacctgctgatgaccctgcggctgtggtccagc

SEQ ID NO: 4170 - DNA, 1869 bp, synthetic construct
  source 1..1869: mol_type = other DNA
atggccttaccagtgaccgccttgctcctgccgctggccttgctgctccacgccgccaggccggacatccagatgacccagagccctgccagcctgtctgcctctgtgggcgagacagtgaccatcacctgtcgggtgtccggcaacatccacaactacctggcctggtatcagcagaagcagggcaagagcccccaactgctggtgtacaacgccaagaccctggccgatggcgtgcccagcagattttctggctctggcagcggcacccagtacagcctgaagatcaacagcctccagcccgaggacttcggcagctactactgccagcacttctggtccaacccctacaccttcggcggaggcaccaagctggaaatcaagctcgagatccagaaccctgatcctgccgtgtaccagctgcgggatagcaagagcagcgacaagagcgtgtgtctgttcaccgacttcgacagccagaccaacgtgtcccagagcaaggactccgacgtgtacatcaccgataagtgcgtgctggacatgcggagcatggacttcaagagcaactccgccgtggcctggtccaacaagtccgatttcgcctgcgccaacgccttcaacaacagcattatccccgaggacacattcttcccaagccccgagagcagctgcggctttaccagcgagagctaccagcagggcgtgctgagcgccaccatcctgtacgagatcctgctgggcaaggccaccctgtacgccgtgctggtgtctgccctggtgctgatggctatggtcaagcggaaggacagccggggacgcgccaagagaagcggatctggcgtgaagcagaccctgaatttcgacctgctgaagctggctggcgacgtggaatccaacccaggccctactagtatggactggatttggcgcatccttttccttgtcggcgctgctaccggcgcgcattccttcgaacaggtgcaactccagcagtctggcgcttccgtgaaggtgtcctgcaaggccagcgaactcgtgcggcctggcacaggctacgccttcaccaattacctgatcgagtgggtcaagcagaggcccggacagggcctggaatggatcggagtgattaacccaggcagcggcggcaccaactacaacgagaagttcaagggcaaggccaccctgaccgccgacaagagcagcagcacagcctacatgcaactgagcagcctgaccagcgacgacagcgccgtgtacttctgcgcccggtacagaagctacgactggtacttcgacgtgtggggagccggcaccaccgtgacagtgtcatctacgcgtgaggacctgaagaacgtgttcccacctgaggtggccgtgttcgagcctagcgaggccgagatcagccacacccagaaagccaccctcgtgtgcctggctaccggcttctaccccgaccatgtggaactgtcttggtgggtcaacggcaaagaggtgcacagcggcgtgtgtaccgacccccagccactgaaagaacagcccgccctgaacgacagccggtactgcctgagcagcagactgagagtgtccgccaccttctggcagaacccccggaaccacttcagatgccaggtgcagttctacggcctgagcgagaacgacgagtggacccaggacagagccaagcccgtgacccagatcgtgtctgccgaagcctggggcagagccgattgcgacgtgaagctggtggaaaagagcttcgagacagacaccaacctgaacttccagaacctgagcgtgatcggcttcagaatcctgctgctgaaagtggccggctttaacctgctgatgaccctgcggctgtggtccagc

SEQ ID NO: 4171 - DNA, 1866 bp, synthetic construct
  source 1..1866: mol_type = other DNA
atggccttaccagtgaccgccttgctcctgccgctggccttgctgctccacgccgccaggccggacatccagatgacccagagcttcagcagcctgagcgccagcgtgggcgacagagtgaccatcacctgtagagccagccaggacatcagcaactacctgaactggtatcagcagaagcccggcaaggcccccaagctgctgatctactacaccagcagactgcacagcggcgtgcccagcagattttctggcagcggctccggcaccgactacaccctgacaatcagctccctgcagcccgaggacttcgctacctacttctgtcagcaaggcaacaccctgccctggacctttggcggaggcaccaagctggaaatcaagagactcgagatccagaaccctgatcctgccgtgtaccagctgcgggatagcaagagcagcgacaagagcgtgtgtctgttcaccgacttcgacagccagaccaacgtgtcccagagcaaggactccgacgtgtacatcaccgataagtgcgtgctggacatgcggagcatggacttcaagagcaactccgccgtggcctggtccaacaagtccgatttcgcctgcgccaacgccttcaacaacagcattatccccgaggacacattcttcccaagccccgagagcagctgcggctttaccagcgagagctaccagcagggcgtgctgagcgccaccatcctgtacgagatcctgctgggcaaggccaccctgtacgccgtgctggtgtctgccctggtgctgatggctatggtcaagcggaaggacagccggggacgcgccaagagaagcggatctggcgtgaagcagaccctgaatttcgacctgctgaagctggctggcgacgtggaatccaacccaggccctactagtatggactggatttggcgcatccttttccttgtcggcgctgctaccggcgcgcattccttcgaagaagtgcaactggtgcagtccggcggagggctggtgcagagcggaggatctctgagactgagctgcagagccagcggctacaccttcacccggtactggatgctgtgggtgcgccagaggccaggcaagggactggaatgggtggccgagatcaacccccggaacgaccggaccaactacaacgagaagttcaagacccggttcaccatcagcgtggacagaagcaagaacaccctgtacctgcagatggacagcctgcgggccgaggataccgccgtgtacttttgtgctctgggaggcggctacgctatggactactggggccagggaacccttgtgaccgtgtcctctacgcgtgaggacctgaagaacgtgttcccacctgaggtggccgtgttcgagcctagcgaggccgagatcagccacacccagaaagccaccctcgtgtgcctggctaccggcttctaccccgaccatgtggaactgtcttggtgggtcaacggcaaagaggtgcacagcggcgtgtgtaccgacccccagccactgaaagaacagcccgccctgaacgacagccggtactgcctgagcagcagactgagagtgtccgccaccttctggcagaacccccggaaccacttcagatgccaggtgcagttctacggcctgagcgagaacgacgagtggacccaggacagagccaagcccgtgacccagatcgtgtctgccgaagcctggggcagagccgattgcgacgtgaagctggtggaaaagagcttcgagacagacaccaacctgaacttccagaacctgagcgtgatcggcttcagaatcctgctgctgaaagtggccggctttaacctgctgatgaccctgcggctgtggtccagc

SEQ ID NO: 4172 - DNA, 1869 bp, synthetic construct
  source 1..1869: mol_type = other DNA
atggccttaccagtgaccgccttgctcctgccgctggccttgctgctccacgccgccaggccggacatccagatgacacagtctccggcgtcactgtccgcctccgtgggggagactgtgactattatttgtagggcatcagttaacatctactcttatttggcctggtaccagcagaagcaaggcaagagtcctcagctgctggtgtataatgcgaagatcctggcagagggcgtgccgagccggttctccggcagcggctcaggtacccaattttccctcaagatcaattcactgcagccagaggactttggcagttactattgtcaacaccactacggcacattcactttcgggtccggtacaaaattggagattaagcgactcgagatccagaaccctgatcctgccgtgtaccagctgcgggatagcaagagcagcgacaagagcgtgtgtctgttcaccgacttcgacagccagaccaacgtgtcccagagcaaggactccgacgtgtacatcaccgataagtgcgtgctggacatgcggagcatggacttcaagagcaactccgccgtggcctggtccaacaagtccgatttcgcctgcgccaacgccttcaacaacagcattatccccgaggacacattcttcccaagccccgagagcagctgcggctttaccagcgagagctaccagcagggcgtgctgagcgccaccatcctgtacgagatcctgctgggcaaggccaccctgtacgccgtgctggtgtctgccctggtgctgatggctatggtcaagcggaaggacagccggggacgcgccaagagaagcggatctggcgtgaagcagaccctgaatttcgacctgctgaagctggctggcgacgtggaatccaacccaggccctactagtatggactggatttggcgcatccttttccttgtcggcgctgctaccggcgcgcattccttcgaacaggtacagttgaaagaaagcgggcctggactggtagcgccttcccaatctctctccatcacgtgcaccatctctggcttctccctgacttcctatggagttcactgggtgaggcagccccccggcaagggactggaatggctggtcgtcatctggtccgacgggtccacaacctacaactccgctctgaaaagtcggctctctatttctaaagataatagcaagagccaggtgtttctgaaaatgaactctctgcagaccgatgatacggccatttactactgcgcttcacactatggctcaaccttggcattcgcttcctggggccacggaacactggtgaccgtttccgcagccacgcgtgaggacctgaagaacgtgttcccacctgaggtggccgtgttcgagcctagcgaggccgagatcagccacacccagaaagccaccctcgtgtgcctggctaccggcttctaccccgaccatgtggaactgtcttggtgggtcaacggcaaagaggtgcacagcggcgtgtgtaccgacccccagccactgaaagaacagcccgccctgaacgacagccggtactgcctgagcagcagactgagagtgtccgccaccttctggcagaacccccggaaccacttcagatgccaggtgcagttctacggcctgagcgagaacgacgagtggacccaggacagagccaagcccgtgacccagatcgtgtctgccgaagcctggggcagagccgattgcgacgtgaagctggtggaaaagagcttcgagacagacaccaacctgaacttccagaacctgagcgtgatcggcttcagaatcctgctgctgaaagtggccggctttaacctgctgatgaccctgcggctgtggtccagc

SEQ ID NO: 4173 - DNA, 1893 bp, synthetic construct
  source 1..1893: mol_type = other DNA
atggccttaccagtgaccgccttgctcctgccgctggccttgctgctccacgccgccaggccggacattgtgatgacccagtctcacaaattcatgtccacatcagtaggagacagggtcagcgtcacctgcaaggccagtcagaatgtgggtaataatgtagcctggtatcaacagaaaccagggcaatctcctaaagtactgatttactcggcatcctaccggtacagtggagtccctgatcgcttcacaggcagtggatctgggacagatttcactctcaccatcagtaatgtgcagtctgaagacttggcagagtatttctgtcagcaatataacacctatccattcacgttcggctcggggacaaagttggaaataaaactcgagatccagaaccctgatcctgccgtgtaccagctgcgggatagcaagagcagcgacaagagcgtgtgtctgttcaccgacttcgacagccagaccaacgtgtcccagagcaaggactccgacgtgtacatcaccgataagtgcgtgctggacatgcggagcatggacttcaagagcaactccgccgtggcctggtccaacaagtccgatttcgcctgcgccaacgccttcaacaacagcattatccccgaggacacattcttcccaagccccgagagcagctgcggctttaccagcgagagctaccagcagggcgtgctgagcgccaccatcctgtacgagatcctgctgggcaaggccaccctgtacgccgtgctggtgtctgccctggtgctgatggctatggtcaagcggaaggacagccggggacgcgccaagagaagcggatctggcgtgaagcagaccctgaatttcgacctgctgaagctggctggcgacgtggaatccaacccaggccctactagtatggactggatttggcgcatccttttccttgtcggcgctgctaccggcgcgcattccttcgaagaggtacagctggaggaaagcggtggaggactggtgcaacctggagggtctatgaagctctcttgcgtagcttctgggttcacgttctccaattactggatgaactgggtgcggcagtcccccgagaaaggcctggaatgggtagcagaaattcggttcaagtcccataactatgctacacactttgccgagtctgtcaaaggccggttcactattagtcgagacgacagcaagtcttcagtctacctgcagatgaataacttgcgggcagaggacacaggtatctactactgcaccaggagaatcggcaactccgactatgactggtggtactttgacgtctggggagcaggcaccagcgtgacggtgagttcagcctcaacgcgtgaggacctgaagaacgtgttcccacctgaggtggccgtgttcgagcctagcgaggccgagatcagccacacccagaaagccaccctcgtgtgcctggctaccggcttctaccccgaccatgtggaactgtcttggtgggtcaacggcaaagaggtgcacagcggcgtgtgtaccgacccccagccactgaaagaacagcccgccctgaacgacagccggtactgcctgagcagcagactgagagtgtccgccaccttctggcagaacccccggaaccacttcagatgccaggtgcagttctacggcctgagcgagaacgacgagtggacccaggacagagccaagcccgtgacccagatcgtgtctgccgaagcctggggcagagccgattgcgacgtgaagctggtggaaaagagcttcgagacagacaccaacctgaacttccagaacctgagcgtgatcggcttcagaatcctgctgctgaaagtggccggctttaacctgctgatgaccctgcggctgtggtccagc

SEQ ID NO: 4174 - DNA, 1872 bp, synthetic construct
  source 1..1872: mol_type = other DNA
atggccttaccagtgaccgccttgctcctgccgctggccttgctgctccacgccgccaggccggaccagatcgtgctgacccagtcccccgctattatgtccgcatcaccgggcgaaaaagtgacgatctcctgtagcgcttcatctagcgtctcctacatgtattggtatcaacagaaacctgggtctagcccaaagccgtggatctacagaaccagtaaccttgccagtggggtgccagcccgcttcagcggtagtggcagtggaacttcctatagcctcacaataagcaacatggaggctgaagatgccgctgcctattactgccagcagtaccacagttacccaaccacgttcggcgggggaactaagctcgaagtaaaactcgagatccagaaccctgatcctgccgtgtaccagctgcgggatagcaagagcagcgacaagagcgtgtgtctgttcaccgacttcgacagccagaccaacgtgtcccagagcaaggactccgacgtgtacatcaccgataagtgcgtgctggacatgcggagcatggacttcaagagcaactccgccgtggcctggtccaacaagtccgatttcgcctgcgccaacgccttcaacaacagcattatccccgaggacacattcttcccaagccccgagagcagctgcggctttaccagcgagagctaccagcagggcgtgctgagcgccaccatcctgtacgagatcctgctgggcaaggccaccctgtacgccgtgctggtgtctgccctggtgctgatggctatggtcaagcggaaggacagccggggacgcgccaagagaagcggatctggcgtgaagcagaccctgaatttcgacctgctgaagctggctggcgacgtggaatccaacccaggccctactagtatggactggatttggcgcatccttttccttgtcggcgctgctaccggcgcgcattccttcgaagaggtgcagctggtggaatctgggggcggcctggtccaacctaagggatcactcaagctctcttgtgcggccagcggattctctttcaatacctatgctatgaattgggtgagacaggcgcccggaaagggcctcgaatggatagcccatatccggtcaaaatcaaacaatttcgcaacctactatgcggactccgtgaaggaccgattttccatctcccgagatgcctccgagaatattctgttcctgcagatgaataacctcaagacagaggacaccgccatgtactactgtgtgcgccagggcggtgactttcccatggattactgggggcaggggaccagcgtgaccgtgagctctacgcgtgaggacctgaagaacgtgttcccacctgaggtggccgtgttcgagcctagcgaggccgagatcagccacacccagaaagccaccctcgtgtgcctggctaccggcttctaccccgaccatgtggaactgtcttggtgggtcaacggcaaagaggtgcacagcggcgtgtgtaccgacccccagccactgaaagaacagcccgccctgaacgacagccggtactgcctgagcagcagactgagagtgtccgccaccttctggcagaacccccggaaccacttcagatgccaggtgcagttctacggcctgagcgagaacgacgagtggacccaggacagagccaagcccgtgacccagatcgtgtctgccgaagcctggggcagagccgattgcgacgtgaagctggtggaaaagagcttcgagacagacaccaacctgaacttccagaacctgagcgtgatcggcttcagaatcctgctgctgaaagtggccggctttaacctgctgatgaccctgcggctgtggtccagc

SEQ ID NO: 4175 - DNA, 1869 bp, synthetic construct
  source 1..1869: mol_type = other DNA
atggccttaccagtgaccgccttgctcctgccgctggccttgctgctccacgccgccaggccggacgacatccagatgacccagagcagcagcagcttcagcgtgagcctgggcgacagagtgaccatcacctgcatggccagcgaggacatctacatcagactggcctggtaccagcagaagcccggcaacgcccccagactgctgatcagcgccgccaccagcctggagaccggcgtgcccagcagattcagcggcagcggcagcggcaaggactacaccctgagcatcaccagcctgcagaccgaggacgtgggcacctactactgccagcagtactggagcagcccctggaccttcggcggcggcaccaagctggagatcaacctcgagatccagaaccctgatcctgccgtgtaccagctgcgggatagcaagagcagcgacaagagcgtgtgtctgttcaccgacttcgacagccagaccaacgtgtcccagagcaaggactccgacgtgtacatcaccgataagtgcgtgctggacatgcggagcatggacttcaagagcaactccgccgtggcctggtccaacaagtccgatttcgcctgcgccaacgccttcaacaacagcattatccccgaggacacattcttcccaagccccgagagcagctgcggctttaccagcgagagctaccagcagggcgtgctgagcgccaccatcctgtacgagatcctgctgggcaaggccaccctgtacgccgtgctggtgtctgccctggtgctgatggctatggtcaagcggaaggacagccggggacgcgccaagagaagcggatctggcgtgaagcagaccctgaatttcgacctgctgaagctggctggcgacgtggaatccaacccaggccctactagtatggactggatttggcgcatccttttccttgtcggcgctgctaccggcgcgcattccttcgaagacgtgcagctgcaggagagcggccccggcctggtgaagcccagccagagcctgagcctgacctgcaccgtgaccggctacagcatcaccagcgactacacctggaactggatcagacagttccccggcaacaagctggagtggatgggctacatcacctacagcggcagcaccagctacaaccccagcctgaagagcagaaacagcatcaccagagacaccagcaagaaccagttcttcctgcagctgaacagcgtgaccaccgaggacaccgccacctactactgcgccagactgggcagaagatacacaatggactactggggccagggcaccagcgtgaccgtgagcagcacgcgtgaggacctgaagaacgtgttcccacctgaggtggccgtgttcgagcctagcgaggccgagatcagccacacccagaaagccaccctcgtgtgcctggctaccggcttctaccccgaccatgtggaactgtcttggtgggtcaacggcaaagaggtgcacagcggcgtgtgtaccgacccccagccactgaaagaacagcccgccctgaacgacagccggtactgcctgagcagcagactgagagtgtccgccaccttctggcagaacccccggaaccacttcagatgccaggtgcagttctacggcctgagcgagaacgacgagtggacccaggacagagccaagcccgtgacccagatcgtgtctgccgaagcctggggcagagccgattgcgacgtgaagctggtggaaaagagcttcgagacagacaccaacctgaacttccagaacctgagcgtgatcggcttcagaatcctgctgctgaaagtggccggctttaacctgctgatgaccctgcggctgtggtccagc

SEQ ID NO: 4176 - DNA, 1878 bp, synthetic construct
  source 1..1878: mol_type = other DNA
atggccttaccagtgaccgccttgctcctgccgctggccttgctgctccacgccgccaggccggacgacatccagatgacccagagccccagcagcctgtctgccagcgtgggcgacagagtgaccatcacctgtagagccagccagagcatcagcagctacctgaactggtatcagcagaagcccggcaaggcccccaaactgctgatctacgacgccagcaacctggaaaccggcgtgcccagcagattttccggcagcggctctggcaccgacttcaccttcaccatcagctccctccagcccgaggacattgccacctactactgccagcagtacgacaacctgcccctgacctttggcggaggcaccaaggtggacatcaagagactcgagatccagaaccctgatcctgccgtgtaccagctgcgggatagcaagagcagcgacaagagcgtgtgtctgttcaccgacttcgacagccagaccaacgtgtcccagagcaaggactccgacgtgtacatcaccgataagtgcgtgctggacatgcggagcatggacttcaagagcaactccgccgtggcctggtccaacaagtccgatttcgcctgcgccaacgccttcaacaacagcattatccccgaggacacattcttcccaagccccgagagcagctgcggctttaccagcgagagctaccagcagggcgtgctgagcgccaccatcctgtacgagatcctgctgggcaaggccaccctgtacgccgtgctggtgtctgccctggtgctgatggctatggtcaagcggaaggacagccggggacgcgccaagagaagcggatctggcgtgaagcagaccctgaatttcgacctgctgaagctggctggcgacgtggaatccaacccaggccctactagtatggactggatttggcgcatccttttccttgtcggcgctgctaccggcgcgcattccttcgaacaggtgcaactggtggaatctggcggcggagtggtgcagcctggcagaagcctgagactgagctgtgccgccagcggcttcacctttagcagctacgccatgcactgggtgcgccaggcccctggaaaaggcctggaatgggtggccgtgatctcctacgacggctccaacaagtattacgccgacagcgtgaagggccggttcaccatctccagagacaacagcaagaacaccctgtacctccagatgaacagcctgcgggccgaggacaccgccgtgtactattgtgccagggctcacaacagcagctcttggagcttcgactactggggccagggcaccctcgtgaccgtgtcatctacgcgtgaggacctgaagaacgtgttcccacctgaggtggccgtgttcgagcctagcgaggccgagatcagccacacccagaaagccaccctcgtgtgcctggctaccggcttctaccccgaccatgtggaactgtcttggtgggtcaacggcaaagaggtgcacagcggcgtgtgtaccgacccccagccactgaaagaacagcccgccctgaacgacagccggtactgcctgagcagcagactgagagtgtccgccaccttctggcagaacccccggaaccacttcagatgccaggtgcagttctacggcctgagcgagaacgacgagtggacccaggacagagccaagcccgtgacccagatcgtgtctgccgaagcctggggcagagccgattgcgacgtgaagctggtggaaaagagcttcgagacagacaccaacctgaacttccagaacctgagcgtgatcggcttcagaatcctgctgctgaaagtggccggctttaacctgctgatgaccctgcggctgtggtccagc

SEQ ID NO: 4177 - DNA, 1905 bp, synthetic construct
  source 1..1905: mol_type = other DNA
atggccttaccagtgaccgccttgctcctgccgctggccttgctgctccacgccgccaggccggacgacgtcgtgatgacccagagccctctgagcctgcctgtgtccctgggcgatcaggccagcatctcctgcagatccagccagagactggtgcacagcaacggcaacacctacctgcactggtatctgcagaagcccggccagagccccaagctgctgatctaccgggtgtccaacagattccccggcgtgcccgatagattcagcggctctggcagcggcaccgacttcaccctgaagatcagccgggtggaagccgaggacctgggcatctatttctgcagccagagcacccacgtgccctacacctttggcggaggcaccaagctggaaatcaagcggctcgagatccagaaccctgatcctgccgtgtaccagctgcgggatagcaagagcagcgacaagagcgtgtgtctgttcaccgacttcgacagccagaccaacgtgtcccagagcaaggactccgacgtgtacatcaccgataagtgcgtgctggacatgcggagcatggacttcaagagcaactccgccgtggcctggtccaacaagtccgatttcgcctgcgccaacgccttcaacaacagcattatccccgaggacacattcttcccaagccccgagagcagctgcggctttaccagcgagagctaccagcagggcgtgctgagcgccaccatcctgtacgagatcctgctgggcaaggccaccctgtacgccgtgctggtgtctgccctggtgctgatggctatggtcaagcggaaggacagccggggacgcgccaagagaagcggatctggcgtgaagcagaccctgaatttcgacctgctgaagctggctggcgacgtggaatccaacccaggccctactagtatggactggatttggcgcatccttttccttgtcggcgctgctaccggcgcgcattccttcgaagaagtgcggctgcagcagtctggccccgacctgattaagcctggggccagcgtgaagatgagctgcaaggccagcggctacaccttcaccggctacgtgatgcactgggtcaagcagaggccaggccagggcctggaatggatcggcttcatcaacccctacaacgacgacatccagagcaacgagcggttccggggcaaggccaccctgaccagcgataagagcagcaccaccgcctacatggaactgagcagcctgacctccgaggacagcgccgtgtactactgtgctaggggagccggctacaacttcgacggggcctacagattcttcgacttttggggccagggcaccacactgaccgtgtcctctacgcgtgaggacctgaagaacgtgttcccacctgaggtggccgtgttcgagcctagcgaggccgagatcagccacacccagaaagccaccctcgtgtgcctggctaccggcttctaccccgaccatgtggaactgtcttggtgggtcaacggcaaagaggtgcacagcggcgtgtgtaccgacccccagccactgaaagaacagcccgccctgaacgacagccggtactgcctgagcagcagactgagagtgtccgccaccttctggcagaacccccggaaccacttcagatgccaggtgcagttctacggcctgagcgagaacgacgagtggacccaggacagagccaagcccgtgacccagatcgtgtctgccgaagcctggggcagagccgattgcgacgtgaagctggtggaaaagagcttcgagacagacaccaacctgaacttccagaacctgagcgtgatcggcttcagaatcctgctgctgaaagtggccggctttaacctgctgatgaccctgcggctgtggtccagc

SEQ ID NO: 4178 - DNA, 1878 bp, synthetic construct
  source 1..1878: mol_type = other DNA
atggccttaccagtgaccgccttgctcctgccgctggccttgctgctccacgccgccaggccggacagctacgagctgacccagcctcctagcgtgtccgtgtctcctggacagaccgccaccatctcttgcagcggcgatcaactgggcgggaagtacggccactggtatcagaagaagcccggccagagccccgtgctggtgctgtaccaggacagaaaacggcctgccggcatccccgagagattcagcggaagcagcagcggcaacaccatcaccctgaccatcagcggcacccaggccgtggatgaggccgactactactgccaggcttgggacaccaatctgggcggcgtgttcggcggaggcaccaaagtgacagtgctgggacagctcgagatccagaaccctgatcctgccgtgtaccagctgcgggatagcaagagcagcgacaagagcgtgtgtctgttcaccgacttcgacagccagaccaacgtgtcccagagcaaggactccgacgtgtacatcaccgataagtgcgtgctggacatgcggagcatggacttcaagagcaactccgccgtggcctggtccaacaagtccgatttcgcctgcgccaacgccttcaacaacagcattatccccgaggacacattcttcccaagccccgagagcagctgcggctttaccagcgagagctaccagcagggcgtgctgagcgccaccatcctgtacgagatcctgctgggcaaggccaccctgtacgccgtgctggtgtctgccctggtgctgatggctatggtcaagcggaaggacagccggggacgcgccaagagaagcggatctggcgtgaagcagaccctgaatttcgacctgctgaagctggctggcgacgtggaatccaacccaggccctactagtatggactggatttggcgcatccttttccttgtcggcgctgctaccggcgcgcattccttcgaacaggtgcaactggtggaaagcggagccgaagtgaagaaacctggggccagcgtgaaggtgtcctgcaaggccagcggctacacctttaccggctactacatgcactgggtgcgccaggctccaggccagggactggaatggatgggccggatcaaccccaatagcggcggcaccaactacgcccagaaattccagggcagagtgaccatgaccagagacaccagcatcagcaccgcctacatggaactgagccggctgagaagcgacgacaccgccgtgtactactgcgccagccctagaggcagaggcagcgccttcgatatttggggccagggcacactcgtgaccgtgtcctctacgcgtgaggacctgaagaacgtgttcccacctgaggtggccgtgttcgagcctagcgaggccgagatcagccacacccagaaagccaccctcgtgtgcctggctaccggcttctaccccgaccatgtggaactgtcttggtgggtcaacggcaaagaggtgcacagcggcgtgtgtaccgacccccagccactgaaagaacagcccgccctgaacgacagccggtactgcctgagcagcagactgagagtgtccgccaccttctggcagaacccccggaaccacttcagatgccaggtgcagttctacggcctgagcgagaacgacgagtggacccaggacagagccaagcccgtgacccagatcgtgtctgccgaagcctggggcagagccgattgcgacgtgaagctggtggaaaagagcttcgagacagacaccaacctgaacttccagaacctgagcgtgatcggcttcagaatcctgctgctgaaagtggccggctttaacctgctgatgaccctgcggctgtggtccagc

SEQ ID NO: 4179 - DNA, 1887 bp, synthetic construct
  source 1..1887: mol_type = other DNA
atggccttaccagtgaccgccttgctcctgccgctggccttgctgctccacgccgccaggccggacaacttcatgctgacccagccccacagcgtgtccgagagccctggcaagaccgtgaccatctcctgcaccagaagcagcggctctatcgccagcaaatacgtgcagtggtatcagcagaggcccggcagcagccctaccaccgtgatctacgaggacaaccagaggcctagcggcgtgcccgatagattcagcggcagcatcgacaccagcagcaacagcgccagcctgaccatcagcggcctgagaacagaggacgaggccgactactactgccacagctacgacagcaacaaccactccgtgttcggcggaggcaccaaagtgacagtgctgggacagctcgagatccagaaccctgatcctgccgtgtaccagctgcgggatagcaagagcagcgacaagagcgtgtgtctgttcaccgacttcgacagccagaccaacgtgtcccagagcaaggactccgacgtgtacatcaccgataagtgcgtgctggacatgcggagcatggacttcaagagcaactccgccgtggcctggtccaacaagtccgatttcgcctgcgccaacgccttcaacaacagcattatccccgaggacacattcttcccaagccccgagagcagctgcggctttaccagcgagagctaccagcagggcgtgctgagcgccaccatcctgtacgagatcctgctgggcaaggccaccctgtacgccgtgctggtgtctgccctggtgctgatggctatggtcaagcggaaggacagccggggacgcgccaagagaagcggatctggcgtgaagcagaccctgaatttcgacctgctgaagctggctggcgacgtggaatccaacccaggccctactagtatggactggatttggcgcatccttttccttgtcggcgctgctaccggcgcgcattccttcgaagaagtgcaactggtggaaagcgggggaggcgtggtgcagccaggcggatctctgagactgagctgtgccgccagcggcttcaccttcagcagctacgccatgagctgggtgcgccaggcccctggaaaaggcctggaatgggtgtccgccatctctggctctggcggcagcacctactacgccgatagcgtgaagggccggttcagcatcagccgggacaacagcaagaacaccctgtacctccagatgaacagcctgcgggccgaggacaccgccgtgtactactgtgccagaaccagaagctccggggccttcgacatctggggccagggaacactcgtgaccgtgtcctctacgcgtgaggacctgaagaacgtgttcccacctgaggtggccgtgttcgagcctagcgaggccgagatcagccacacccagaaagccaccctcgtgtgcctggctaccggcttctaccccgaccatgtggaactgtcttggtgggtcaacggcaaagaggtgcacagcggcgtgtgtaccgacccccagccactgaaagaacagcccgccctgaacgacagccggtactgcctgagcagcagactgagagtgtccgccaccttctggcagaacccccggaaccacttcagatgccaggtgcagttctacggcctgagcgagaacgacgagtggacccaggacagagccaagcccgtgacccagatcgtgtctgccgaagcctggggcagagccgattgcgacgtgaagctggtggaaaagagcttcgagacagacaccaacctgaacttccagaacctgagcgtgatcggcttcagaatcctgctgctgaaagtggccggctttaacctgctgatgaccctgcggctgtggtccagc

SEQ ID NO: 4180 - DNA, 1872 bp, synthetic construct
  source 1..1872: mol_type = other DNA
atggccttaccagtgaccgccttgctcctgccgctggccttgctgctccacgccgccaggccggacatccagatgaaccagagccccagcagcctgagcgccagcctgggcgataccatcaccatcacctgtcacgccagccagaacatcaacgtgtggctgagctggtatcagcagaagcccggcaacatccccaagctgctgatctacaaggccagcaacctgcacaccggcgtgcccagcagattttctggcagcggctctggcaccggcttcaccattaccatcagctccctccagcccgaggacattgccacctactactgccagcagggccagagctacccctggacatttggcggaggcaccaagctggaaatcaagagactcgagatccagaaccctgatcctgccgtgtaccagctgcgggatagcaagagcagcgacaagagcgtgtgtctgttcaccgacttcgacagccagaccaacgtgtcccagagcaaggactccgacgtgtacatcaccgataagtgcgtgctggacatgcggagcatggacttcaagagcaactccgccgtggcctggtccaacaagtccgatttcgcctgcgccaacgccttcaacaacagcattatccccgaggacacattcttcccaagccccgagagcagctgcggctttaccagcgagagctaccagcagggcgtgctgagcgccaccatcctgtacgagatcctgctgggcaaggccaccctgtacgccgtgctggtgtctgccctggtgctgatggctatggtcaagcggaaggacagccggggacgcgccaagagaagcggatctggcgtgaagcagaccctgaatttcgacctgctgaagctggctggcgacgtggaatccaacccaggccctactagtatggactggatttggcgcatccttttccttgtcggcgctgctaccggcgcgcattccttcgaagaagtgcaactccagcagagcggcccagagcttgtgaagcctggcgcttccgtgaagattagctgcaaagccagcggctacagcttcaccggctacttcatgaactgggtcaagcagagccacggcaagagcctggagtacatcggcagattcaacccctacaacggcgagacactgtacaaccagaagttcaagggcaaggccaccctgaccgtggacaagagcagcagcaccgtgcacatggaactgctgagcgtgaccagcgaggacagcgccgtgtactactgtggcagaagcggcaacgacgacgctatggactattggggccagggcaccagcgtgaccgtgtctagtgctacgcgtgaggacctgaagaacgtgttcccacctgaggtggccgtgttcgagcctagcgaggccgagatcagccacacccagaaagccaccctcgtgtgcctggctaccggcttctaccccgaccatgtggaactgtcttggtgggtcaacggcaaagaggtgcacagcggcgtgtgtaccgacccccagccactgaaagaacagcccgccctgaacgacagccggtactgcctgagcagcagactgagagtgtccgccaccttctggcagaacccccggaaccacttcagatgccaggtgcagttctacggcctgagcgagaacgacgagtggacccaggacagagccaagcccgtgacccagatcgtgtctgccgaagcctggggcagagccgattgcgacgtgaagctggtggaaaagagcttcgagacagacaccaacctgaacttccagaacctgagcgtgatcggcttcagaatcctgctgctgaaagtggccggctttaacctgctgatgaccctgcggctgtggtccagc

SEQ ID NO: 4181 - DNA, 1875 bp, synthetic construct
  source 1..1875: mol_type = other DNA
atggccttaccagtgaccgccttgctcctgccgctggccttgctgctccacgccgccaggccggagatcgtgctgacacagagccctgccaccctgtctctgagccctggcgaaagagccaccctgagctgtagagccagccagagcgtgcggagctacctggcctggtatcagcagaagcctggacaggcccccagactgctgatctacgacgccagcaatcgggccacaggcatccccgccagattttctggctctggcagcggcaccgacttcaccctgacaatcagcagcctggaacccgaggacttcgccgtgtactactgccagcagcggagcaactggccccctacctttggacagggcaccaaggtggaaatcaagctcgagatccagaaccctgatcctgccgtgtaccagctgcgggatagcaagagcagcgacaagagcgtgtgtctgttcaccgacttcgacagccagaccaacgtgtcccagagcaaggactccgacgtgtacatcaccgataagtgcgtgctggacatgcggagcatggacttcaagagcaactccgccgtggcctggtccaacaagtccgatttcgcctgcgccaacgccttcaacaacagcattatccccgaggacacattcttcccaagccccgagagcagctgcggctttaccagcgagagctaccagcagggcgtgctgagcgccaccatcctgtacgagatcctgctgggcaaggccaccctgtacgccgtgctggtgtctgccctggtgctgatggctatggtcaagcggaaggacagccggggacgcgccaagagaagcggatctggcgtgaagcagaccctgaatttcgacctgctgaagctggctggcgacgtggaatccaacccaggccctactagtatggactggatttggcgcatccttttccttgtcggcgctgctaccggcgcgcattccttcgaacaactccaggtgcaggaatctggccccggactcgtgaagcccagcgagacactgagcctgacctgtaccgtgtccggcggcagcatcagcaacagctacttctcctggggctggatcagacagccccctggcaagggcctggaatggatcggcagcttctactacggcgagaaaacctactacaaccccagcctgaagtccagagccaccatcagcatcgacaccagcaagagccagttctccctgaagctgagcagcgtgacagccgccgacaccgccgtgtattattgccccagaggccccaccatgatccggggcgtgatcgactcttggggccagggaacactcgtgaccgtgtcctctacgcgtgaggacctgaagaacgtgttcccacctgaggtggccgtgttcgagcctagcgaggccgagatcagccacacccagaaagccaccctcgtgtgcctggctaccggcttctaccccgaccatgtggaactgtcttggtgggtcaacggcaaagaggtgcacagcggcgtgtgtaccgacccccagccactgaaagaacagcccgccctgaacgacagccggtactgcctgagcagcagactgagagtgtccgccaccttctggcagaacccccggaaccacttcagatgccaggtgcagttctacggcctgagcgagaacgacgagtggacccaggacagagccaagcccgtgacccagatcgtgtctgccgaagcctggggcagagccgattgcgacgtgaagctggtggaaaagagcttcgagacagacaccaacctgaacttccagaacctgagcgtgatcggcttcagaatcctgctgctgaaagtggccggctttaacctgctgatgaccctgcggctgtggtccagc

SEQ ID NO: 4182 - DNA, 1902 bp, synthetic construct
  source 1..1902: mol_type = other DNA
atggccttaccagtgaccgccttgctcctgccgctggccttgctgctccacgccgccaggccggacatcgtgatgacccagacccccctgagcctgcctgtgacacctggcgagcctgccagcatctcctgcagaagcagcagaagcctgctggacagcgacgacggcaacacctacctggactggtatctgcagaaacccggccagagcccccaactgctgatctacaccctgagctacagagccagcggcgtgcccgatagattttccggctctggcagcggcaccgacttcaccctgaagatcagccgggtggaagccgaggacgtgggcgtgtactactgtatgcagcgggtggaatttcccatcaccttcggccagggcaccagactggaaatcaagagactcgagatccagaaccctgatcctgccgtgtaccagctgcgggatagcaagagcagcgacaagagcgtgtgtctgttcaccgacttcgacagccagaccaacgtgtcccagagcaaggactccgacgtgtacatcaccgataagtgcgtgctggacatgcggagcatggacttcaagagcaactccgccgtggcctggtccaacaagtccgatttcgcctgcgccaacgccttcaacaacagcattatccccgaggacacattcttcccaagccccgagagcagctgcggctttaccagcgagagctaccagcagggcgtgctgagcgccaccatcctgtacgagatcctgctgggcaaggccaccctgtacgccgtgctggtgtctgccctggtgctgatggctatggtcaagcggaaggacagccggggacgcgccaagagaagcggatctggcgtgaagcagaccctgaatttcgacctgctgaagctggctggcgacgtggaatccaacccaggccctactagtatggactggatttggcgcatccttttccttgtcggcgctgctaccggcgcgcattccttcgaacaggtgcaactggtggaatctggcgggggagtggtgcagcctggcagatccctgagactgagctgtgccgccagcggcttcatcttcagcagatacggaatgcactgggtgcgccaggcccctggcaagggactgaaatgggtggccgtgatttggtacgacggcagcaacaagctgtacgccgacagcgtgaagggccggttcaccatcagcagagacaacagcaagaacaccctgtacctgcagatgaacagcctgcgggccgaggacaccgccgtgtactattgcgccagagactactacgacaacagccggcaccactggggcttcgactattggggccagggaacccttgtgaccgtgtcctctacgcgtgaggacctgaagaacgtgttcccacctgaggtggccgtgttcgagcctagcgaggccgagatcagccacacccagaaagccaccctcgtgtgcctggctaccggcttctaccccgaccatgtggaactgtcttggtgggtcaacggcaaagaggtgcacagcggcgtgtgtaccgacccccagccactgaaagaacagcccgccctgaacgacagccggtactgcctgagcagcagactgagagtgtccgccaccttctggcagaacccccggaaccacttcagatgccaggtgcagttctacggcctgagcgagaacgacgagtggacccaggacagagccaagcccgtgacccagatcgtgtctgccgaagcctggggcagagccgattgcgacgtgaagctggtggaaaagagcttcgagacagacaccaacctgaacttccagaacctgagcgtgatcggcttcagaatcctgctgctgaaagtggccggctttaacctgctgatgaccctgcggctgtggtccagc

SEQ ID NO: 4183 - DNA, 1872 bp, synthetic construct
  source 1..1872: mol_type = other DNA
atggccttaccagtgaccgccttgctcctgccgctggccttgctgctccacgccgccaggccggagatccagatgacccagagccccagcagcatgtctgccagcctgggcgacaccatcaccatcacatgccaggccacccaggacatcttcaagaacctgaactggtatcagcagaagcccggcaagccccccagcctgctgatctactatgccaccgaactggccgagggcgtgcccagcagattttctggcagcggcagcggctccgactacagcctgaccatcagcaacctggaaagcgaggacttcgccgcctactactgcctccagttcttcgagttcccattcaccttcggctccggcaccaagctggaaatgaagctcgagatccagaaccctgatcctgccgtgtaccagctgcgggatagcaagagcagcgacaagagcgtgtgtctgttcaccgacttcgacagccagaccaacgtgtcccagagcaaggactccgacgtgtacatcaccgataagtgcgtgctggacatgcggagcatggacttcaagagcaactccgccgtggcctggtccaacaagtccgatttcgcctgcgccaacgccttcaacaacagcattatccccgaggacacattcttcccaagccccgagagcagctgcggctttaccagcgagagctaccagcagggcgtgctgagcgccaccatcctgtacgagatcctgctgggcaaggccaccctgtacgccgtgctggtgtctgccctggtgctgatggctatggtcaagcggaaggacagccggggacgcgccaagagaagcggatctggcgtgaagcagaccctgaatttcgacctgctgaagctggctggcgacgtggaatccaacccaggccctactagtatggactggatttggcgcatccttttccttgtcggcgctgctaccggcgcgcattccttcgaacaggtgcaactccagcagtctggcgctgagcttgtgcggcctggcacctctgtgaaggtgtcctgtaaagccagcggctacgtgttcaccaactactggatcgagtggatcaagcagcggccaggccagggcctggaatggatcggcgtgatgaatccaggcagcggcgagacaacctacaacgagaagttcaagggcaaggccaccctgaccgccgacaagagcagcagcacagcctacatgcaactgtcctccctgaccagcgtggacagcgccgtgtacttctgcgccagggaccacgaccgggactactacgctatggactactggggccagggcaccagcgtgaccgtgtcatctacgcgtgaggacctgaagaacgtgttcccacctgaggtggccgtgttcgagcctagcgaggccgagatcagccacacccagaaagccaccctcgtgtgcctggctaccggcttctaccccgaccatgtggaactgtcttggtgggtcaacggcaaagaggtgcacagcggcgtgtgtaccgacccccagccactgaaagaacagcccgccctgaacgacagccggtactgcctgagcagcagactgagagtgtccgccaccttctggcagaacccccggaaccacttcagatgccaggtgcagttctacggcctgagcgagaacgacgagtggacccaggacagagccaagcccgtgacccagatcgtgtctgccgaagcctggggcagagccgattgcgacgtgaagctggtggaaaagagcttcgagacagacaccaacctgaacttccagaacctgagcgtgatcggcttcagaatcctgctgctgaaagtggccggctttaacctgctgatgaccctgcggctgtggtccagc

SEQ ID NO: 4184 - DNA, 1863 bp, synthetic construct
  source 1..1863: mol_type = other DNA
atggccttaccagtgaccgccttgctcctgccgctggccttgctgctccacgccgccaggccggacatcctgctgacacagagccccgccatcctgtccgtgtctccaggcgagagagtgtcctttagctgccgggccagccagaacatcggcaccagcatccactggtatcagcagcggaccaacggcagccccagactgctgattaagtacgccagcgagtccgtgtccggcatccccagcagattttctggcagcggctccggcaccgacttcaccctgagcatcaacagcgtggaaagcgaggacattgccgactactactgccagcacaccaatagctggcccaccacctttggcggaggcaccaagctggaaatcaagagactcgagatccagaaccctgatcctgccgtgtaccagctgcgggatagcaagagcagcgacaagagcgtgtgtctgttcaccgacttcgacagccagaccaacgtgtcccagagcaaggactccgacgtgtacatcaccgataagtgcgtgctggacatgcggagcatggacttcaagagcaactccgccgtggcctggtccaacaagtccgatttcgcctgcgccaacgccttcaacaacagcattatccccgaggacacattcttcccaagccccgagagcagctgcggctttaccagcgagagctaccagcagggcgtgctgagcgccaccatcctgtacgagatcctgctgggcaaggccaccctgtacgccgtgctggtgtctgccctggtgctgatggctatggtcaagcggaaggacagccggggacgcgccaagagaagcggatctggcgtgaagcagaccctgaatttcgacctgctgaagctggctggcgacgtggaatccaacccaggccctactagtatggactggatttggcgcatccttttccttgtcggcgctgctaccggcgcgcattccttcgaacaggtgcaactccagcagtccgacgccgagcttgtgaagcctggcgcttccgtgaagattagctgcaaggccagcggctacaccttcaccgaccacgccattcactgggtcaagcagaagcccgagcagggcctggaatggatcggctacttcagccccggcaacggcgacatcaagtacaacgagaagttcaagggcaaggccaccctgaccgccgacaagagcagcagcacagcctacatgcaactgaacagcctgaccagcgaggactccgccgtgtacttctgcaagcggagctacggcaactacgactactggggccagggcaccacactgaccgtgtctagtacgcgtgaggacctgaagaacgtgttcccacctgaggtggccgtgttcgagcctagcgaggccgagatcagccacacccagaaagccaccctcgtgtgcctggctaccggcttctaccccgaccatgtggaactgtcttggtgggtcaacggcaaagaggtgcacagcggcgtgtgtaccgacccccagccactgaaagaacagcccgccctgaacgacagccggtactgcctgagcagcagactgagagtgtccgccaccttctggcagaacccccggaaccacttcagatgccaggtgcagttctacggcctgagcgagaacgacgagtggacccaggacagagccaagcccgtgacccagatcgtgtctgccgaagcctggggcagagccgattgcgacgtgaagctggtggaaaagagcttcgagacagacaccaacctgaacttccagaacctgagcgtgatcggcttcagaatcctgctgctgaaagtggccggctttaacctgctgatgaccctgcggctgtggtccagc

SEQ ID NO: 4185 - DNA, 1878 bp, synthetic construct
  source 1..1878: mol_type = other DNA
atggccttaccagtgaccgccttgctcctgccgctggccttgctgctccacgccgccaggccggacatcgtgatgacccagagccccgatagcctggccgtgtctctgggagagagagccaccatcaactgcaagagcagccagagcctgctgaacagcggcgaccagaagaactacctgacctggtatcagcagaagcccggccagccccccaagctgctgatctactgggccagcaccagagaaagcggcgtgcccgatagattcagcggcagcggaagtggcaccgacttcaccctgaccatcagttctcttcaggccgaggacgtggccgtgtactactgccagaacgactacagctaccccctgaccttcggccagggcaccaaggtggaaatcaagctcgagatccagaaccctgatcctgccgtgtaccagctgcgggatagcaagagcagcgacaagagcgtgtgtctgttcaccgacttcgacagccagaccaacgtgtcccagagcaaggactccgacgtgtacatcaccgataagtgcgtgctggacatgcggagcatggacttcaagagcaactccgccgtggcctggtccaacaagtccgatttcgcctgcgccaacgccttcaacaacagcattatccccgaggacacattcttcccaagccccgagagcagctgcggctttaccagcgagagctaccagcagggcgtgctgagcgccaccatcctgtacgagatcctgctgggcaaggccaccctgtacgccgtgctggtgtctgccctggtgctgatggctatggtcaagcggaaggacagccggggacgcgccaagagaagcggatctggcgtgaagcagaccctgaatttcgacctgctgaagctggctggcgacgtggaatccaacccaggccctactagtatggactggatttggcgcatccttttccttgtcggcgctgctaccggcgcgcattccttcgaacaggtgcagctggtgcagtctggggccgaagtgaagaaaaccggcagcagcgtgaaggtgtcctgcaaggccagcggctacacctttaccgaccacgccattcacgtgtggcggcaggctccaggacaggccctggaatggatgggccacttcagccccggcaacaccgacatcaagtacaacgacaagttcaagggcagagtgaccctgaccgtggaccgcagcatgagcaccgcctacatggaactgagcagcctgcggagcgaggacaccgccatgtactattgcaagaccagcaccttctttttcgactactggggccagggaacaatggtcaccgtgtccagcacgcgtgaggacctgaagaacgtgttcccacctgaggtggccgtgttcgagcctagcgaggccgagatcagccacacccagaaagccaccctcgtgtgcctggctaccggcttctaccccgaccatgtggaactgtcttggtgggtcaacggcaaagaggtgcacagcggcgtgtgtaccgacccccagccactgaaagaacagcccgccctgaacgacagccggtactgcctgagcagcagactgagagtgtccgccaccttctggcagaacccccggaaccacttcagatgccaggtgcagttctacggcctgagcgagaacgacgagtggacccaggacagagccaagcccgtgacccagatcgtgtctgccgaagcctggggcagagccgattgcgacgtgaagctggtggaaaagagcttcgagacagacaccaacctgaacttccagaacctgagcgtgatcggcttcagaatcctgctgctgaaagtggccggctttaacctgctgatgaccctgcggctgtggtccagc

SEQ ID NO: 4186 - DNA, 1875 bp, synthetic construct
  source 1..1875: mol_type = other DNA
atggccttaccagtgaccgccttgctcctgccgctggccttgctgctccacgccgccaggccggacatccagatgacccagagccccagcagcctgtctgccagcgtgggcgacagagtgaccatcacatgcaaggccagccaggacgtgtccattgccgtggcctggtatcagcagaagcccggcaaggcccccaaggtgctgatctacagcgccagctacagatacaccggcgtgcccgacagattcagcggctctggcagcggcaccgacttcaccttcaccatcagctccctccagcccgaggatattgccgtgtactactgccagcagcactacatcacccccctgacctttggcggaggcaccaaggtggaaatcaagctcgagatccagaaccctgatcctgccgtgtaccagctgcgggatagcaagagcagcgacaagagcgtgtgtctgttcaccgacttcgacagccagaccaacgtgtcccagagcaaggactccgacgtgtacatcaccgataagtgcgtgctggacatgcggagcatggacttcaagagcaactccgccgtggcctggtccaacaagtccgatttcgcctgcgccaacgccttcaacaacagcattatccccgaggacacattcttcccaagccccgagagcagctgcggctttaccagcgagagctaccagcagggcgtgctgagcgccaccatcctgtacgagatcctgctgggcaaggccaccctgtacgccgtgctggtgtctgccctggtgctgatggctatggtcaagcggaaggacagccggggacgcgccaagagaagcggatctggcgtgaagcagaccctgaatttcgacctgctgaagctggctggcgacgtggaatccaacccaggccctactagtatggactggatttggcgcatccttttccttgtcggcgctgctaccggcgcgcattccttcgaacagatccaactggtgcagagcggccacgaagtgaagaaacctggggccagcgtgaaggtgtcctgcaaagccagcggctacacctttaccaactacggcatgaactgggtgcgccaggcccctggacagggcctggaatggatgggctggatcaacaccaagaccggcgagcccacctacgccgaagagttcaagggcagattcgtgttcagcctggaaaccagcgcctccaccgcctacctccagatcagctctctgaaggccgaggacaccgccatgtacttttgcggcagaggcggctacggcagcagctactggtacttcgatgtgtggggccagggcaccaccgtgaccgtgtcatctacgcgtgaggacctgaagaacgtgttcccacctgaggtggccgtgttcgagcctagcgaggccgagatcagccacacccagaaagccaccctcgtgtgcctggctaccggcttctaccccgaccatgtggaactgtcttggtgggtcaacggcaaagaggtgcacagcggcgtgtgtaccgacccccagccactgaaagaacagcccgccctgaacgacagccggtactgcctgagcagcagactgagagtgtccgccaccttctggcagaacccccggaaccacttcagatgccaggtgcagttctacggcctgagcgagaacgacgagtggacccaggacagagccaagcccgtgacccagatcgtgtctgccgaagcctggggcagagccgattgcgacgtgaagctggtggaaaagagcttcgagacagacaccaacctgaacttccagaacctgagcgtgatcggcttcagaatcctgctgctgaaagtggccggctttaacctgctgatgaccctgcggctgtggtccagc

SEQ ID NO: 4187 - DNA, 1881 bp, synthetic construct
  source 1..1881: mol_type = other DNA
atggccttaccagtgaccgccttgctcctgccgctggccttgctgctccacgccgccaggccggacatcgtgatgacccagagccccgatagcctggccgtgtctctgggagagagagccaccatcaactgccgggccagcaagagcgtgtccaccagcggctacagctacatgcactggtatcagcagaagcccggccagccccccaagctgctgatctacctggcctccaacctggaaagcggcgtgcccgatagattcagcggcagcggctctggcaccgacttcaccctgaccatcagttctcttcaggccgaggacgtggccgtgtactactgccagcacagcagagagctgccctacaccttcggccagggcaccaagctggaaatcaagctcgagatccagaaccctgatcctgccgtgtaccagctgcgggatagcaagagcagcgacaagagcgtgtgtctgttcaccgacttcgacagccagaccaacgtgtcccagagcaaggactccgacgtgtacatcaccgataagtgcgtgctggacatgcggagcatggacttcaagagcaactccgccgtggcctggtccaacaagtccgatttcgcctgcgccaacgccttcaacaacagcattatccccgaggacacattcttcccaagccccgagagcagctgcggctttaccagcgagagctaccagcagggcgtgctgagcgccaccatcctgtacgagatcctgctgggcaaggccaccctgtacgccgtgctggtgtctgccctggtgctgatggctatggtcaagcggaaggacagccggggacgcgccaagagaagcggatctggcgtgaagcagaccctgaatttcgacctgctgaagctggctggcgacgtggaatccaacccaggccctactagtatggactggatttggcgcatccttttccttgtcggcgctgctaccggcgcgcattccttcgaacaggtgcaactccaggaatctggccctggccttgtgaagcccagcgagacactgagcctgacctgtaccgtgtccggcggcagcatcagctcttacggcgtgcactggattcggcagcctccaggcaagggcctggaatggatcggcgtgatctggacctccggcgtgaccgactacaacagcgccctgatgggcagagtgaccatctccgtggacaccagcaagaaccagttcagcctgaagctgagcagcgtgacagccgccgataccgccgtgtattattgcgccagagatggcgactacgaccgctacacaatggactactggggccagggaacccttgtgaccgtgtcctctacgcgtgaggacctgaagaacgtgttcccacctgaggtggccgtgttcgagcctagcgaggccgagatcagccacacccagaaagccaccctcgtgtgcctggctaccggcttctaccccgaccatgtggaactgtcttggtgggtcaacggcaaagaggtgcacagcggcgtgtgtaccgacccccagccactgaaagaacagcccgccctgaacgacagccggtactgcctgagcagcagactgagagtgtccgccaccttctggcagaacccccggaaccacttcagatgccaggtgcagttctacggcctgagcgagaacgacgagtggacccaggacagagccaagcccgtgacccagatcgtgtctgccgaagcctggggcagagccgattgcgacgtgaagctggtggaaaagagcttcgagacagacaccaacctgaacttccagaacctgagcgtgatcggcttcagaatcctgctgctgaaagtggccggctttaacctgctgatgaccctgcggctgtggtccagc

SEQ ID NO: 4188 - DNA, 1881 bp, synthetic construct
  source 1..1881: mol_type = other DNA
atggccttaccagtgaccgccttgctcctgccgctggccttgctgctccacgccgccaggccggacatccagatgacccagagccccagcagcctgtctgccagcgtgggcgacagagtgaccatcacctgtagagccagccagagcatcggcaccagcctgcactggtatcagcagaagcctggcaaggcccccaagctgctgattaagttcgccagcagactgcagagcggcgtgcccagcagattttctggcagcggctccggcaccgacttcaccctgacaatcagctccctgcagcccgaggacttcgccacctactactgccagcagagccccggcttccctccaacctttggacagggcaccaagctggaaatcaagcggctcgagatccagaaccctgatcctgccgtgtaccagctgcgggatagcaagagcagcgacaagagcgtgtgtctgttcaccgacttcgacagccagaccaacgtgtcccagagcaaggactccgacgtgtacatcaccgataagtgcgtgctggacatgcggagcatggacttcaagagcaactccgccgtggcctggtccaacaagtccgatttcgcctgcgccaacgccttcaacaacagcattatccccgaggacacattcttcccaagccccgagagcagctgcggctttaccagcgagagctaccagcagggcgtgctgagcgccaccatcctgtacgagatcctgctgggcaaggccaccctgtacgccgtgctggtgtctgccctggtgctgatggctatggtcaagcggaaggacagccggggacgcgccaagagaagcggatctggcgtgaagcagaccctgaatttcgacctgctgaagctggctggcgacgtggaatccaacccaggccctactagtatggactggatttggcgcatccttttccttgtcggcgctgctaccggcgcgcattccttcgaacaggtgcaactggtggaatctggcggcggacttgtgaagccaggcggcagcctgagactgagctgtgccgccagcggcttcagcatcaccaccagcggctactactggacctggatcagacagttccccggcaagggcctggaatggatgggctacatcggctacaacagcaagacctactacaaccccgccctgaagtcccggatcaccatcagcagagacaacgccaagaacagcctgtacctgcagatgaactccctgagagccgaggataccgccgtgtactactgcgccagatccctgtacggcggctacaaggacgccttcgatagctggggccagggaacccttgtgaccgtgtctagcacgcgtgaggacctgaagaacgtgttcccacctgaggtggccgtgttcgagcctagcgaggccgagatcagccacacccagaaagccaccctcgtgtgcctggctaccggcttctaccccgaccatgtggaactgtcttggtgggtcaacggcaaagaggtgcacagcggcgtgtgtaccgacccccagccactgaaagaacagcccgccctgaacgacagccggtactgcctgagcagcagactgagagtgtccgccaccttctggcagaacccccggaaccacttcagatgccaggtgcagttctacggcctgagcgagaacgacgagtggacccaggacagagccaagcccgtgacccagatcgtgtctgccgaagcctggggcagagccgattgcgacgtgaagctggtggaaaagagcttcgagacagacaccaacctgaacttccagaacctgagcgtgatcggcttcagaatcctgctgctgaaagtggccggctttaacctgctgatgaccctgcggctgtggtccagc

SEQ ID NO: 4189 - DNA, 1896 bp, synthetic construct
  source 1..1896: mol_type = other DNA
atggccttaccagtgaccgccttgctcctgccgctggccttgctgctccacgccgccaggccggacgagatcgtgctgacccagagccctctgagcctgcctgtgacacctggcgagcctgccagcatctcctgtagaagcagccagagcctgctgcacagcatcggctacaactacctggactggtatctccagaagcccggccagagcccccaactgctgatctacctgggcagcaacagagccagcggcgtgcccgatagattttccggcagcggctccggcaccgacttcaccctgaagatcagccgggtggaagccgaggacgtgggcgtgtactactgtatgcaggccctccagacccccctgacctttggcggaggcaccaaggtggaaatcaagcggctcgagatccagaaccctgatcctgccgtgtaccagctgcgggatagcaagagcagcgacaagagcgtgtgtctgttcaccgacttcgacagccagaccaacgtgtcccagagcaaggactccgacgtgtacatcaccgataagtgcgtgctggacatgcggagcatggacttcaagagcaactccgccgtggcctggtccaacaagtccgatttcgcctgcgccaacgccttcaacaacagcattatccccgaggacacattcttcccaagccccgagagcagctgcggctttaccagcgagagctaccagcagggcgtgctgagcgccaccatcctgtacgagatcctgctgggcaaggccaccctgtacgccgtgctggtgtctgccctggtgctgatggctatggtcaagcggaaggacagccggggacgcgccaagagaagcggatctggcgtgaagcagaccctgaatttcgacctgctgaagctggctggcgacgtggaatccaacccaggccctactagtatggactggatttggcgcatccttttccttgtcggcgctgctaccggcgcgcattccttcgaagaagtgcaactggtggaaagcggaggcggcgtggtgcagcctggaagaagcctgagactgagctgtgccgccagcggcttcaccttccggtcctacggaatgcactgggtgcgccaggcccctggcaaaggactggaatgggtggccgtgatctcctacgacggctccaacaagtactacaccgacagcgtgaacggcagattcaccatcagcagagacaacagcaagaacaccctgtacctccagatgaacagcctgcgggccgaggacaccgccgtgtactattgtgctagaggcggaggctactacgagacaagcggccctgattactggggccagggcacactcgtgaccgtgtctagtacgcgtgaggacctgaagaacgtgttcccacctgaggtggccgtgttcgagcctagcgaggccgagatcagccacacccagaaagccaccctcgtgtgcctggctaccggcttctaccccgaccatgtggaactgtcttggtgggtcaacggcaaagaggtgcacagcggcgtgtgtaccgacccccagccactgaaagaacagcccgccctgaacgacagccggtactgcctgagcagcagactgagagtgtccgccaccttctggcagaacccccggaaccacttcagatgccaggtgcagttctacggcctgagcgagaacgacgagtggacccaggacagagccaagcccgtgacccagatcgtgtctgccgaagcctggggcagagccgattgcgacgtgaagctggtggaaaagagcttcgagacagacaccaacctgaacttccagaacctgagcgtgatcggcttcagaatcctgctgctgaaagtggccggctttaacctgctgatgaccctgcggctgtggtccagc

SEQ ID NO: 4190 - DNA, 1890 bp, synthetic construct
  source 1..1890: mol_type = other DNA
atggccttaccagtgaccgccttgctcctgccgctggccttgctgctccacgccgccaggccggacgacgtcgtgatgacccagagccctctgagcctgcctgtgacacctggcgagcctgccagcatctcctgtagaagcagccagagcctgctgcacagcatcggctacaactacctgcactggtttctccagaagcccggccagagcccccaactgctgatctacctgggcagcaacagagccagcggcgtgcccgatagattttccggcagcggctccggcaccgacttcaccctgaagatcagccgggtggaagccgaggacgtgggcgtgtactactgtatgcaggccctccagacccctcccacctttggacagggcaccagactggaaatcaagcggctcgagatccagaaccctgatcctgccgtgtaccagctgcgggatagcaagagcagcgacaagagcgtgtgtctgttcaccgacttcgacagccagaccaacgtgtcccagagcaaggactccgacgtgtacatcaccgataagtgcgtgctggacatgcggagcatggacttcaagagcaactccgccgtggcctggtccaacaagtccgatttcgcctgcgccaacgccttcaacaacagcattatccccgaggacacattcttcccaagccccgagagcagctgcggctttaccagcgagagctaccagcagggcgtgctgagcgccaccatcctgtacgagatcctgctgggcaaggccaccctgtacgccgtgctggtgtctgccctggtgctgatggctatggtcaagcggaaggacagccggggacgcgccaagagaagcggatctggcgtgaagcagaccctgaatttcgacctgctgaagctggctggcgacgtggaatccaacccaggccctactagtatggactggatttggcgcatccttttccttgtcggcgctgctaccggcgcgcattccttcgaacaactccaactccaggaaagcggccctggcctcgtgaagcctagcggcacactgagcctgacatgtgccgtgtctggcggcagcatcagcagcagcaactggtggtcttgggtgcgccagcctcctggcaagggcctggaatggatcggcgaaatctaccacagcggcagcaccaactacaaccccagcctgaagtccagagtgaccatcagcgtggacaagagcaagaaccagttctccctgaagctgagcagcgtgacagccgccgataccgccgtgtactattgcgtgggcagcccctacggcgactacgtgctggattattggggccagggcaccctcgtgaccgtgtctagtacgcgtgaggacctgaagaacgtgttcccacctgaggtggccgtgttcgagcctagcgaggccgagatcagccacacccagaaagccaccctcgtgtgcctggctaccggcttctaccccgaccatgtggaactgtcttggtgggtcaacggcaaagaggtgcacagcggcgtgtgtaccgacccccagccactgaaagaacagcccgccctgaacgacagccggtactgcctgagcagcagactgagagtgtccgccaccttctggcagaacccccggaaccacttcagatgccaggtgcagttctacggcctgagcgagaacgacgagtggacccaggacagagccaagcccgtgacccagatcgtgtctgccgaagcctggggcagagccgattgcgacgtgaagctggtggaaaagagcttcgagacagacaccaacctgaacttccagaacctgagcgtgatcggcttcagaatcctgctgctgaaagtggccggctttaacctgctgatgaccctgcggctgtggtccagc

SEQ ID NO: 4191 - DNA, 1884 bp, synthetic construct
  source 1..1884: mol_type = other DNA
atggccttaccagtgaccgccttgctcctgccgctggccttgctgctccacgccgccaggccggacgagatcgtgctgacacagagccctggcaccctgagcctgtctctgggagagagagccacactgagctgtcgggccagccagtctatcagcagcagcttcctggcctggtatcagcagaagcccggccaggcccctaagctgctgatctacgccgccagcacaagagccaccggcatccccgatagattcagcggctctggcagcggcaccgacttcaccctgaccatcagcagactggaacccgaggacttcgccgtgtactactgccagcagtacggcagaagcctgagcttcggcggaggcaccaaggtggaagtgaagctcgagatccagaaccctgatcctgccgtgtaccagctgcgggatagcaagagcagcgacaagagcgtgtgtctgttcaccgacttcgacagccagaccaacgtgtcccagagcaaggactccgacgtgtacatcaccgataagtgcgtgctggacatgcggagcatggacttcaagagcaactccgccgtggcctggtccaacaagtccgatttcgcctgcgccaacgccttcaacaacagcattatccccgaggacacattcttcccaagccccgagagcagctgcggctttaccagcgagagctaccagcagggcgtgctgagcgccaccatcctgtacgagatcctgctgggcaaggccaccctgtacgccgtgctggtgtctgccctggtgctgatggctatggtcaagcggaaggacagccggggacgcgccaagagaagcggatctggcgtgaagcagaccctgaatttcgacctgctgaagctggctggcgacgtggaatccaacccaggccctactagtatggactggatttggcgcatccttttccttgtcggcgctgctaccggcgcgcattccttcgaacaggtgcaactccagcagtctggccccggactcgtgaagcctagccagacactgagcctgacctgcgccatcagcggcgatagcgtgtccggcaatagcgccacctggaactggatcagacagagcccatctcggggcctggaatggctgggccggacctactaccgcagcaagtggaaccacgactacgccgagagcgtgaagtcccggatcaccatcaaccccgacaccagcaagaaccagttctccttgcaactgaacagcgtgacccccgaggacacagccgtgtattattgcgccagaggcgacagcagctcttggtacgccttcgactattggggccagggcaccctcgtgaccgtgtctagtacgcgtgaggacctgaagaacgtgttcccacctgaggtggccgtgttcgagcctagcgaggccgagatcagccacacccagaaagccaccctcgtgtgcctggctaccggcttctaccccgaccatgtggaactgtcttggtgggtcaacggcaaagaggtgcacagcggcgtgtgtaccgacccccagccactgaaagaacagcccgccctgaacgacagccggtactgcctgagcagcagactgagagtgtccgccaccttctggcagaacccccggaaccacttcagatgccaggtgcagttctacggcctgagcgagaacgacgagtggacccaggacagagccaagcccgtgacccagatcgtgtctgccgaagcctggggcagagccgattgcgacgtgaagctggtggaaaagagcttcgagacagacaccaacctgaacttccagaacctgagcgtgatcggcttcagaatcctgctgctgaaagtggccggctttaacctgctgatgaccctgcggctgtggtccagc

SEQ ID NO: 4192 - DNA, 1881 bp, synthetic construct
  source 1..1881: mol_type = other DNA
atggccttaccagtgaccgccttgctcctgccgctggccttgctgctccacgccgccaggccggaccagagcgtcgtgacacagcctcctagcgtgtcagtggcccctggcaagaccgccagaatcacctgtggccggaacaacatcggcagcaagagcgtgcactggtatcagcagaagcccggccaggctcctgtgctggtggtgtacgacgacagcgacagacccagcggcatccccgagagattcagcggcagcaactccggcaataccgccaccctgaccatcagcagagtggaagccggcgacgaggccgactactactgccaagtgtgggacagcagcagcgatcacgtggtgtttggcggaggcaccaagctgacagtgctgggtctcgagatccagaaccctgatcctgccgtgtaccagctgcgggatagcaagagcagcgacaagagcgtgtgtctgttcaccgacttcgacagccagaccaacgtgtcccagagcaaggactccgacgtgtacatcaccgataagtgcgtgctggacatgcggagcatggacttcaagagcaactccgccgtggcctggtccaacaagtccgatttcgcctgcgccaacgccttcaacaacagcattatccccgaggacacattcttcccaagccccgagagcagctgcggctttaccagcgagagctaccagcagggcgtgctgagcgccaccatcctgtacgagatcctgctgggcaaggccaccctgtacgccgtgctggtgtctgccctggtgctgatggctatggtcaagcggaaggacagccggggacgcgccaagagaagcggatctggcgtgaagcagaccctgaatttcgacctgctgaagctggctggcgacgtggaatccaacccaggccctactagtatggactggatttggcgcatccttttccttgtcggcgctgctaccggcgcgcattccttcgaagtgcaactggtgcagtctggcggaggggtcatgcggcctggcggatctctgagactgtcttgtgccgccagcggcttcaccttcgacgactacggcatgagctgggtgcgccaggcccctggaaaaggcctggaatgggtgtccggcatcaactggaatggcggcagcaccggctacgccgattctgtgcggggcagattcaccatcagccgggacaacgccaagaacagcctgtacctgcagatgaactccctgcgggccgaggacaccgccctgtactattgcgccagagagcggggctacggctaccacgaccctcacgattattggggccagggcacccttgttaccgtgtcctctacgcgtgaggacctgaagaacgtgttcccacctgaggtggccgtgttcgagcctagcgaggccgagatcagccacacccagaaagccaccctcgtgtgcctggctaccggcttctaccccgaccatgtggaactgtcttggtgggtcaacggcaaagaggtgcacagcggcgtgtgtaccgacccccagccactgaaagaacagcccgccctgaacgacagccggtactgcctgagcagcagactgagagtgtccgccaccttctggcagaacccccggaaccacttcagatgccaggtgcagttctacggcctgagcgagaacgacgagtggacccaggacagagccaagcccgtgacccagatcgtgtctgccgaagcctggggcagagccgattgcgacgtgaagctggtggaaaagagcttcgagacagacaccaacctgaacttccagaacctgagcgtgatcggcttcagaatcctgctgctgaaagtggccggctttaacctgctgatgaccctgcggctgtggtccagc

SEQ ID NO: 4193 - DNA, 1920 bp, synthetic construct
  source 1..1920: mol_type = other DNA
atggccttaccagtgaccgccttgctcctgccgctggccttgctgctccacgccgccaggccggaacagaaactcatcagtgaagaagacctggaattccaggctgtcgtgacacagcctcctagcgcctctggcacaccaggccagagagtgaccatctcctgtagcggcagcagcagcaacatcggcagcaacaccgtgaactggtatcagcaggtgcccggcaccgctcccaagctgctgatctacagcaacaaccagcggcccagcggcgtgcccgatagattttctggcagcaagagcggcaccagcgccagcctggctatctctggactccagtccgaggacgaggccgactactattgcgccgcctgggacgatagcctgaacggctgggtgttcggcggaggcaccaagctgacagtgctgctcgagatccagaaccctgatcctgccgtgtaccagctgcgggatagcaagagcagcgacaagagcgtgtgtctgttcaccgacttcgacagccagaccaacgtgtcccagagcaaggactccgacgtgtacatcaccgataagtgcgtgctggacatgcggagcatggacttcaagagcaactccgccgtggcctggtccaacaagtccgatttcgcctgcgccaacgccttcaacaacagcattatccccgaggacacattcttcccaagccccgagagcagctgcggctttaccagcgagagctaccagcagggcgtgctgagcgccaccatcctgtacgagatcctgctgggcaaggccaccctgtacgccgtgctggtgtctgccctggtgctgatggctatggtcaagcggaaggacagccggggacgcgccaagagaagcggatctggcgtgaagcagaccctgaatttcgacctgctgaagctggctggcgacgtggaatccaacccaggccctactagtatggactggatttggcgcatccttttccttgtcggcgctgctaccggcgcgcattccttcgaacagatgcaactggtgcagagcggagccgaagtgaaagagcctggcgagagcctgcggatctcctgcaagggcagcggctacagcttcaccaatttctggatctcttgggtgcgccagatgcccggcaagggcctggaatggatgggcagagtggaccccggctactcctacagcacctacagccctagcttccagggccacgtgaccatcagcgccgacaagagcaccagcaccgcctacctccagtggaacagcctgaaggccagcgacaccgccatgtactactgcgccagagtgcagtacagcggctattacgattggttcgacccctggggccagggcacactcgtgacagtgtcaagcacgcgtgaggacctgaagaacgtgttcccacctgaggtggccgtgttcgagcctagcgaggccgagatcagccacacccagaaagccaccctcgtgtgcctggctaccggcttctaccccgaccatgtggaactgtcttggtgggtcaacggcaaagaggtgcacagcggcgtgtgtaccgacccccagccactgaaagaacagcccgccctgaacgacagccggtactgcctgagcagcagactgagagtgtccgccaccttctggcagaacccccggaaccacttcagatgccaggtgcagttctacggcctgagcgagaacgacgagtggacccaggacagagccaagcccgtgacccagatcgtgtctgccgaagcctggggcagagccgattgcgacgtgaagctggtggaaaagagcttcgagacagacaccaacctgaacttccagaacctgagcgtgatcggcttcagaatcctgctgctgaaagtggccggctttaacctgctgatgaccctgcggctgtggtccagc

SEQ ID NO: 4194 - DNA, 1902 bp, synthetic construct
  source 1..1902: mol_type = other DNA
atggccttaccagtgaccgccttgctcctgccgctggccttgctgctccacgccgccaggccggaacagaaactcatcagtgaagaagacctggaattcgacatccagatgacccagagccccagcacactgagcgccagcgtgggcgacagagtgaccatcacctgtcgggccagccagaacatcaacaagtggctggcctggtatcagcagaggcccggaaaagccccccagctgctgatctacaaggccagcagcctggaaagcggcgtgcccagcagattttctggcagcggctctggcaccgagtacaccctgaccatcagctccctccagcccgacgacttcgccacctactactgccagcagtacaacagctacgccaccttcggccagggcaccaaggtggaaatcaagagactcgagatccagaaccctgatcctgccgtgtaccagctgcgggatagcaagagcagcgacaagagcgtgtgtctgttcaccgacttcgacagccagaccaacgtgtcccagagcaaggactccgacgtgtacatcaccgataagtgcgtgctggacatgcggagcatggacttcaagagcaactccgccgtggcctggtccaacaagtccgatttcgcctgcgccaacgccttcaacaacagcattatccccgaggacacattcttcccaagccccgagagcagctgcggctttaccagcgagagctaccagcagggcgtgctgagcgccaccatcctgtacgagatcctgctgggcaaggccaccctgtacgccgtgctggtgtctgccctggtgctgatggctatggtcaagcggaaggacagccggggacgcgccaagagaagcggatctggcgtgaagcagaccctgaatttcgacctgctgaagctggctggcgacgtggaatccaacccaggccctactagtatggactggatttggcgcatccttttccttgtcggcgctgctaccggcgcgcattccttcgaacaggtgcagctggtgcagtctggggccgaagtgaagaagcctggcgagagcctgaagatcagctgcaagggctccggctacaacttctctaacaagtggatcggctgggtgcgccagctgcctggcagaggactggaatggatcgccatcatctaccccggctacagcgacatcacctacagccccagcttccagggccgcgtgacaatcagcgccgacaccagcatcaacaccgcctacctgcactggcacagcctgaaggccagcgacaccgccatgtactactgcgtgcggcatacagccctggctggcttcgattattggggcctgggcaccctcgtgaccgtgtctagtacgcgtgaggacctgaagaacgtgttcccacctgaggtggccgtgttcgagcctagcgaggccgagatcagccacacccagaaagccaccctcgtgtgcctggctaccggcttctaccccgaccatgtggaactgtcttggtgggtcaacggcaaagaggtgcacagcggcgtgtgtaccgacccccagccactgaaagaacagcccgccctgaacgacagccggtactgcctgagcagcagactgagagtgtccgccaccttctggcagaacccccggaaccacttcagatgccaggtgcagttctacggcctgagcgagaacgacgagtggacccaggacagagccaagcccgtgacccagatcgtgtctgccgaagcctggggcagagccgattgcgacgtgaagctggtggaaaagagcttcgagacagacaccaacctgaacttccagaacctgagcgtgatcggcttcagaatcctgctgctgaaagtggccggctttaacctgctgatgaccctgcggctgtggtccagc

SEQ ID NO: 4195 - DNA, 1878 bp, synthetic construct
  source 1..1878: mol_type = other DNA
atggccttaccagtgaccgccttgctcctgccgctggccttgctgctccacgccgccaggccggacatcgtgctgacacagagccctgcttctctggccgtgtctctgggacagagagccaccatcagctgtagagccagcgagagcgtggacaactacggcaacaccttcatgcactggtatcagcagaagcccggccagcctcctaagctgctgatctacagagccagcaacctggaaagcggcatccccgccagattttctggcagcggcagcagaaccgacttcaccctgaccatcaatcccgtggaagccgacgacgtggcaacctactactgccagcagagcaacgaggaccctcctacatttggagccggcaccaagctggaactgaaactcgagatccagaaccctgatcctgccgtgtaccagctgcgggatagcaagagcagcgacaagagcgtgtgtctgttcaccgacttcgacagccagaccaacgtgtcccagagcaaggactccgacgtgtacatcaccgataagtgcgtgctggacatgcggagcatggacttcaagagcaactccgccgtggcctggtccaacaagtccgatttcgcctgcgccaacgccttcaacaacagcattatccccgaggacacattcttcccaagccccgagagcagctgcggctttaccagcgagagctaccagcagggcgtgctgagcgccaccatcctgtacgagatcctgctgggcaaggccaccctgtacgccgtgctggtgtctgccctggtgctgatggctatggtcaagcggaaggacagccggggacgcgccaagagaagcggatctggcgtgaagcagaccctgaatttcgacctgctgaagctggctggcgacgtggaatccaacccaggccctactagtatggactggatttggcgcatccttttccttgtcggcgctgctaccggcgcgcattccttcgaacagattcagctggtgcagtctggccccgagctgaagaaacctggcgagacagtgaagatcagctgcaaggccagcggctacatcttcaccaattacggcatgaactgggtcaagcaggcccctggcaagagcttcaagtggatgggctggatcaacacctacaccggcgagagcacatacagcgccgacttcaagggcagattcgccttcagcctggaaaccagcgccagcacagcctacctgcacatcaacgacctgaagaacgaggacaccgccacctacttttgcgccagaagcggcggctacgaccctatggattattggggccagggcaccagcgtgaccgtttcttctacgcgtgaggacctgaagaacgtgttcccacctgaggtggccgtgttcgagcctagcgaggccgagatcagccacacccagaaagccaccctcgtgtgcctggctaccggcttctaccccgaccatgtggaactgtcttggtgggtcaacggcaaagaggtgcacagcggcgtgtgtaccgacccccagccactgaaagaacagcccgccctgaacgacagccggtactgcctgagcagcagactgagagtgtccgccaccttctggcagaacccccggaaccacttcagatgccaggtgcagttctacggcctgagcgagaacgacgagtggacccaggacagagccaagcccgtgacccagatcgtgtctgccgaagcctggggcagagccgattgcgacgtgaagctggtggaaaagagcttcgagacagacaccaacctgaacttccagaacctgagcgtgatcggcttcagaatcctgctgctgaaagtggccggctttaacctgctgatgaccctgcggctgtggtccagc

SEQ ID NO: 4196 - DNA, 1875 bp, synthetic construct
  source 1..1875: mol_type = other DNA
atggccttaccagtgaccgccttgctcctgccgctggccttgctgctccacgccgccaggccggacgagatcgtgctgacacagagccctggcaccctgagcctgtctccaggcgaaagagccacactgagctgtcgggccagccagagcgtgtccaatacctacctggcctggtatcaccagaggcccggacaggctccccggctgctgatctatggcgcttctagcagagccaccggcatccccgatagattcagcggctctggcagcggcaccgacttcgccctgacaatcagctccctggaacccgaggacttcgccgtgtactactgccagcagtacagcaactcctggaccttcggccagggcaccaaggtggaaatcaagagactcgagatccagaaccctgatcctgccgtgtaccagctgcgggatagcaagagcagcgacaagagcgtgtgtctgttcaccgacttcgacagccagaccaacgtgtcccagagcaaggactccgacgtgtacatcaccgataagtgcgtgctggacatgcggagcatggacttcaagagcaactccgccgtggcctggtccaacaagtccgatttcgcctgcgccaacgccttcaacaacagcattatccccgaggacacattcttcccaagccccgagagcagctgcggctttaccagcgagagctaccagcagggcgtgctgagcgccaccatcctgtacgagatcctgctgggcaaggccaccctgtacgccgtgctggtgtctgccctggtgctgatggctatggtcaagcggaaggacagccggggacgcgccaagagaagcggatctggcgtgaagcagaccctgaatttcgacctgctgaagctggctggcgacgtggaatccaacccaggccctactagtatggactggatttggcgcatccttttccttgtcggcgctgctaccggcgcgcattccttcgaacaggtgcaactggtggaatctggcgggggagtggtgcagcctggcagaagcctgagactgtcttgtgccgccagcggcttcaccttcagcagctacgacatgcactgggtgcgccaggcccctggcaaaggactggaatgggtggccgtgatctcctacgacggcaccaacgagtattacgccgacagcgtgaagggccggttcaccatctccagagacaccagcaagaacaccctgtacctccagatgaacagcctgcgggccgaggacacagccgtgtattattgcgccagagagcggtacttcgactggtccttcgactactggggccagggaaccctggtgtccgtgtctagtacgcgtgaggacctgaagaacgtgttcccacctgaggtggccgtgttcgagcctagcgaggccgagatcagccacacccagaaagccaccctcgtgtgcctggctaccggcttctaccccgaccatgtggaactgtcttggtgggtcaacggcaaagaggtgcacagcggcgtgtgtaccgacccccagccactgaaagaacagcccgccctgaacgacagccggtactgcctgagcagcagactgagagtgtccgccaccttctggcagaacccccggaaccacttcagatgccaggtgcagttctacggcctgagcgagaacgacgagtggacccaggacagagccaagcccgtgacccagatcgtgtctgccgaagcctggggcagagccgattgcgacgtgaagctggtggaaaagagcttcgagacagacaccaacctgaacttccagaacctgagcgtgatcggcttcagaatcctgctgctgaaagtggccggctttaacctgctgatgaccctgcggctgtggtccagc

SEQ ID NO: 4197 - DNA, 1872 bp, synthetic construct
  source 1..1872: mol_type = other DNA
atggccttaccagtgaccgccttgctcctgccgctggccttgctgctccacgccgccaggccggacgagctgacacaggaccctgctgtgtctgttgccctgggccagacagtgcggattacctgtcaaggcgacagcctgagaagcaactacgccaactggtatcagcagaagcccggacaggctcccgtgctggttatctacggccagaacaacagacccagcggcatccccgatagattcagcggctctagctctggcaataccgccagcctgacaatcactggcgctcaggctgccgatgaggccgactactactgcgatagcagagtgtccaccggcaatcacgtggtgtttggcggcggaacaaagctgacagtgctcggacaactcgagatccagaaccctgatcctgccgtgtaccagctgcgggatagcaagagcagcgacaagagcgtgtgtctgttcaccgacttcgacagccagaccaacgtgtcccagagcaaggactccgacgtgtacatcaccgataagtgcgtgctggacatgcggagcatggacttcaagagcaactccgccgtggcctggtccaacaagtccgatttcgcctgcgccaacgccttcaacaacagcattatccccgaggacacattcttcccaagccccgagagcagctgcggctttaccagcgagagctaccagcagggcgtgctgagcgccaccatcctgtacgagatcctgctgggcaaggccaccctgtacgccgtgctggtgtctgccctggtgctgatggctatggtcaagcggaaggacagccggggacgcgccaagagaagcggatctggcgtgaagcagaccctgaatttcgacctgctgaagctggctggcgacgtggaatccaacccaggccctactagtatggactggatttggcgcatccttttccttgtcggcgctgctaccggcgcgcattccttcgaagaagttcagctggtgcagagcggagccgaagtgaagaaacctggggcctctgtgaaggtgtcctgcaaggcttccggctacacctttaccagctacgccatgcactgggtccgacaggcacctggacaacggcttgaatggatgggctggatcaacgccggcaacggcaacaccaagtacagccagaaattccagggccgcgtgaccatcaccagagatacaagcgccagcaccgcctacatggaactgtctagcctgagatccgaggacaccgccgtgtactactgtgccagagacatcagctacggcagcttcgactattggggccagggcacactggtcaccgttagctctacgcgtgaggacctgaagaacgtgttcccacctgaggtggccgtgttcgagcctagcgaggccgagatcagccacacccagaaagccaccctcgtgtgcctggctaccggcttctaccccgaccatgtggaactgtcttggtgggtcaacggcaaagaggtgcacagcggcgtgtgtaccgacccccagccactgaaagaacagcccgccctgaacgacagccggtactgcctgagcagcagactgagagtgtccgccaccttctggcagaacccccggaaccacttcagatgccaggtgcagttctacggcctgagcgagaacgacgagtggacccaggacagagccaagcccgtgacccagatcgtgtctgccgaagcctggggcagagccgattgcgacgtgaagctggtggaaaagagcttcgagacagacaccaacctgaacttccagaacctgagcgtgatcggcttcagaatcctgctgctgaaagtggccggctttaacctgctgatgaccctgcggctgtggtccagc

SEQ ID NO: 4198 - DNA, 1878 bp, synthetic construct
  source 1..1878: mol_type = other DNA
atggccttaccagtgaccgccttgctcctgccgctggccttgctgctccacgccgccaggccggacgacatcgtgctgacacagacaccagccacactgagcgtgacacctggcgattctgtgtccctgagctgtagagccagccagagcatcagcaacaacctgcactggtatcagcagaagtcccacgagagccccagactgctgattaagaacgccagccagtctatcagcggcatccccagcaagtttagcggctctggcagcggcaccgacttcaccctgagaatcaacagcgtggaaaccgaggacttcgggatgtacttctgccagcagagcaatagctggccctacacatttggctccggcaccaagctggaaatcaaactcgagatccagaaccctgatcctgccgtgtaccagctgcgggatagcaagagcagcgacaagagcgtgtgtctgttcaccgacttcgacagccagaccaacgtgtcccagagcaaggactccgacgtgtacatcaccgataagtgcgtgctggacatgcggagcatggacttcaagagcaactccgccgtggcctggtccaacaagtccgatttcgcctgcgccaacgccttcaacaacagcattatccccgaggacacattcttcccaagccccgagagcagctgcggctttaccagcgagagctaccagcagggcgtgctgagcgccaccatcctgtacgagatcctgctgggcaaggccaccctgtacgccgtgctggtgtctgccctggtgctgatggctatggtcaagcggaaggacagccggggacgcgccaagagaagcggatctggcgtgaagcagaccctgaatttcgacctgctgaagctggctggcgacgtggaatccaacccaggccctactagtatggactggatttggcgcatccttttccttgtcggcgctgctaccggcgcgcattccttcgaacaagtgaagctgcaacagagcggacccgagctggttaagccaggcgcttccgtgaagattagctgcaaggccagcggctacagcttcaccggctactacatgcactgggtcaagcagagccacggcaacatcctggactggatcggctacatctacccctacaacggcgtgtccagctacaaccagaagttcaagggcaaagccactctgaccgtggacaagagcagcagcaccgcctacatggaactgagaagcctgaccagcgaggacagcgccgtgtactattgtgccagagagcggggcctgtaccagctcagagcaatggattattggggccagggcaccagcgtgaccgtttcttctacgcgtgaggacctgaagaacgtgttcccacctgaggtggccgtgttcgagcctagcgaggccgagatcagccacacccagaaagccaccctcgtgtgcctggctaccggcttctaccccgaccatgtggaactgtcttggtgggtcaacggcaaagaggtgcacagcggcgtgtgtaccgacccccagccactgaaagaacagcccgccctgaacgacagccggtactgcctgagcagcagactgagagtgtccgccaccttctggcagaacccccggaaccacttcagatgccaggtgcagttctacggcctgagcgagaacgacgagtggacccaggacagagccaagcccgtgacccagatcgtgtctgccgaagcctggggcagagccgattgcgacgtgaagctggtggaaaagagcttcgagacagacaccaacctgaacttccagaacctgagcgtgatcggcttcagaatcctgctgctgaaagtggccggctttaacctgctgatgaccctgcggctgtggtccagc

SEQ ID NO: 4199 - DNA, 1851 bp, synthetic construct
  source 1..1851: mol_type = other DNA
atggccttaccagtgaccgccttgctcctgccgctggccttgctgctccacgccgccaggccggacgacatcgtgatgacacagacccctgccatcatgagcgcctctccaggccagaaagtgaccatcacatgtagcgccagcagcagcgtgaactacatgcactggtatcagcagaagctgggcagcagccccaagctgtggatctacgataccagcaaactggcccctggcgtgccagccagattttctggttctggcagcggcaccagctacagcctgacaatcagcagcatggaagccgaggatgccgccagctacttctgccatcagtggtctagctacccctacacctttggctccggcaccaagctggaaatcaaactcgagatccagaaccctgatcctgccgtgtaccagctgcgggatagcaagagcagcgacaagagcgtgtgtctgttcaccgacttcgacagccagaccaacgtgtcccagagcaaggactccgacgtgtacatcaccgataagtgcgtgctggacatgcggagcatggacttcaagagcaactccgccgtggcctggtccaacaagtccgatttcgcctgcgccaacgccttcaacaacagcattatccccgaggacacattcttcccaagccccgagagcagctgcggctttaccagcgagagctaccagcagggcgtgctgagcgccaccatcctgtacgagatcctgctgggcaaggccaccctgtacgccgtgctggtgtctgccctggtgctgatggctatggtcaagcggaaggacagccggggacgcgccaagagaagcggatctggcgtgaagcagaccctgaatttcgacctgctgaagctggctggcgacgtggaatccaacccaggccctactagtatggactggatttggcgcatccttttccttgtcggcgctgctaccggcgcgcattccttcgaagaagttcagctccaagagtctggccccgacctggtcaagcctagccaaagcctgagcctgacctgtaccgtgaccggctacagcatcacaagcggctatggatggcactggatcagacagttccccggcaacaaactggaatggatgggctacatccactacagcggcagcaccacctacaatcccagcctgaagtcccggatcagcatcagcagagacaccagcaagaaccagttcttcctgcaactgaacagcgtgaccaccgaggacaccgccacctactattgtgctcggagcctgagatattggggccagggcacaaccctgaccgtgtcatctacgcgtgaggacctgaagaacgtgttcccacctgaggtggccgtgttcgagcctagcgaggccgagatcagccacacccagaaagccaccctcgtgtgcctggctaccggcttctaccccgaccatgtggaactgtcttggtgggtcaacggcaaagaggtgcacagcggcgtgtgtaccgacccccagccactgaaagaacagcccgccctgaacgacagccggtactgcctgagcagcagactgagagtgtccgccaccttctggcagaacccccggaaccacttcagatgccaggtgcagttctacggcctgagcgagaacgacgagtggacccaggacagagccaagcccgtgacccagatcgtgtctgccgaagcctggggcagagccgattgcgacgtgaagctggtggaaaagagcttcgagacagacaccaacctgaacttccagaacctgagcgtgatcggcttcagaatcctgctgctgaaagtggccggctttaacctgctgatgaccctgcggctgtggtccagc

SEQ ID NO: 4200 - DNA, 1860 bp, synthetic construct
  source 1..1860: mol_type = other DNA
atggccttaccagtgaccgccttgctcctgccgctggccttgctgctccacgccgccaggccggacgacatccagatgacacagagccctagcagcctgtctgccagcgtgggagacagagtgaccatcacctgtagcgccaccagcagcatcagctacatgcactggtatcagcagaagcccggcaaggcccctaaaggctggatctacgataccagcaaactggcccacggcgtgcccagcagattttctggttctggcagcggcaccgacttcaccctgacaatatctagcctccagcctgaggacttcgccacctactactgccaccagagaagaagctaccccttcaccttcggccagggcaccaaggtggaaatcaaactcgagatccagaaccctgatcctgccgtgtaccagctgcgggatagcaagagcagcgacaagagcgtgtgtctgttcaccgacttcgacagccagaccaacgtgtcccagagcaaggactccgacgtgtacatcaccgataagtgcgtgctggacatgcggagcatggacttcaagagcaactccgccgtggcctggtccaacaagtccgatttcgcctgcgccaacgccttcaacaacagcattatccccgaggacacattcttcccaagccccgagagcagctgcggctttaccagcgagagctaccagcagggcgtgctgagcgccaccatcctgtacgagatcctgctgggcaaggccaccctgtacgccgtgctggtgtctgccctggtgctgatggctatggtcaagcggaaggacagccggggacgcgccaagagaagcggatctggcgtgaagcagaccctgaatttcgacctgctgaagctggctggcgacgtggaatccaacccaggccctactagtatggactggatttggcgcatccttttccttgtcggcgctgctaccggcgcgcattccttcgaagaagtgcaactggttcagagcggagccgaagtgaagaaacctggggcctctgtgaaggtgtcctgcaaggcttccggctacacctttaccaatttctggattcactgggtccgacaggctccaggccaaggactggaatggatcggagagatcgaccccagcgacagctacaccaactacaaccagaaattcaaaggccgggtcaccatcaccagagacaccagcacaagcaccgcctacctggaactgagcagcctgagaagcgaggacaccgccgtgtactactgcgccagggaaatcaccaccgtggattattggggccagggaaccctggtcaccgtgtcatctacgcgtgaggacctgaagaacgtgttcccacctgaggtggccgtgttcgagcctagcgaggccgagatcagccacacccagaaagccaccctcgtgtgcctggctaccggcttctaccccgaccatgtggaactgtcttggtgggtcaacggcaaagaggtgcacagcggcgtgtgtaccgacccccagccactgaaagaacagcccgccctgaacgacagccggtactgcctgagcagcagactgagagtgtccgccaccttctggcagaacccccggaaccacttcagatgccaggtgcagttctacggcctgagcgagaacgacgagtggacccaggacagagccaagcccgtgacccagatcgtgtctgccgaagcctggggcagagccgattgcgacgtgaagctggtggaaaagagcttcgagacagacaccaacctgaacttccagaacctgagcgtgatcggcttcagaatcctgctgctgaaagtggccggctttaacctgctgatgaccctgcggctgtggtccagc

SEQ ID NO: 4201 - DNA, 1881 bp, synthetic construct
  source 1..1881: mol_type = other DNA
atggccttaccagtgaccgccttgctcctgccgctggccttgctgctccacgccgccaggccggacgacatccagatgacacagagccctagcagcctgtctgccagcgtgggagacagagtgaccatcacatgcaaggccagccagggcttcaacaaatacgtggcctggtatcagcagaagcccggcaaggctcctaagctgctgatctactacaccagcacactccagcctggcgtgcccagcagattttctggctctggcagcggcagagactacaccctgacaatatccagcctccagccagaggacttcgccacctactactgtctccagtacggcaacctgctgtacgcctttggacagggcaccaaggtggaaatcaagagactcgagatccagaaccctgatcctgccgtgtaccagctgcgggatagcaagagcagcgacaagagcgtgtgtctgttcaccgacttcgacagccagaccaacgtgtcccagagcaaggactccgacgtgtacatcaccgataagtgcgtgctggacatgcggagcatggacttcaagagcaactccgccgtggcctggtccaacaagtccgatttcgcctgcgccaacgccttcaacaacagcattatccccgaggacacattcttcccaagccccgagagcagctgcggctttaccagcgagagctaccagcagggcgtgctgagcgccaccatcctgtacgagatcctgctgggcaaggccaccctgtacgccgtgctggtgtctgccctggtgctgatggctatggtcaagcggaaggacagccggggacgcgccaagagaagcggatctggcgtgaagcagaccctgaatttcgacctgctgaagctggctggcgacgtggaatccaacccaggccctactagtatggactggatttggcgcatccttttccttgtcggcgctgctaccggcgcgcattccttcgaagaagttcagcttgtgcagagcggagccgaagtgaagaaacctggggcctctgtgaaggtgtcctgcaaagccagcggctacacctttaccagctactggatcggctgggtccgacaggctcctggacaaggactggaatggatcggcgacatctatcccggcggaggctacaccaactacaacgagaagttcaagggccgcgtgacaatcaccagagacacctctacaagcaccgcctacctggaactgagcagcctgagaagcgaggacaccgccgtgtactactgcgccagactggatggcagcagctacagaggcgctatggattcttggggccagggcacactggtcaccgtttcttctacgcgtgaggacctgaagaacgtgttcccacctgaggtggccgtgttcgagcctagcgaggccgagatcagccacacccagaaagccaccctcgtgtgcctggctaccggcttctaccccgaccatgtggaactgtcttggtgggtcaacggcaaagaggtgcacagcggcgtgtgtaccgacccccagccactgaaagaacagcccgccctgaacgacagccggtactgcctgagcagcagactgagagtgtccgccaccttctggcagaacccccggaaccacttcagatgccaggtgcagttctacggcctgagcgagaacgacgagtggacccaggacagagccaagcccgtgacccagatcgtgtctgccgaagcctggggcagagccgattgcgacgtgaagctggtggaaaagagcttcgagacagacaccaacctgaacttccagaacctgagcgtgatcggcttcagaatcctgctgctgaaagtggccggctttaacctgctgatgaccctgcggctgtggtccagc

SEQ ID NO: 4202 - DNA, 1869 bp, synthetic construct
  source 1..1869: mol_type = other DNA
atggccttaccagtgaccgccttgctcctgccgctggccttgctgctccacgccgccaggccggacgacatccagatgacacagagccctagcagcctgtctgccagcgtgggagacagagtgaccatcacctgtagagccagccaggacatccggtactacctgaactggtatcagcagaagcccggcaaggcccctaagctgctgatctatgtggcctccagcctccagagcggagtgccttctagattttctggcagcggctccggcaccgagtttaccctgacagtgtctagcttgcagcccgaggacttcgccacctactactgcctgcaagtgtacagcacccctcggacctttggacagggcaccaaggtggaaatcaaactcgagatccagaaccctgatcctgccgtgtaccagctgcgggatagcaagagcagcgacaagagcgtgtgtctgttcaccgacttcgacagccagaccaacgtgtcccagagcaaggactccgacgtgtacatcaccgataagtgcgtgctggacatgcggagcatggacttcaagagcaactccgccgtggcctggtccaacaagtccgatttcgcctgcgccaacgccttcaacaacagcattatccccgaggacacattcttcccaagccccgagagcagctgcggctttaccagcgagagctaccagcagggcgtgctgagcgccaccatcctgtacgagatcctgctgggcaaggccaccctgtacgccgtgctggtgtctgccctggtgctgatggctatggtcaagcggaaggacagccggggacgcgccaagagaagcggatctggcgtgaagcagaccctgaatttcgacctgctgaagctggctggcgacgtggaatccaacccaggccctactagtatggactggatttggcgcatccttttccttgtcggcgctgctaccggcgcgcattccttcgaagaagtgcagcttgttgaatctggcggcggactggctaagcctggcggatctctgagactgtcttgtgccgccagcggcttccggttcaccttcaacaactactacatggactgggtccgacaggcccctggacaaggacttgaatgggtgtccagaatcagcagcagcggcgaccctacttggtacgccgattctgtgaagggcagattcaccatcagcagagagaacgccaagaacaccctgttcctccagatgaactccctgagagccgaggacaccgccgtgtactattgtgcctctctgaccaccggcagcgattcttggggacagggcgtgctggttaccgtgtcatctacgcgtgaggacctgaagaacgtgttcccacctgaggtggccgtgttcgagcctagcgaggccgagatcagccacacccagaaagccaccctcgtgtgcctggctaccggcttctaccccgaccatgtggaactgtcttggtgggtcaacggcaaagaggtgcacagcggcgtgtgtaccgacccccagccactgaaagaacagcccgccctgaacgacagccggtactgcctgagcagcagactgagagtgtccgccaccttctggcagaacccccggaaccacttcagatgccaggtgcagttctacggcctgagcgagaacgacgagtggacccaggacagagccaagcccgtgacccagatcgtgtctgccgaagcctggggcagagccgattgcgacgtgaagctggtggaaaagagcttcgagacagacaccaacctgaacttccagaacctgagcgtgatcggcttcagaatcctgctgctgaaagtggccggctttaacctgctgatgaccctgcggctgtggtccagc

SEQ ID NO: 4203 - DNA, 1869 bp, synthetic construct
  source 1..1869: mol_type = other DNA
atggccttaccagtgaccgccttgctcctgccgctggccttgctgctccacgccgccaggccggagatcgtgatgacacagagccccgccacactgagtgtgtctccaggcgaaagagccacactgtcctgtagagccagccagagcgtgtccagaaacctggcctggtatcagcagaagcctggacaggctccccggctgttgatctacggcgcttctacaagagccaccggcattcccgccagattttctggctctggcagcggcaccgagttcaccctgacaatcggaagcctccagagcgaggacttcgccgtgtactactgccagcagtacaagacctggcctcggacctttggacagggcaccaacgtggaaatcaaactcgagatccagaaccctgatcctgccgtgtaccagctgcgggatagcaagagcagcgacaagagcgtgtgtctgttcaccgacttcgacagccagaccaacgtgtcccagagcaaggactccgacgtgtacatcaccgataagtgcgtgctggacatgcggagcatggacttcaagagcaactccgccgtggcctggtccaacaagtccgatttcgcctgcgccaacgccttcaacaacagcattatccccgaggacacattcttcccaagccccgagagcagctgcggctttaccagcgagagctaccagcagggcgtgctgagcgccaccatcctgtacgagatcctgctgggcaaggccaccctgtacgccgtgctggtgtctgccctggtgctgatggctatggtcaagcggaaggacagccggggacgcgccaagagaagcggatctggcgtgaagcagaccctgaatttcgacctgctgaagctggctggcgacgtggaatccaacccaggccctactagtatggactggatttggcgcatccttttccttgtcggcgctgctaccggcgcgcattccttcgaacaagttcagctgcaacaatggggagccggcctgctgaagcctagcgaaacactgtctctgacctgcgccgtgttcggcggctctttcagcggctactactggtcctggatcagacagcctcctggcaaaggactggaatggatcggcgagatcaaccaccggggcaacaccaacgacaaccccagcctgaaaagcagagtgaccatcagcgtggacaccagcaagaaccagttcgccctgaagctgagcagcgtgacagccgctgataccgccgtgtattattgcgccagagagcggggctacacctacggcaatttcgatcactggggccagggcaccctggtcacagtttcttctacgcgtgaggacctgaagaacgtgttcccacctgaggtggccgtgttcgagcctagcgaggccgagatcagccacacccagaaagccaccctcgtgtgcctggctaccggcttctaccccgaccatgtggaactgtcttggtgggtcaacggcaaagaggtgcacagcggcgtgtgtaccgacccccagccactgaaagaacagcccgccctgaacgacagccggtactgcctgagcagcagactgagagtgtccgccaccttctggcagaacccccggaaccacttcagatgccaggtgcagttctacggcctgagcgagaacgacgagtggacccaggacagagccaagcccgtgacccagatcgtgtctgccgaagcctggggcagagccgattgcgacgtgaagctggtggaaaagagcttcgagacagacaccaacctgaacttccagaacctgagcgtgatcggcttcagaatcctgctgctgaaagtggccggctttaacctgctgatgaccctgcggctgtggtccagc

SEQ ID NO: 4204 - DNA, 1872 bp, synthetic construct
  source 1..1872: mol_type = other DNA
atggccttaccagtgaccgccttgctcctgccgctggccttgctgctccacgccgccaggccggagatcgtgatgacccctagcagcgccacactgagtgtgtctccaggcgaaagagccacactgtcctgtagagccagccagagcgtgtccagaaacctggcctggtatcagcagaagcctggacaggctccccggctgttgatctacggcgcttctacaagagccaccggcattcccgccagattttctggctctggcagcggcaccgagttcaccctgacaatctctagcctccagagcgaggacttcgccgtgtactactgccaccagtacagcaactggatgtgcagcttcggccagggcaccaagctggaaatcaaactcgagatccagaaccctgatcctgccgtgtaccagctgcgggatagcaagagcagcgacaagagcgtgtgtctgttcaccgacttcgacagccagaccaacgtgtcccagagcaaggactccgacgtgtacatcaccgataagtgcgtgctggacatgcggagcatggacttcaagagcaactccgccgtggcctggtccaacaagtccgatttcgcctgcgccaacgccttcaacaacagcattatccccgaggacacattcttcccaagccccgagagcagctgcggctttaccagcgagagctaccagcagggcgtgctgagcgccaccatcctgtacgagatcctgctgggcaaggccaccctgtacgccgtgctggtgtctgccctggtgctgatggctatggtcaagcggaaggacagccggggacgcgccaagagaagcggatctggcgtgaagcagaccctgaatttcgacctgctgaagctggctggcgacgtggaatccaacccaggccctactagtatggactggatttggcgcatccttttccttgtcggcgctgctaccggcgcgcattccttcgaagaagttcagctccttgagtcaggtggcggcctggttcaacctggcggatctctgagactgagctgtgccgccagcggcttcacctttagcagatacgccatgaactgggtccgacaggcccctggcaaaggactggaatgggtgtccggcatctctggaagcggcggcagaacctactacgccgattctgtgaagggcagattcaccatcagccgggacaacagcaagaacaccctgtacctccagatgaacagcctgagagccgaggacacagccgtgtattattgcgccaaggaccgggacttttggagcggcccttttgactattggggccagggaaccctggtcaccgttagctctacgcgtgaggacctgaagaacgtgttcccacctgaggtggccgtgttcgagcctagcgaggccgagatcagccacacccagaaagccaccctcgtgtgcctggctaccggcttctaccccgaccatgtggaactgtcttggtgggtcaacggcaaagaggtgcacagcggcgtgtgtaccgacccccagccactgaaagaacagcccgccctgaacgacagccggtactgcctgagcagcagactgagagtgtccgccaccttctggcagaacccccggaaccacttcagatgccaggtgcagttctacggcctgagcgagaacgacgagtggacccaggacagagccaagcccgtgacccagatcgtgtctgccgaagcctggggcagagccgattgcgacgtgaagctggtggaaaagagcttcgagacagacaccaacctgaacttccagaacctgagcgtgatcggcttcagaatcctgctgctgaaagtggccggctttaacctgctgatgaccctgcggctgtggtccagc

SEQ ID NO: 4205 - DNA, 1887 bp, synthetic construct
  source 1..1887: mol_type = other DNA
atggccttaccagtgaccgccttgctcctgccgctggccttgctgctccacgccgccaggccggacatccagatgacccagagccccagcagcctgtctgccagcgtgggcgacagagtgaccatcacatgcaaggccagcaagaacatcagaagctacctggcctggtatcagcagaagcccggcaaggcccccaagctgctgatctacagcggcagcacactgcacagcggcgtgcccagcagattttccggctctggcagcggcaccgacttcaccctgaccatctctagcctccagcccgaggacttcgccacctactactgccagcagcaccacgagtaccccctgacattcggccagggcaccaaggtggaaatcaagagactcgagatccagaaccctgatcctgccgtgtaccagctgcgggatagcaagagcagcgacaagagcgtgtgtctgttcaccgacttcgacagccagaccaacgtgtcccagagcaaggactccgacgtgtacatcaccgataagtgcgtgctggacatgcggagcatggacttcaagagcaactccgccgtggcctggtccaacaagtccgatttcgcctgcgccaacgccttcaacaacagcattatccccgaggacacattcttcccaagccccgagagcagctgcggctttaccagcgagagctaccagcagggcgtgctgagcgccaccatcctgtacgagatcctgctgggcaaggccaccctgtacgccgtgctggtgtctgccctggtgctgatggctatggtcaagcggaaggacagccggggacgcgccaagagaagcggatctggcgtgaagcagaccctgaatttcgacctgctgaagctggctggcgacgtggaatccaacccaggccctactagtatggactggatttggcgcatccttttccttgtcggcgctgctaccggcgcgcattccttcgaacaggtgcaactccaggaatctggccccggactcgtgaagcccagcgagacactgagcctgacctgtaccgtgtccggctacaccatcaccagcggctacgactggtcctggatcagacagcctcctggcaagggcctggaatggatcggctacatcaactacggcggctccaccaactacaagcccagcctgggaagccgcgtgacaatcagcgtggacacctccaagaaccagttcagcctgaagctgagcagcgtgacagccgccgataccgccgtgtactactgcgcccggtacaacgagtacaagagctacatctacgattggtacttcgacttctggggccagggaaccctcgtgaccgtgtctagtacgcgtgaggacctgaagaacgtgttcccacctgaggtggccgtgttcgagcctagcgaggccgagatcagccacacccagaaagccaccctcgtgtgcctggctaccggcttctaccccgaccatgtggaactgtcttggtgggtcaacggcaaagaggtgcacagcggcgtgtgtaccgacccccagccactgaaagaacagcccgccctgaacgacagccggtactgcctgagcagcagactgagagtgtccgccaccttctggcagaacccccggaaccacttcagatgccaggtgcagttctacggcctgagcgagaacgacgagtggacccaggacagagccaagcccgtgacccagatcgtgtctgccgaagcctggggcagagccgattgcgacgtgaagctggtggaaaagagcttcgagacagacaccaacctgaacttccagaacctgagcgtgatcggcttcagaatcctgctgctgaaagtggccggctttaacctgctgatgaccctgcggctgtggtccagc

SEQ ID NO: 4206 - DNA, 1893 bp, synthetic construct
  source 1..1893: mol_type = other DNA
atggccttaccagtgaccgccttgctcctgccgctggccttgctgctccacgccgccaggccgcagtctgtggtcacacagcctccatccgtgtctgctgcccctggacagaaagtgaccatctcctgtagcggcagcagcagcaacatcggcaacaactacgtgtcctggtatcagcagctccccggcacagctcccaaactgctgatctacgacaacaacaagcggcccagcggcatccccgatagattttctggcagcaagagcggcaccagcgccacactgggaattaccggacttcagacaggcgacgaggccgactactactgtggcacatgggatggcagcctgtacaccatgcttttcggcggaggcaccaagctgacagtgcttctcgagatccagaaccctgatcctgccgtgtaccagctgcgggatagcaagagcagcgacaagagcgtgtgtctgttcaccgacttcgacagccagaccaacgtgtcccagagcaaggactccgacgtgtacatcaccgataagtgcgtgctggacatgcggagcatggacttcaagagcaactccgccgtggcctggtccaacaagtccgatttcgcctgcgccaacgccttcaacaacagcattatccccgaggacacattcttcccaagccccgagagcagctgcggctttaccagcgagagctaccagcagggcgtgctgagcgccaccatcctgtacgagatcctgctgggcaaggccaccctgtacgccgtgctggtgtctgccctggtgctgatggctatggtcaagcggaaggacagccggggacgcgccaagagaagcggatctggcgtgaagcagaccctgaatttcgacctgctgaagctggctggcgacgtggaatccaacccaggccctactagtatggactggatttggcgcatccttttccttgtcggcgctgctaccggcgcgcattccttcgaagaagtgcaactggtggaatctggcggcggactggttaagcctggcggatctctgagactgtcttgtgccgccagcggcttcaccttcagcaatgcctggatgagctgggttcgacaggcccctggaaaaggactggaatgggtcggattcatccggtccaaagcctacggcggcaccacagaatatgccgcctctgtgaagggcagattcaccatcagccgggacgacagcaagtctatcgcctacctccagatgaacaacctgaaaaccgaggacaccgccgtgtactactgcgccagagatggcctgtacagcagctcttggtacgacagcgattactggggccagggcacactggtcacagtgtcatctacgcgtgaggacctgaagaacgtgttcccacctgaggtggccgtgttcgagcctagcgaggccgagatcagccacacccagaaagccaccctcgtgtgcctggctaccggcttctaccccgaccatgtggaactgtcttggtgggtcaacggcaaagaggtgcacagcggcgtgtgtaccgacccccagccactgaaagaacagcccgccctgaacgacagccggtactgcctgagcagcagactgagagtgtccgccaccttctggcagaacccccggaaccacttcagatgccaggtgcagttctacggcctgagcgagaacgacgagtggacccaggacagagccaagcccgtgacccagatcgtgtctgccgaagcctggggcagagccgattgcgacgtgaagctggtggaaaagagcttcgagacagacaccaacctgaacttccagaacctgagcgtgatcggcttcagaatcctgctgctgaaagtggccggctttaacctgctgatgaccctgcggctgtggtccagc

SEQ ID NO: 4207 - DNA, 1908 bp, synthetic construct
  source 1..1908: mol_type = other DNA
atggccttaccagtgaccgccttgctcctgccgctggccttgctgctccacgccgccaggccgcagtctgtgctgacacagcctcctagtgtgtctggcgctcctggacagagagtgaccatctcttgtaccggcagcagcagcaatatcggagccggctatgacgtgcactggtatcagcagctccctggcacagcccctaaactgctgatcttcggcaacagcaacagacccagcggcgtgcccgatagattcagcggctttaagagcggcacaagcgccagcctggctatcactggactgcaagccgaggacgaggccgactacttctgccagagctacgatagcagcctgagcggcagcggagtgtttggcacaggcaccaaagtgacagtgcttggcctcgagatccagaaccctgatcctgccgtgtaccagctgcgggatagcaagagcagcgacaagagcgtgtgtctgttcaccgacttcgacagccagaccaacgtgtcccagagcaaggactccgacgtgtacatcaccgataagtgcgtgctggacatgcggagcatggacttcaagagcaactccgccgtggcctggtccaacaagtccgatttcgcctgcgccaacgccttcaacaacagcattatccccgaggacacattcttcccaagccccgagagcagctgcggctttaccagcgagagctaccagcagggcgtgctgagcgccaccatcctgtacgagatcctgctgggcaaggccaccctgtacgccgtgctggtgtctgccctggtgctgatggctatggtcaagcggaaggacagccggggacgcgccaagagaagcggatctggcgtgaagcagaccctgaatttcgacctgctgaagctggctggcgacgtggaatccaacccaggccctactagtatggactggatttggcgcatccttttccttgtcggcgctgctaccggcgcgcattccttcgaacaaatgcaactggttcaaagcggcggtggcctggtgcaacctggaagaagtctgagactgagctgtgccgccagcggcttcaccttcgatgattacgccatgcactgggtccgacaggcccctggaaaaggactggaatgggtgtccggcatctcctggaatagcggctctatcggctacgccgacagcgtgaagggcagattcaccatcagccgggacaacgccaagaacagcctgtacctccagatgaactccctgagagccgaggatacagccctgtactactgcgccaaggacatccacagcggcagctactacggcctgctgtactacgctatggacgtgtggggccagggcacaaccgtgacagtttcttctacgcgtgaggacctgaagaacgtgttcccacctgaggtggccgtgttcgagcctagcgaggccgagatcagccacacccagaaagccaccctcgtgtgcctggctaccggcttctaccccgaccatgtggaactgtcttggtgggtcaacggcaaagaggtgcacagcggcgtgtgtaccgacccccagccactgaaagaacagcccgccctgaacgacagccggtactgcctgagcagcagactgagagtgtccgccaccttctggcagaacccccggaaccacttcagatgccaggtgcagttctacggcctgagcgagaacgacgagtggacccaggacagagccaagcccgtgacccagatcgtgtctgccgaagcctggggcagagccgattgcgacgtgaagctggtggaaaagagcttcgagacagacaccaacctgaacttccagaacctgagcgtgatcggcttcagaatcctgctgctgaaagtggccggctttaacctgctgatgaccctgcggctgtggtccagc

SEQ ID NO: 4208 - DNA, 1908 bp, synthetic construct
  source 1..1908: mol_type = other DNA
atggccttaccagtgaccgccttgctcctgccgctggccttgctgctccacgccgccaggccgctgcctgttctgacacagcctccatctgcctctggcacacctggacagagagtgaccatcagctgtagcggcagaagcagcaacatcggcagcaacagcgtgaactggtacagacagcttcctggcgctgcccctaagctgctgatctacagcaacaaccagcggcctcctggcgtgccagtcagattttctggcagcaagagcggcacaagcgccagcctggctatttctggactccagtctgaggacgaggccacctactactgtgccacctgggacgacaacctgaacgtgcactacgtgttcggcaccggcaccaaagtgacagtgcttggaagtagactcgagatccagaaccctgatcctgccgtgtaccagctgcgggatagcaagagcagcgacaagagcgtgtgtctgttcaccgacttcgacagccagaccaacgtgtcccagagcaaggactccgacgtgtacatcaccgataagtgcgtgctggacatgcggagcatggacttcaagagcaactccgccgtggcctggtccaacaagtccgatttcgcctgcgccaacgccttcaacaacagcattatccccgaggacacattcttcccaagccccgagagcagctgcggctttaccagcgagagctaccagcagggcgtgctgagcgccaccatcctgtacgagatcctgctgggcaaggccaccctgtacgccgtgctggtgtctgccctggtgctgatggctatggtcaagcggaaggacagccggggacgcgccaagagaagcggatctggcgtgaagcagaccctgaatttcgacctgctgaagctggctggcgacgtggaatccaacccaggccctactagtatggactggatttggcgcatccttttccttgtcggcgctgctaccggcgcgcattccttcgaacttgaaatggctcaggtgcagctggtgcagagcggagccgaagtgaagaaacctggcagcagcgtgaaggtgtcctgcaaagcttctggcggcaccttcagcagctacgccatctcttgggttcgacaggcccctggacaaggactggaatggatgggcagaatcatccccatcctgggaatcgccaactacgcccagaaattccagggcagagtgacaatcaccgccgacaagagcaccagcaccgcctacatggaactgagcagcctgagaagcgaggacaccgccgtgtactattgtgcaagaggcggctactacagccacgacatgtggagcgaagattggggccagggcacactggtcacagtgtcatctacgcgtgaggacctgaagaacgtgttcccacctgaggtggccgtgttcgagcctagcgaggccgagatcagccacacccagaaagccaccctcgtgtgcctggctaccggcttctaccccgaccatgtggaactgtcttggtgggtcaacggcaaagaggtgcacagcggcgtgtgtaccgacccccagccactgaaagaacagcccgccctgaacgacagccggtactgcctgagcagcagactgagagtgtccgccaccttctggcagaacccccggaaccacttcagatgccaggtgcagttctacggcctgagcgagaacgacgagtggacccaggacagagccaagcccgtgacccagatcgtgtctgccgaagcctggggcagagccgattgcgacgtgaagctggtggaaaagagcttcgagacagacaccaacctgaacttccagaacctgagcgtgatcggcttcagaatcctgctgctgaaagtggccggctttaacctgctgatgaccctgcggctgtggtccagc

SEQ ID NO: 4209 - DNA, 1890 bp, synthetic construct
  source 1..1890: mol_type = other DNA
atggccttaccagtgaccgccttgctcctgccgctggccttgctgctccacgccgccaggccggacttcgtgatgacacagagccctgatagcctggccgtgtctctcggcgagcgagtgaccatgagctgcaagtctagccagagcctgctgaacagcggcaaccagaagaactacctgacctggtatcagcagaagcccggccagcctcctaagctgctgatctactgggccagcaccagagaaagcggcgtgcccgatagattttctggctctggcagcggcaccgacttcaccctgacaatttctagcctgcaagccgaggacgtggccgtgtactactgccagaacgactacagctacccctacaccttcggccagggcaccaagctggaaatcaaactcgagatccagaaccctgatcctgccgtgtaccagctgcgggatagcaagagcagcgacaagagcgtgtgtctgttcaccgacttcgacagccagaccaacgtgtcccagagcaaggactccgacgtgtacatcaccgataagtgcgtgctggacatgcggagcatggacttcaagagcaactccgccgtggcctggtccaacaagtccgatttcgcctgcgccaacgccttcaacaacagcattatccccgaggacacattcttcccaagccccgagagcagctgcggctttaccagcgagagctaccagcagggcgtgctgagcgccaccatcctgtacgagatcctgctgggcaaggccaccctgtacgccgtgctggtgtctgccctggtgctgatggctatggtcaagcggaaggacagccggggacgcgccaagagaagcggatctggcgtgaagcagaccctgaatttcgacctgctgaagctggctggcgacgtggaatccaacccaggccctactagtatggactggatttggcgcatccttttccttgtcggcgctgctaccggcgcgcattccttcgaagaagtgcaactggttcagagcggagccgagctgaagaaacctggggccagcgtgaaggtgtcctgtaaagccagcggctacacctttaccgactactacatgaaatgggtccgacaggccccaggccagggactcgaatggatcggcgatattatccccagcaacggggccaccttctacaaccagaaattcaagggccgcgtgaccatcaccgtggacaagagcacaagcaccgcctacatggaactgagcagcctgagaagcgaggacaccgccgtgtattattgcgccagaagccatctgctgcgggccagttggttcgcctattggggacagggaaccctggtcaccgttagctctacgcgtgaggacctgaagaacgtgttcccacctgaggtggccgtgttcgagcctagcgaggccgagatcagccacacccagaaagccaccctcgtgtgcctggctaccggcttctaccccgaccatgtggaactgtcttggtgggtcaacggcaaagaggtgcacagcggcgtgtgtaccgacccccagccactgaaagaacagcccgccctgaacgacagccggtactgcctgagcagcagactgagagtgtccgccaccttctggcagaacccccggaaccacttcagatgccaggtgcagttctacggcctgagcgagaacgacgagtggacccaggacagagccaagcccgtgacccagatcgtgtctgccgaagcctggggcagagccgattgcgacgtgaagctggtggaaaagagcttcgagacagacaccaacctgaacttccagaacctgagcgtgatcggcttcagaatcctgctgctgaaagtggccggctttaacctgctgatgaccctgcggctgtggtccagc

SEQ ID NO: 4210 - DNA, 1890 bp, synthetic construct
  source 1..1890: mol_type = other DNA
atggccttaccagtgaccgccttgctcctgccgctggccttgctgctccacgccgccaggccggacttcgtgatgacacagagccctgatagcctggccgtgtctctcggcgagcgagtgaccatgagctgcaagtctagccagagcctgctgaacagcggcaaccagaagaactacctgacctggtatcagcagaagcccggccagcctcctaagctgctgatctactgggccagcaccagagaaagcggcgtgcccgatagattttctggctctggcagcggcaccgacttcaccctgacaatttctagcctgcaagccgaggacgtggccgtgtactactgccagaacgactacagctacccctacaccttcggccagggcaccaagctggaaatcaaactcgagatccagaaccctgatcctgccgtgtaccagctgcgggatagcaagagcagcgacaagagcgtgtgtctgttcaccgacttcgacagccagaccaacgtgtcccagagcaaggactccgacgtgtacatcaccgataagtgcgtgctggacatgcggagcatggacttcaagagcaactccgccgtggcctggtccaacaagtccgatttcgcctgcgccaacgccttcaacaacagcattatccccgaggacacattcttcccaagccccgagagcagctgcggctttaccagcgagagctaccagcagggcgtgctgagcgccaccatcctgtacgagatcctgctgggcaaggccaccctgtacgccgtgctggtgtctgccctggtgctgatggctatggtcaagcggaaggacagccggggacgcgccaagagaagcggatctggcgtgaagcagaccctgaatttcgacctgctgaagctggctggcgacgtggaatccaacccaggccctactagtatggactggatttggcgcatccttttccttgtcggcgctgctaccggcgcgcattccttcgaacaagtgcaactggttcagagcggagccgagctgaagaaacctggggccagcgtgaaggtgtcctgtaaagccagcggctacacctttaccgactactacatgaaatgggtccgacaggccccaggccagggactcgaatggatcggcgatattatccccagcaacggggccaccttctacaaccagaaattcaagggccgcgtgaccatcaccgtggacaagagcacaagcaccgcctacatggaactgagcagcctgagaagcgaggacaccgccgtgtattattgcgccagaagccatctgctgcgggccagttggttcgcctattggggacagggaaccctggtcaccgttagctctacgcgtgaggacctgaagaacgtgttcccacctgaggtggccgtgttcgagcctagcgaggccgagatcagccacacccagaaagccaccctcgtgtgcctggctaccggcttctaccccgaccatgtggaactgtcttggtgggtcaacggcaaagaggtgcacagcggcgtgtgtaccgacccccagccactgaaagaacagcccgccctgaacgacagccggtactgcctgagcagcagactgagagtgtccgccaccttctggcagaacccccggaaccacttcagatgccaggtgcagttctacggcctgagcgagaacgacgagtggacccaggacagagccaagcccgtgacccagatcgtgtctgccgaagcctggggcagagccgattgcgacgtgaagctggtggaaaagagcttcgagacagacaccaacctgaacttccagaacctgagcgtgatcggcttcagaatcctgctgctgaaagtggccggctttaacctgctgatgaccctgcggctgtggtccagc

SEQ ID NO: 4211 - DNA, 1860 bp, synthetic construct
  source 1..1860: mol_type = other DNA
atggccttaccagtgaccgccttgctcctgccgctggccttgctgctccacgccgccaggccggacgtgcagatcacacagagccctagctacctggctgcctctcctggcgagacaatcaccatcaactgtcgggccagcaagagcatcagcaaggacctggcctggtatcaagagaagcccggcaagaccaacaagctgctgatctacagcggcagcacactccagtctggcatccccagcagattttccggctctggcagcggcaccgatttcaccctgaccataagcagcctggaacctgaggacttcgccatgtactactgccagcagcacaacaagtacccctacacctttggcggaggcaccaagctggaaatcaagagactcgagatccagaaccctgatcctgccgtgtaccagctgcgggatagcaagagcagcgacaagagcgtgtgtctgttcaccgacttcgacagccagaccaacgtgtcccagagcaaggactccgacgtgtacatcaccgataagtgcgtgctggacatgcggagcatggacttcaagagcaactccgccgtggcctggtccaacaagtccgatttcgcctgcgccaacgccttcaacaacagcattatccccgaggacacattcttcccaagccccgagagcagctgcggctttaccagcgagagctaccagcagggcgtgctgagcgccaccatcctgtacgagatcctgctgggcaaggccaccctgtacgccgtgctggtgtctgccctggtgctgatggctatggtcaagcggaaggacagccggggacgcgccaagagaagcggatctggcgtgaagcagaccctgaatttcgacctgctgaagctggctggcgacgtggaatccaacccaggccctactagtatggactggatttggcgcatccttttccttgtcggcgctgctaccggcgcgcattccttcgaacaagttcaactgcaacagcctggggccgagcttgttagacctggcgcttctgtgaagctgagctgcaaggccagcggctacaccttcaccagctactggatgaactgggtcaagcagcggcctgaccagggcctcgaatggatcggcagaatcgacccctacgacagcgagacacactacaaccagaagttcaaggacaaggccatcctgaccgtggacaagagcagctccaccgcctacatgcaactgagcagcctgacctctgaggatagcgccgtgtactattgcgccagaggcaactgggacgactattggggccagggcacaaccctgacagtgtctagtacgcgtgaggacctgaagaacgtgttcccacctgaggtggccgtgttcgagcctagcgaggccgagatcagccacacccagaaagccaccctcgtgtgcctggctaccggcttctaccccgaccatgtggaactgtcttggtgggtcaacggcaaagaggtgcacagcggcgtgtgtaccgacccccagccactgaaagaacagcccgccctgaacgacagccggtactgcctgagcagcagactgagagtgtccgccaccttctggcagaacccccggaaccacttcagatgccaggtgcagttctacggcctgagcgagaacgacgagtggacccaggacagagccaagcccgtgacccagatcgtgtctgccgaagcctggggcagagccgattgcgacgtgaagctggtggaaaagagcttcgagacagacaccaacctgaacttccagaacctgagcgtgatcggcttcagaatcctgctgctgaaagtggccggctttaacctgctgatgaccctgcggctgtggtccagc

SEQ ID NO: 4212 - DNA, 1866 bp, synthetic construct
  source 1..1866: mol_type = other DNA
atggccttaccagtgaccgccttgctcctgccgctggccttgctgctccacgccgccaggccggagatcgtgctgacacagagccctaccagcatgacagcctctccaggcgagcaagtgaccatcacctgtagagccagcagcagcatcaactacatgcactggtatcagcagaagcctggcgcaagccccagaccttggatctacgagacaagcaagctggcctccggcgtgcccgatagattttctggatctgccagcggcaccagctacagcctgaccatcaacaacatggaagccgaggacgccgccacctactactgccagcagtggaattacccctcctggacctttggcggaggcaccaagctggaacttaaactcgagatccagaaccctgatcctgccgtgtaccagctgcgggatagcaagagcagcgacaagagcgtgtgtctgttcaccgacttcgacagccagaccaacgtgtcccagagcaaggactccgacgtgtacatcaccgataagtgcgtgctggacatgcggagcatggacttcaagagcaactccgccgtggcctggtccaacaagtccgatttcgcctgcgccaacgccttcaacaacagcattatccccgaggacacattcttcccaagccccgagagcagctgcggctttaccagcgagagctaccagcagggcgtgctgagcgccaccatcctgtacgagatcctgctgggcaaggccaccctgtacgccgtgctggtgtctgccctggtgctgatggctatggtcaagcggaaggacagccggggacgcgccaagagaagcggatctggcgtgaagcagaccctgaatttcgacctgctgaagctggctggcgacgtggaatccaacccaggccctactagtatggactggatttggcgcatccttttccttgtcggcgctgctaccggcgcgcattccttcgaagaagtgcagctcgttgagtctggtggcggactggttcagcctggaagaagcctgaagctgagctgtgccgccagcggcttcaccttcagcgactacaatatggcctgggtccgacaggcccctaagaaaggactggaatgggtcgccaccatcctgtacgatggcggcagaacctactaccggggcagcgtgaagggcagattcaccatcagcagagacaacgccaagagcaccctgtacctgcggatggactctctgagaagcgaggataccgccacatattactgtgccacacacagccggggcaccgactactttgattattggggccagggcgtgatggttaccgtgtctagtacgcgtgaggacctgaagaacgtgttcccacctgaggtggccgtgttcgagcctagcgaggccgagatcagccacacccagaaagccaccctcgtgtgcctggctaccggcttctaccccgaccatgtggaactgtcttggtgggtcaacggcaaagaggtgcacagcggcgtgtgtaccgacccccagccactgaaagaacagcccgccctgaacgacagccggtactgcctgagcagcagactgagagtgtccgccaccttctggcagaacccccggaaccacttcagatgccaggtgcagttctacggcctgagcgagaacgacgagtggacccaggacagagccaagcccgtgacccagatcgtgtctgccgaagcctggggcagagccgattgcgacgtgaagctggtggaaaagagcttcgagacagacaccaacctgaacttccagaacctgagcgtgatcggcttcagaatcctgctgctgaaagtggccggctttaacctgctgatgaccctgcggctgtggtccagc

SEQ ID NO: 4213 - DNA, 1893 bp, synthetic construct
  source 1..1893: mol_type = other DNA
atggccttaccagtgaccgccttgctcctgccgctggccttgctgctccacgccgccaggccggacatcgtgatgacacagagcccttctagcctggccgtgtctgagggcgagacagtgaccatcaactgcaagagcagccagagcttcctgtctagcggcgacggcaagaattacgtggcctggtatcagtacaagcccggacagagccccaagctgctgatctactgggccagcacaagacagagcggcgtgcccgatagattcatcggctctggcagcggcaccgacttcaccctgacaatctctacagtgcaggccgaggacctggctatctactactgccagcagtattacgacacccctctgacctttggctccggcaccaagctggaaatcaaactcgagatccagaaccctgatcctgccgtgtaccagctgcgggatagcaagagcagcgacaagagcgtgtgtctgttcaccgacttcgacagccagaccaacgtgtcccagagcaaggactccgacgtgtacatcaccgataagtgcgtgctggacatgcggagcatggacttcaagagcaactccgccgtggcctggtccaacaagtccgatttcgcctgcgccaacgccttcaacaacagcattatccccgaggacacattcttcccaagccccgagagcagctgcggctttaccagcgagagctaccagcagggcgtgctgagcgccaccatcctgtacgagatcctgctgggcaaggccaccctgtacgccgtgctggtgtctgccctggtgctgatggctatggtcaagcggaaggacagccggggacgcgccaagagaagcggatctggcgtgaagcagaccctgaatttcgacctgctgaagctggctggcgacgtggaatccaacccaggccctactagtatggactggatttggcgcatccttttccttgtcggcgctgctaccggcgcgcattccttcgaagaagtgaagctgcaagagtctggccccagcctggtgcagagtagccaaacactgagcctgacctgtaccgtgtccggctttagcctgaccagctaccacatccactgggtccgacagacccctggcaaaggactggaatggatgggcgtgatgtggagcgacggcgacaccagctataacagcgccctgaagtcccggctgagcatcagcagagatacaagccagagccaggtgttcctgaagatgaacagcctccagaccgaggacaccgccacctactattgtgccagaggctactacagcagctacctgtacctttggttcgcctattggggccagggcaccctggttacagtcagctctacgcgtgaggacctgaagaacgtgttcccacctgaggtggccgtgttcgagcctagcgaggccgagatcagccacacccagaaagccaccctcgtgtgcctggctaccggcttctaccccgaccatgtggaactgtcttggtgggtcaacggcaaagaggtgcacagcggcgtgtgtaccgacccccagccactgaaagaacagcccgccctgaacgacagccggtactgcctgagcagcagactgagagtgtccgccaccttctggcagaacccccggaaccacttcagatgccaggtgcagttctacggcctgagcgagaacgacgagtggacccaggacagagccaagcccgtgacccagatcgtgtctgccgaagcctggggcagagccgattgcgacgtgaagctggtggaaaagagcttcgagacagacaccaacctgaacttccagaacctgagcgtgatcggcttcagaatcctgctgctgaaagtggccggctttaacctgctgatgaccctgcggctgtggtccagc

SEQ ID NO: 4214 - DNA, 1905 bp, synthetic construct
  source 1..1905: mol_type = other DNA
atggccttaccagtgaccgccttgctcctgccgctggccttgctgctccacgccgccaggccggacgtgctgatgacccagacacctgtgtctctgccagtgtctctcggaggccaggtgtccatctcctgtagaagcagccagagcctggtgcactccgacggcgatacctacctgcactggtatctccagaagcctggacagagccctcagctcctgatctaccgggtgtccaacagattcagcggcgtgcccgatagattttccggcagcggctctggcaccgacttcaccctgaagatcagcagagtggaacccgaggacctgggcctgtactactgtctccagaccacacacttcccaccttggacctttggcggaggcaccaagctggaaatgaaactcgagatccagaaccctgatcctgccgtgtaccagctgcgggatagcaagagcagcgacaagagcgtgtgtctgttcaccgacttcgacagccagaccaacgtgtcccagagcaaggactccgacgtgtacatcaccgataagtgcgtgctggacatgcggagcatggacttcaagagcaactccgccgtggcctggtccaacaagtccgatttcgcctgcgccaacgccttcaacaacagcattatccccgaggacacattcttcccaagccccgagagcagctgcggctttaccagcgagagctaccagcagggcgtgctgagcgccaccatcctgtacgagatcctgctgggcaaggccaccctgtacgccgtgctggtgtctgccctggtgctgatggctatggtcaagcggaaggacagccggggacgcgccaagagaagcggatctggcgtgaagcagaccctgaatttcgacctgctgaagctggctggcgacgtggaatccaacccaggccctactagtatggactggatttggcgcatccttttccttgtcggcgctgctaccggcgcgcattccttcgaacaggttcagctccagcagtctggacccgagcttagaaggccaggatctagcgtcagactgagctgcaaggccagcggctaccggatcaaggacttcctgatccactggattaagaacagacccgagcacggcctggaatggatcggatggattgaccctgaggacggcgagactaagtacgcccagaagttccagaccaaggccacactgaccgccgacacctctagcaacaccgcctacatgcaactgagcagcctgaccagcgaggacaccgccacctacttttgtgctagatggggcgacgtgtactacggcctgatgagaggccatgtgatggatgcctggggccagggaacaagcgtgacagtctcttctacgcgtgaggacctgaagaacgtgttcccacctgaggtggccgtgttcgagcctagcgaggccgagatcagccacacccagaaagccaccctcgtgtgcctggctaccggcttctaccccgaccatgtggaactgtcttggtgggtcaacggcaaagaggtgcacagcggcgtgtgtaccgacccccagccactgaaagaacagcccgccctgaacgacagccggtactgcctgagcagcagactgagagtgtccgccaccttctggcagaacccccggaaccacttcagatgccaggtgcagttctacggcctgagcgagaacgacgagtggacccaggacagagccaagcccgtgacccagatcgtgtctgccgaagcctggggcagagccgattgcgacgtgaagctggtggaaaagagcttcgagacagacaccaacctgaacttccagaacctgagcgtgatcggcttcagaatcctgctgctgaaagtggccggctttaacctgctgatgaccctgcggctgtggtccagc

SEQ ID NO: 4215 - DNA, 1890 bp, synthetic construct
  source 1..1890: mol_type = other DNA
atggccttaccagtgaccgccttgctcctgccgctggccttgctgctccacgccgccaggccggacatcgtgatgacacagagccccgccacactgtcactgtctccaggcgaaagagccacactgagctgtcggagcagcaagagcctccagaacgtgaacggcaacacctacctgtactggttccagcagaagcccggccagtctcctcagctcctgatctacagaatgagcaacctgaacagcggcgtgcccgacagattttctggcagcggaagcggcaccgagttcaccctgaccataagcagcctggaacctgaggacttcgccgtgtactactgtatgcagcacctggaataccccatcaccttcggagccggcaccaagctggaaatcaaactcgagatccagaaccctgatcctgccgtgtaccagctgcgggatagcaagagcagcgacaagagcgtgtgtctgttcaccgacttcgacagccagaccaacgtgtcccagagcaaggactccgacgtgtacatcaccgataagtgcgtgctggacatgcggagcatggacttcaagagcaactccgccgtggcctggtccaacaagtccgatttcgcctgcgccaacgccttcaacaacagcattatccccgaggacacattcttcccaagccccgagagcagctgcggctttaccagcgagagctaccagcagggcgtgctgagcgccaccatcctgtacgagatcctgctgggcaaggccaccctgtacgccgtgctggtgtctgccctggtgctgatggctatggtcaagcggaaggacagccggggacgcgccaagagaagcggatctggcgtgaagcagaccctgaatttcgacctgctgaagctggctggcgacgtggaatccaacccaggccctactagtatggactggatttggcgcatccttttccttgtcggcgctgctaccggcgcgcattccttcgaagaagtgcaactggttgaatctggcggcggactggttaagcctggcggatctctgaagctgagctgtgccgccagcggctacacctttaccagctacgtgatgcactgggtccgacaggcccctggcaaaggacttgagtggatcggctacatcaacccctacaacgatggcaccaagtacaacgagaagttccagggcagagtgaccatcagctccgacaagagcatcagcaccgcctacatggaactgagcagcctgagaagcgaggataccgccatgtactattgcgccagaggcacctactactacggcaccagagtgttcgactactggggccagggaaccctggtcacagtctcttctacgcgtgaggacctgaagaacgtgttcccacctgaggtggccgtgttcgagcctagcgaggccgagatcagccacacccagaaagccaccctcgtgtgcctggctaccggcttctaccccgaccatgtggaactgtcttggtgggtcaacggcaaagaggtgcacagcggcgtgtgtaccgacccccagccactgaaagaacagcccgccctgaacgacagccggtactgcctgagcagcagactgagagtgtccgccaccttctggcagaacccccggaaccacttcagatgccaggtgcagttctacggcctgagcgagaacgacgagtggacccaggacagagccaagcccgtgacccagatcgtgtctgccgaagcctggggcagagccgattgcgacgtgaagctggtggaaaagagcttcgagacagacaccaacctgaacttccagaacctgagcgtgatcggcttcagaatcctgctgctgaaagtggccggctttaacctgctgatgaccctgcggctgtggtccagc

SEQ ID NO: 4216 - DNA, 1878 bp, synthetic construct
  source 1..1878: mol_type = other DNA
atggccttaccagtgaccgccttgctcctgccgctggccttgctgctccacgccgccaggccggacatccagatgacacagagccctagcagcctgtctgccagcgtgggagacagagtgaccatcacatgcaaggccagcgaccacatcaacaactggctggcctggtatcagcagaagcctggacaggcccctaagctgctgatctacggcgctaccacactggaaacaggcgtgcccagcagattttctggcagcggctctggcaccgactacaccctgacaatatccagcctccagcctgaggacttcgccacctactactgtcagcagagctggaacaccccttggacattcggccagggcaccaagctggaaatcaagagactcgagatccagaaccctgatcctgccgtgtaccagctgcgggatagcaagagcagcgacaagagcgtgtgtctgttcaccgacttcgacagccagaccaacgtgtcccagagcaaggactccgacgtgtacatcaccgataagtgcgtgctggacatgcggagcatggacttcaagagcaactccgccgtggcctggtccaacaagtccgatttcgcctgcgccaacgccttcaacaacagcattatccccgaggacacattcttcccaagccccgagagcagctgcggctttaccagcgagagctaccagcagggcgtgctgagcgccaccatcctgtacgagatcctgctgggcaaggccaccctgtacgccgtgctggtgtctgccctggtgctgatggctatggtcaagcggaaggacagccggggacgcgccaagagaagcggatctggcgtgaagcagaccctgaatttcgacctgctgaagctggctggcgacgtggaatccaacccaggccctactagtatggactggatttggcgcatccttttccttgtcggcgctgctaccggcgcgcattccttcgaacaagttcagcttcaacagcctggcgctgagctggtcaaacctggcgcttctgtgaagatgagctgcaaagccagcggctacgccttcagcagctactggatcaactggatgaagcagaaacccggccagggactcgaatggatcggccaaatctatcccggcgacggcgacaccaactacaacggcaagttcaagggcagagccacactgaccgccgatacctctagcagcacagcctacatgcagctgagcagcctgaccagcgaagatagcgccgtgtacttctgtgcccggtccatcacaacagtcgtgggctgcgctatggactattggggccagggaacaagcgtgaccgtgtctagtacgcgtgaggacctgaagaacgtgttcccacctgaggtggccgtgttcgagcctagcgaggccgagatcagccacacccagaaagccaccctcgtgtgcctggctaccggcttctaccccgaccatgtggaactgtcttggtgggtcaacggcaaagaggtgcacagcggcgtgtgtaccgacccccagccactgaaagaacagcccgccctgaacgacagccggtactgcctgagcagcagactgagagtgtccgccaccttctggcagaacccccggaaccacttcagatgccaggtgcagttctacggcctgagcgagaacgacgagtggacccaggacagagccaagcccgtgacccagatcgtgtctgccgaagcctggggcagagccgattgcgacgtgaagctggtggaaaagagcttcgagacagacaccaacctgaacttccagaacctgagcgtgatcggcttcagaatcctgctgctgaaagtggccggctttaacctgctgatgaccctgcggctgtggtccagc

SEQ ID NO: 4217 - DNA, 1884 bp, synthetic construct
  source 1..1884: mol_type = other DNA
atggccttaccagtgaccgccttgctcctgccgctggccttgctgctccacgccgccaggccgcagatcgtgctgtctcagtctcctgccatcctgagcgcttccccaggcgagaaagtgaccatgacctgtagagccagcagcagcgtgtcctacatgcactggtatcagcagaagcccggcagcagccctaagccttggatctacgccaccagcaatctggcctctggcgtgccagccagattttctggctctggcagcggcaccagctacagcttcacaatcagcagagtggaagccgaggacgccgccacctactattgtcagcagtggaccttcaatcctcctaccttcggcggaggcacccggctggaaatcaaaagaacagtggctgctctcgagatccagaaccctgatcctgccgtgtaccagctgcgggatagcaagagcagcgacaagagcgtgtgtctgttcaccgacttcgacagccagaccaacgtgtcccagagcaaggactccgacgtgtacatcaccgataagtgcgtgctggacatgcggagcatggacttcaagagcaactccgccgtggcctggtccaacaagtccgatttcgcctgcgccaacgccttcaacaacagcattatccccgaggacacattcttcccaagccccgagagcagctgcggctttaccagcgagagctaccagcagggcgtgctgagcgccaccatcctgtacgagatcctgctgggcaaggccaccctgtacgccgtgctggtgtctgccctggtgctgatggctatggtcaagcggaaggacagccggggacgcgccaagagaagcggatctggcgtgaagcagaccctgaatttcgacctgctgaagctggctggcgacgtggaatccaacccaggccctactagtatggactggatttggcgcatccttttccttgtcggcgctgctaccggcgcgcattccttcgaacaggcttatctgcaacagagcggagccgaactcgtcagacctggcgcttctgtgaagatgagctgcaaggccagcggctacaccttcaccagctataatatgcactgggtcaagcagacccctcggcagggactcgaatggatcggcggaatctatcccggcaacggcgacacctcctacaaccagaagttcaagggcaaagccacactgaccgtgggcaagagcagcagcaccgcctatatgcagctcagcagcctgaccagcgaggacagcgccgtgtacttctgcgccagatacgactacaactacgctatggactactggggccagggcaccagcgtgacagttagctctgccagcacgcgtgaggacctgaagaacgtgttcccacctgaggtggccgtgttcgagcctagcgaggccgagatcagccacacccagaaagccaccctcgtgtgcctggctaccggcttctaccccgaccatgtggaactgtcttggtgggtcaacggcaaagaggtgcacagcggcgtgtgtaccgacccccagccactgaaagaacagcccgccctgaacgacagccggtactgcctgagcagcagactgagagtgtccgccaccttctggcagaacccccggaaccacttcagatgccaggtgcagttctacggcctgagcgagaacgacgagtggacccaggacagagccaagcccgtgacccagatcgtgtctgccgaagcctggggcagagccgattgcgacgtgaagctggtggaaaagagcttcgagacagacaccaacctgaacttccagaacctgagcgtgatcggcttcagaatcctgctgctgaaagtggccggctttaacctgctgatgaccctgcggctgtggtccagc

SEQ ID NO: 4218 - DNA, 1878 bp, synthetic construct
  source 1..1878: mol_type = other DNA
atggccttaccagtgaccgccttgctcctgccgctggccttgctgctccacgccgccaggccggagatcgtgctgacacagagccctgccaccctgtctctgagccctggcgaaagagccaccctgagctgtagagccagccagagcgtgtccagctacctggcctggtatcagcagaagcccggccaggctccccggctgctgatctacgatgccagcaatagagccaccggcatccccgccagattttccggctctggcagcggcaccgacttcaccctgaccatcagctccctggaacccgaggacttcgccgtgtactactgccagcagcggagcaactggcccatcacattcggccagggcacccggctggaaatcaaactcgagatccagaaccctgatcctgccgtgtaccagctgcgggatagcaagagcagcgacaagagcgtgtgtctgttcaccgacttcgacagccagaccaacgtgtcccagagcaaggactccgacgtgtacatcaccgataagtgcgtgctggacatgcggagcatggacttcaagagcaactccgccgtggcctggtccaacaagtccgatttcgcctgcgccaacgccttcaacaacagcattatccccgaggacacattcttcccaagccccgagagcagctgcggctttaccagcgagagctaccagcagggcgtgctgagcgccaccatcctgtacgagatcctgctgggcaaggccaccctgtacgccgtgctggtgtctgccctggtgctgatggctatggtcaagcggaaggacagccggggacgcgccaagagaagcggatctggcgtgaagcagaccctgaatttcgacctgctgaagctggctggcgacgtggaatccaacccaggccctactagtatggactggatttggcgcatccttttccttgtcggcgctgctaccggcgcgcattccttcgaagaggtgcagcttgttgagtctggcggaggactggtgcagcccgatagaagcctgagactgtcttgtgccgccagcggcttcaccttccacgattatgccatgcactgggtccgacaggcccctggcaaaggacttgaatgggtgtccaccatctcttggaacagcggcacaatcggctacgccgactctgtgaagggcagattcaccatcagccgggacaacgccaagaacagcctgtacctccagatgaactccctgagagccgaggacacagccctgtactactgcgccaaggacatccagtacggcaactactactacggcatggacgtgtggggccagggcacaacagtgacagtctcttctacgcgtgaggacctgaagaacgtgttcccacctgaggtggccgtgttcgagcctagcgaggccgagatcagccacacccagaaagccaccctcgtgtgcctggctaccggcttctaccccgaccatgtggaactgtcttggtgggtcaacggcaaagaggtgcacagcggcgtgtgtaccgacccccagccactgaaagaacagcccgccctgaacgacagccggtactgcctgagcagcagactgagagtgtccgccaccttctggcagaacccccggaaccacttcagatgccaggtgcagttctacggcctgagcgagaacgacgagtggacccaggacagagccaagcccgtgacccagatcgtgtctgccgaagcctggggcagagccgattgcgacgtgaagctggtggaaaagagcttcgagacagacaccaacctgaacttccagaacctgagcgtgatcggcttcagaatcctgctgctgaaagtggccggctttaacctgctgatgaccctgcggctgtggtccagc

SEQ ID NO: 4219 - DNA, 1863 bp, synthetic construct
  source 1..1863: mol_type = other DNA
atggccttaccagtgaccgccttgctcctgccgctggccttgctgctccacgccgccaggccggacatccagatgacacagagccctagcagcctgtctgccagcgtgggagatagagtgaccatcaactgcaaggccagccaggacatcaacagctacctgagctggttccagcagaagcctggcaaggcccctaagacactgatctaccgggccaacagactggtggatggcgtgccaagcagattttctggcagcggcagcggccaggattacaccctgacaatatccagcctccagcctgaggacttcgccacctactactgcctccagtacgacgagttccctctgacctttggcggaggcaccaaggtggaaatcaaactcgagatccagaaccctgatcctgccgtgtaccagctgcgggatagcaagagcagcgacaagagcgtgtgtctgttcaccgacttcgacagccagaccaacgtgtcccagagcaaggactccgacgtgtacatcaccgataagtgcgtgctggacatgcggagcatggacttcaagagcaactccgccgtggcctggtccaacaagtccgatttcgcctgcgccaacgccttcaacaacagcattatccccgaggacacattcttcccaagccccgagagcagctgcggctttaccagcgagagctaccagcagggcgtgctgagcgccaccatcctgtacgagatcctgctgggcaaggccaccctgtacgccgtgctggtgtctgccctggtgctgatggctatggtcaagcggaaggacagccggggacgcgccaagagaagcggatctggcgtgaagcagaccctgaatttcgacctgctgaagctggctggcgacgtggaatccaacccaggccctactagtatggactggatttggcgcatccttttccttgtcggcgctgctaccggcgcgcattccttcgaacaggtgcaactggtgcagtctggggccgaagtgaagaaacctggggcctctgtgaaggtgtcctgcaaagccagcggctacacctttaccaactacgacatcaactgggtccgacaggctccaggccaaggactggaatggatcggctggatctatcctggcgacggcagcaccaagtacaacgagaagttcaaggccaaggccacactgaccgccgataccagcacaagcaccgcctacatggaactgcggagcctgagaagcgacgacaccgccgtgtactattgtgcctccggctacgaggacgctatggactattggggccagggcaccaccgtgacagtgtctagtacgcgtgaggacctgaagaacgtgttcccacctgaggtggccgtgttcgagcctagcgaggccgagatcagccacacccagaaagccaccctcgtgtgcctggctaccggcttctaccccgaccatgtggaactgtcttggtgggtcaacggcaaagaggtgcacagcggcgtgtgtaccgacccccagccactgaaagaacagcccgccctgaacgacagccggtactgcctgagcagcagactgagagtgtccgccaccttctggcagaacccccggaaccacttcagatgccaggtgcagttctacggcctgagcgagaacgacgagtggacccaggacagagccaagcccgtgacccagatcgtgtctgccgaagcctggggcagagccgattgcgacgtgaagctggtggaaaagagcttcgagacagacaccaacctgaacttccagaacctgagcgtgatcggcttcagaatcctgctgctgaaagtggccggctttaacctgctgatgaccctgcggctgtggtccagc

SEQ ID NO: 4220 - DNA, 1869 bp, synthetic construct
  source 1..1869: mol_type = other DNA
atggccttaccagtgaccgccttgctcctgccgctggccttgctgctccacgccgccaggccggacatcgtgatgacccagacacctctgagcctgagcgtgacacctggacagcctgccagcattagctgcaagagcagccagtctctgctggacggcgacggcaagacctacctgaattggctgctccagaagcctggacagagccctcagcggctgatctacctggtgtccaagctggatagcggcgtgcccgatagattttctggcagcggctctggcaccgacttcaccctgaagatcagcagagtggaagccgaggacgtgggcgtgtactactgttggcagggcacacacttccccagaacattcggccagggcacaaagctggaaatcaaactcgagatccagaaccctgatcctgccgtgtaccagctgcgggatagcaagagcagcgacaagagcgtgtgtctgttcaccgacttcgacagccagaccaacgtgtcccagagcaaggactccgacgtgtacatcaccgataagtgcgtgctggacatgcggagcatggacttcaagagcaactccgccgtggcctggtccaacaagtccgatttcgcctgcgccaacgccttcaacaacagcattatccccgaggacacattcttcccaagccccgagagcagctgcggctttaccagcgagagctaccagcagggcgtgctgagcgccaccatcctgtacgagatcctgctgggcaaggccaccctgtacgccgtgctggtgtctgccctggtgctgatggctatggtcaagcggaaggacagccggggacgcgccaagagaagcggatctggcgtgaagcagaccctgaatttcgacctgctgaagctggctggcgacgtggaatccaacccaggccctactagtatggactggatttggcgcatccttttccttgtcggcgctgctaccggcgcgcattccttcgaacaagtgcaactggttcagagcggagccgaagtgaagaaacctggggcctctgtgaaggtgtcctgcaaggccagcggctacaccttcaaggacacctacatccactgggtccgacaggcccctggacaaggacttgagtggatgggcagaatcgaccccgccaacggcaacaccaaatacgaccccaagttccagggcagagtgaccatgaccagagacaccagcatcagcaccgcctacatggaactgagccggctgagatccgatgacaccgccgtgtactattgcgctagaagaggcggagtggattggggccagggaacactggttaccgtgtctagtacgcgtgaggacctgaagaacgtgttcccacctgaggtggccgtgttcgagcctagcgaggccgagatcagccacacccagaaagccaccctcgtgtgcctggctaccggcttctaccccgaccatgtggaactgtcttggtgggtcaacggcaaagaggtgcacagcggcgtgtgtaccgacccccagccactgaaagaacagcccgccctgaacgacagccggtactgcctgagcagcagactgagagtgtccgccaccttctggcagaacccccggaaccacttcagatgccaggtgcagttctacggcctgagcgagaacgacgagtggacccaggacagagccaagcccgtgacccagatcgtgtctgccgaagcctggggcagagccgattgcgacgtgaagctggtggaaaagagcttcgagacagacaccaacctgaacttccagaacctgagcgtgatcggcttcagaatcctgctgctgaaagtggccggctttaacctgctgatgaccctgcggctgtggtccagc

SEQ ID NO: 4221 - DNA, 1872 bp, synthetic construct
  source 1..1872: mol_type = other DNA
atggccttaccagtgaccgccttgctcctgccgctggccttgctgctccacgccgccaggccggacatccagatgacacagagccctagcagcctgtctgccagcgtgggagacagagtgaccatcacatgcaaggccagccaggatgtgtctacagccgtggcctggttccagcagaagcctggaaaagcccctaagctgctgatctacagccccagctacagatacaccggcgtgcccagcagattttctggcagcggctctggcaccgacttcaccctgacaatatccagcctccagcctgaggacttcacctactactgccagcagctctacagcaccccttacacattcggccagggcaccaaggtggaaatcaaactcgagatccagaaccctgatcctgccgtgtaccagctgcgggatagcaagagcagcgacaagagcgtgtgtctgttcaccgacttcgacagccagaccaacgtgtcccagagcaaggactccgacgtgtacatcaccgataagtgcgtgctggacatgcggagcatggacttcaagagcaactccgccgtggcctggtccaacaagtccgatttcgcctgcgccaacgccttcaacaacagcattatccccgaggacacattcttcccaagccccgagagcagctgcggctttaccagcgagagctaccagcagggcgtgctgagcgccaccatcctgtacgagatcctgctgggcaaggccaccctgtacgccgtgctggtgtctgccctggtgctgatggctatggtcaagcggaaggacagccggggacgcgccaagagaagcggatctggcgtgaagcagaccctgaatttcgacctgctgaagctggctggcgacgtggaatccaacccaggccctactagtatggactggatttggcgcatccttttccttgtcggcgctgctaccggcgcgcattccttcgaagaagtgcaactggttcagagcggagccgaagtgaagaaacctggggcctctgtgaaggtgtcctgcaaagccagcggctacacctttaccgactactacctggacgtggtcgtgcggcaagctcctggacaaggactggaatggatcggcagagtgaacccctacaacggcggcaccatctacaaccagaaattcaagggaagagtgaccctgaccagagacaccagcacctccacagcctacctggaactgagcagcctgagaagcgaagataccgccgtgtactactgcgccagggaccactacagatatgaccctctgctggactactggggccagggaaccctggttacagtgtctagtacgcgtgaggacctgaagaacgtgttcccacctgaggtggccgtgttcgagcctagcgaggccgagatcagccacacccagaaagccaccctcgtgtgcctggctaccggcttctaccccgaccatgtggaactgtcttggtgggtcaacggcaaagaggtgcacagcggcgtgtgtaccgacccccagccactgaaagaacagcccgccctgaacgacagccggtactgcctgagcagcagactgagagtgtccgccaccttctggcagaacccccggaaccacttcagatgccaggtgcagttctacggcctgagcgagaacgacgagtggacccaggacagagccaagcccgtgacccagatcgtgtctgccgaagcctggggcagagccgattgcgacgtgaagctggtggaaaagagcttcgagacagacaccaacctgaacttccagaacctgagcgtgatcggcttcagaatcctgctgctgaaagtggccggctttaacctgctgatgaccctgcggctgtggtccagc

SEQ ID NO: 4222 - DNA, 1890 bp, synthetic construct
  source 1..1890: mol_type = other DNA
atggccttaccagtgaccgccttgctcctgccgctggccttgctgctccacgccgccaggccggacatccagatgacacagagccctagcagcctgtctgccagcgtgggagacagagtgaccatcacctgtagagccagccagagcgtgtccaccagcagctacaactacatgcactggtatcagcagaagcccggcaagcctcctaagctgctgattaagtacgccagcaacctggaaagcggcgtgcccagcagattttctggcagcggctctggcaccgacttcaccctgacaatatccagcctccagcctgaggacttcgccacctactactgtcagcactcctgggagatccctctgacattcggccagggcaccaaggtggaaatcaaactcgagatccagaaccctgatcctgccgtgtaccagctgcgggatagcaagagcagcgacaagagcgtgtgtctgttcaccgacttcgacagccagaccaacgtgtcccagagcaaggactccgacgtgtacatcaccgataagtgcgtgctggacatgcggagcatggacttcaagagcaactccgccgtggcctggtccaacaagtccgatttcgcctgcgccaacgccttcaacaacagcattatccccgaggacacattcttcccaagccccgagagcagctgcggctttaccagcgagagctaccagcagggcgtgctgagcgccaccatcctgtacgagatcctgctgggcaaggccaccctgtacgccgtgctggtgtctgccctggtgctgatggctatggtcaagcggaaggacagccggggacgcgccaagagaagcggatctggcgtgaagcagaccctgaatttcgacctgctgaagctggctggcgacgtggaatccaacccaggccctactagtatggactggatttggcgcatccttttccttgtcggcgctgctaccggcgcgcattccttcgaagaagtgcaactggttcagagcggagccgaagtgaagaaacctggggcctctgtgaaggtgtcctgcaaggccagcggctacagcttcaccgactattatatgcactgggtccgacaggctccaggccagggacttgagtggatcggcagaatcaacccctacaacggcgctgccttctacagccagaacttcaaggatagagtgaccctgaccgtggacaccagcaccagcacagcctacctggaactgagcagcctgagaagcgaggacaccgccgtgtactactgcgccattgagagaggcgctgacctggaaggctacgctatggattattggggccagggaaccctggtcaccgtgtcatctacgcgtgaggacctgaagaacgtgttcccacctgaggtggccgtgttcgagcctagcgaggccgagatcagccacacccagaaagccaccctcgtgtgcctggctaccggcttctaccccgaccatgtggaactgtcttggtgggtcaacggcaaagaggtgcacagcggcgtgtgtaccgacccccagccactgaaagaacagcccgccctgaacgacagccggtactgcctgagcagcagactgagagtgtccgccaccttctggcagaacccccggaaccacttcagatgccaggtgcagttctacggcctgagcgagaacgacgagtggacccaggacagagccaagcccgtgacccagatcgtgtctgccgaagcctggggcagagccgattgcgacgtgaagctggtggaaaagagcttcgagacagacaccaacctgaacttccagaacctgagcgtgatcggcttcagaatcctgctgctgaaagtggccggctttaacctgctgatgaccctgcggctgtggtccagc

SEQ ID NO: 4223 - DNA, 1884 bp, synthetic construct
  source 1..1884: mol_type = other DNA
atggccttaccagtgaccgccttgctcctgccgctggccttgctgctccacgccgccaggccggagatcgtgctgacacagtctccagccacactgagcgcttctccaggcgagagagtgaccctgacctgtagagccagcagcaacgtgatctccagctacgtgcactggtatcagcagaagcctggcagcagccccagactgtttctgtacagcaccagcaatctggcctccggcgtgccaagcagattttctggctctggcagcggcaccgacttcacctttaccatctctagcctggaagccgaggacgccgccacctactactgtcagcagtacagcggctaccctctgaccttcggccagggcacaagactggaaatcaaactcgagatccagaaccctgatcctgccgtgtaccagctgcgggatagcaagagcagcgacaagagcgtgtgtctgttcaccgacttcgacagccagaccaacgtgtcccagagcaaggactccgacgtgtacatcaccgataagtgcgtgctggacatgcggagcatggacttcaagagcaactccgccgtggcctggtccaacaagtccgatttcgcctgcgccaacgccttcaacaacagcattatccccgaggacacattcttcccaagccccgagagcagctgcggctttaccagcgagagctaccagcagggcgtgctgagcgccaccatcctgtacgagatcctgctgggcaaggccaccctgtacgccgtgctggtgtctgccctggtgctgatggctatggtcaagcggaaggacagccggggacgcgccaagagaagcggatctggcgtgaagcagaccctgaatttcgacctgctgaagctggctggcgacgtggaatccaacccaggccctactagtatggactggatttggcgcatccttttccttgtcggcgctgctaccggcgcgcattccttcgaacaagttcagctgcaagagtctggccctggcctggtcaagcctagcgaaacactgagcctgacctgcgccgtgtctggctactctatcaccagcgcctactattggaactggatcagacagcctcctggcaaaggactggaatggatcggctacatcagctacgacggcagaaacaactacaaccccagcctgaagaaccggatcaccatcaatcccgacaccagcaagaaccagttcagcctccagctgaacagcgtgacccctgaggataccgccgtgtactactgtgccagagaaggcgactacgacgtgggcaactactacgctatggactactggggccagggaaccctggtcacagtctcttctacgcgtgaggacctgaagaacgtgttcccacctgaggtggccgtgttcgagcctagcgaggccgagatcagccacacccagaaagccaccctcgtgtgcctggctaccggcttctaccccgaccatgtggaactgtcttggtgggtcaacggcaaagaggtgcacagcggcgtgtgtaccgacccccagccactgaaagaacagcccgccctgaacgacagccggtactgcctgagcagcagactgagagtgtccgccaccttctggcagaacccccggaaccacttcagatgccaggtgcagttctacggcctgagcgagaacgacgagtggacccaggacagagccaagcccgtgacccagatcgtgtctgccgaagcctggggcagagccgattgcgacgtgaagctggtggaaaagagcttcgagacagacaccaacctgaacttccagaacctgagcgtgatcggcttcagaatcctgctgctgaaagtggccggctttaacctgctgatgaccctgcggctgtggtccagc

SEQ ID NO: 4224 - DNA, 1884 bp, synthetic construct
  source 1..1884: mol_type = other DNA
atggccttaccagtgaccgccttgctcctgccgctggccttgctgctccacgccgccaggccggagatcgtgctgacacagtctcccgccacactgtcactgtctccaggcgaaagagccacactgagctgtagagccagcagcaacgtgatctccagctacgtgcactggtatcagcagaagcctggacaggcccctcggctgctgatctacagcacaagcaatctggcctctggcatccccgccagattttctggctctggaagcggcaccgacttcaccctgaccataagcagcctggaacctgaggacttcgccgtgtactactgccagcagtatagcggctaccctctgaccttcggccagggcacaagactggaaatcaaactcgagatccagaaccctgatcctgccgtgtaccagctgcgggatagcaagagcagcgacaagagcgtgtgtctgttcaccgacttcgacagccagaccaacgtgtcccagagcaaggactccgacgtgtacatcaccgataagtgcgtgctggacatgcggagcatggacttcaagagcaactccgccgtggcctggtccaacaagtccgatttcgcctgcgccaacgccttcaacaacagcattatccccgaggacacattcttcccaagccccgagagcagctgcggctttaccagcgagagctaccagcagggcgtgctgagcgccaccatcctgtacgagatcctgctgggcaaggccaccctgtacgccgtgctggtgtctgccctggtgctgatggctatggtcaagcggaaggacagccggggacgcgccaagagaagcggatctggcgtgaagcagaccctgaatttcgacctgctgaagctggctggcgacgtggaatccaacccaggccctactagtatggactggatttggcgcatccttttccttgtcggcgctgctaccggcgcgcattccttcgaagaagtgcaactggtggaaagtggcggcggactggtgcaacctggaagaagcctgagactgtcctgtgccgccagcggctactctatcacaagcgcctactactggaactgggtccgacaggctcctggcaaaggactggaatgggtgtcctacatcagctacgacggcagaaacaactacaaccccagcctgaagaaccgcttcaccatcagccgggacaacgccaagaagtccctgtacctccagatgaacagcctgagagccgaggacacagccctgtactattgcgccaaagagggcgactacgacgtcggcaactactacgctatggactactggggccagggaaccaccgtgactgtctcttctacgcgtgaggacctgaagaacgtgttcccacctgaggtggccgtgttcgagcctagcgaggccgagatcagccacacccagaaagccaccctcgtgtgcctggctaccggcttctaccccgaccatgtggaactgtcttggtgggtcaacggcaaagaggtgcacagcggcgtgtgtaccgacccccagccactgaaagaacagcccgccctgaacgacagccggtactgcctgagcagcagactgagagtgtccgccaccttctggcagaacccccggaaccacttcagatgccaggtgcagttctacggcctgagcgagaacgacgagtggacccaggacagagccaagcccgtgacccagatcgtgtctgccgaagcctggggcagagccgattgcgacgtgaagctggtggaaaagagcttcgagacagacaccaacctgaacttccagaacctgagcgtgatcggcttcagaatcctgctgctgaaagtggccggctttaacctgctgatgaccctgcggctgtggtccagc

SEQ ID NO: 4225 - DNA, 1881 bp, synthetic construct
  source 1..1881: mol_type = other DNA
atggccttaccagtgaccgccttgctcctgccgctggccttgctgctccacgccgccaggccggacgtggtcatgacacagaccccactgagcctgcctgtgtctctgggagatcaggccagcatctcctgtagaagcagccagagcctggtgcacagcaacggcaacacctacctgcggtggtatctccagaagcctggacagagccccaaggtgctgatctacaaggtgtccaacagagtgtccggcgtgcccgatagattttctggcagcggctctggcaccgacttcaccctgaagatcaatagagtggaagccgaggacctgggcgtgtacttctgtagccagagcacccatgtgccttggacctttggcggaggcaccaagctggaaatcaagctcgagatccagaaccctgatcctgccgtgtaccagctgcgggatagcaagagcagcgacaagagcgtgtgtctgttcaccgacttcgacagccagaccaacgtgtcccagagcaaggactccgacgtgtacatcaccgataagtgcgtgctggacatgcggagcatggacttcaagagcaactccgccgtggcctggtccaacaagtccgatttcgcctgcgccaacgccttcaacaacagcattatccccgaggacacattcttcccaagccccgagagcagctgcggctttaccagcgagagctaccagcagggcgtgctgagcgccaccatcctgtacgagatcctgctgggcaaggccaccctgtacgccgtgctggtgtctgccctggtgctgatggctatggtcaagcggaaggacagccggggacgcgccaagagaagcggatctggcgtgaagcagaccctgaatttcgacctgctgaagctggctggcgacgtggaatccaacccaggccctactagtatggactggatttggcgcatccttttccttgtcggcgctgctaccggcgcgcattccttcgaaggcgtgaagctggacgagacaggcggaggacttgttcaacctggcggagccatgaagctgagctgtgtgaccagcggctttaccttcggccactactggatgaactgggtccgacagtcccctgagaaaggactggaatgggtcgcccagttcagaaacaagccctacaactacgaaacctactacagcgacagcgtgaagggcagattcaccatcagccgggacgacagcaagtccagcgtgtacctccagatgaacaacctgcgcgtggaagataccggcatctactactgtaccggggccagctacggcatggaatatctcggccagggcaccagcgtgaccgtgtctacaacgcgtgaggacctgaagaacgtgttcccacctgaggtggccgtgttcgagcctagcgaggccgagatcagccacacccagaaagccaccctcgtgtgcctggctaccggcttctaccccgaccatgtggaactgtcttggtgggtcaacggcaaagaggtgcacagcggcgtgtgtaccgacccccagccactgaaagaacagcccgccctgaacgacagccggtactgcctgagcagcagactgagagtgtccgccaccttctggcagaacccccggaaccacttcagatgccaggtgcagttctacggcctgagcgagaacgacgagtggacccaggacagagccaagcccgtgacccagatcgtgtctgccgaagcctggggcagagccgattgcgacgtgaagctggtggaaaagagcttcgagacagacaccaacctgaacttccagaacctgagcgtgatcggcttcagaatcctgctgctgaaagtggccggctttaacctgctgatgaccctgcggctgtggtccagc

SEQ ID NO: 4226 - DNA, 1899 bp, synthetic construct
  source 1..1899: mol_type = other DNA
atggccttaccagtgaccgccttgctcctgccgctggccttgctgctccacgccgccaggccgcaggtgcaactggtggaatctggcggcaatctggttcagcctggcggctctctgagactgtcttgtgccgccagcggcttcaccttcggcagcttttctatgagctgggtccgacaagctcctggcggaggacttgaatgggtggcaggactgtctgccagaagcagcctgacacactacgccgactctgtgaagggcagattcaccatcagccgggacaacgccaagaacagcgtgtacctccagatgaacagcctgagagtggaagataccgccgtgtactactgcgccagaagaagctacgacagcagcggctactggggccacttctacagctacatggatgtgtggggccagggcaccctggttacagtttctctcgagatccagaaccctgatcctgccgtgtaccagctgcgggatagcaagagcagcgacaagagcgtgtgtctgttcaccgacttcgacagccagaccaacgtgtcccagagcaaggactccgacgtgtacatcaccgataagtgcgtgctggacatgcggagcatggacttcaagagcaactccgccgtggcctggtccaacaagtccgatttcgcctgcgccaacgccttcaacaacagcattatccccgaggacacattcttcccaagccccgagagcagctgcggctttaccagcgagagctaccagcagggcgtgctgagcgccaccatcctgtacgagatcctgctgggcaaggccaccctgtacgccgtgctggtgtctgccctggtgctgatggctatggtcaagcggaaggacagccggggacgcgccaagagaagcggatctggcgtgaagcagaccctgaatttcgacctgctgaagctggctggcgacgtggaatccaacccaggccctactagtatggactggatttggcgcatccttttccttgtcggcgctgctaccggcgcgcattccttcgaatctgtgctgacccagcctagctccgtgtctgctgctcctggacagaaagtgaccatctcctgtagcggcagcaccagcaacatcggcaacaactacgtgtcctggtatcagcagcaccccggcaaggcccctaagctgatgatctacgacgtgtccaagaggcccagcggcgtgccagatagattttccggcagcaagagcggcaacagcgccagcctggatattagcggactccagtctgaggacgaggccgactactattgcgccgcctgggatgatagcctgagcgagtttctgtttggcaccggcaccaagctgacagtgcttggaacgcgtgaggacctgaagaacgtgttcccacctgaggtggccgtgttcgagcctagcgaggccgagatcagccacacccagaaagccaccctcgtgtgcctggctaccggcttctaccccgaccatgtggaactgtcttggtgggtcaacggcaaagaggtgcacagcggcgtgtgtaccgacccccagccactgaaagaacagcccgccctgaacgacagccggtactgcctgagcagcagactgagagtgtccgccaccttctggcagaacccccggaaccacttcagatgccaggtgcagttctacggcctgagcgagaacgacgagtggacccaggacagagccaagcccgtgacccagatcgtgtctgccgaagcctggggcagagccgattgcgacgtgaagctggtggaaaagagcttcgagacagacaccaacctgaacttccagaacctgagcgtgatcggcttcagaatcctgctgctgaaagtggccggctttaacctgctgatgaccctgcggctgtggtccagc

SEQ ID NO: 4227 - DNA, 1884 bp, synthetic construct
  source 1..1884: mol_type = other DNA
atggccttaccagtgaccgccttgctcctgccgctggccttgctgctccacgccgccaggccggacgtggtcatgacacagagcccttctagcctgtctgccagcgtgggcgacagagtgacaatcacctgtcagagcagcctggacatcagccactacctgaactggtatcagcagaagcccggcaaggcccctaagctgctgatctacgacgccagcaatctggaaaccggcgtgcccagcagattttctggcagcggaagcggcacccacttcaccttcacaatatccagcctccagcctgaggacttcgccacctactactgccagcagtacgacaacctgcctctgacctttggcggaggcaccaagctggaaatcaagagactcgagatccagaaccctgatcctgccgtgtaccagctgcgggatagcaagagcagcgacaagagcgtgtgtctgttcaccgacttcgacagccagaccaacgtgtcccagagcaaggactccgacgtgtacatcaccgataagtgcgtgctggacatgcggagcatggacttcaagagcaactccgccgtggcctggtccaacaagtccgatttcgcctgcgccaacgccttcaacaacagcattatccccgaggacacattcttcccaagccccgagagcagctgcggctttaccagcgagagctaccagcagggcgtgctgagcgccaccatcctgtacgagatcctgctgggcaaggccaccctgtacgccgtgctggtgtctgccctggtgctgatggctatggtcaagcggaaggacagccggggacgcgccaagagaagcggatctggcgtgaagcagaccctgaatttcgacctgctgaagctggctggcgacgtggaatccaacccaggccctactagtatggactggatttggcgcatccttttccttgtcggcgctgctaccggcgcgcattccttcgaacaagttcaactggttcaatcaggcggaggcgtggtgcaacctggtggctctctgagagtgtcttgtgctgcctctggcgtgaccctgagcgactatggaatgcactgggtccgacaggcccctggcaaaggacttgagtgggtcgccttcatcagaaacgacggcagcgacaagtattacgccgacagcgtgaagggcagattcaccatcagccgggacaacagcgagaaaaccgtgtctctccagatgtctagcctgagagccgaggacaccgccgtgtactactgtgccaagaatggcgagagcggccctctggactactggtatctggatctgtggggcagaggcaccctggtcacagtctcttctacgcgtgaggacctgaagaacgtgttcccacctgaggtggccgtgttcgagcctagcgaggccgagatcagccacacccagaaagccaccctcgtgtgcctggctaccggcttctaccccgaccatgtggaactgtcttggtgggtcaacggcaaagaggtgcacagcggcgtgtgtaccgacccccagccactgaaagaacagcccgccctgaacgacagccggtactgcctgagcagcagactgagagtgtccgccaccttctggcagaacccccggaaccacttcagatgccaggtgcagttctacggcctgagcgagaacgacgagtggacccaggacagagccaagcccgtgacccagatcgtgtctgccgaagcctggggcagagccgattgcgacgtgaagctggtggaaaagagcttcgagacagacaccaacctgaacttccagaacctgagcgtgatcggcttcagaatcctgctgctgaaagtggccggctttaacctgctgatgaccctgcggctgtggtccagc

SEQ ID NO: 4228 - DNA, 1896 bp, synthetic construct
  source 1..1896: mol_type = other DNA
atggccttaccagtgaccgccttgctcctgccgctggccttgctgctccacgccgccaggccgagctacgagctgacacagcctccatccgtgtctggcacacctggacagagagtggctatctcctgtagcggcagcagcagcaacatcggcaccagaatggtcacctggtatcagcacgtgccaggcacagcccctaagctgctgatcttcaacaacaaccagcggcctagcggcgtgcccgatagattttctgccagcaagagcggcacaagcgccagcctggctatcatcggactccagtctgacgacgaggccgactactactgtgccacctgggacgacaacgtgaagtcctacgtgttcggcaccggcaccaaagtgacagtgcttggaagtagactcgagatccagaaccctgatcctgccgtgtaccagctgcgggatagcaagagcagcgacaagagcgtgtgtctgttcaccgacttcgacagccagaccaacgtgtcccagagcaaggactccgacgtgtacatcaccgataagtgcgtgctggacatgcggagcatggacttcaagagcaactccgccgtggcctggtccaacaagtccgatttcgcctgcgccaacgccttcaacaacagcattatccccgaggacacattcttcccaagccccgagagcagctgcggctttaccagcgagagctaccagcagggcgtgctgagcgccaccatcctgtacgagatcctgctgggcaaggccaccctgtacgccgtgctggtgtctgccctggtgctgatggctatggtcaagcggaaggacagccggggacgcgccaagagaagcggatctggcgtgaagcagaccctgaatttcgacctgctgaagctggctggcgacgtggaatccaacccaggccctactagtatggactggatttggcgcatccttttccttgtcggcgctgctaccggcgcgcattccttcgaacttgaaatggcccaggttcagctccagcagtggggagctggactgctgaagcctagcgagacactgagcctgacctgtgctgtgtacggcggcagcttcagcggctactactggtcctggatcagacagcctcctggcaaaggactggaatggatcggcgagatcaaccacagcggctccaccaactacaaccccagcctgaagtccagagtgaccatcagcgtggacaccagcaagaaccagttctccctgaagctgagcagcgtgacagccgctgataccgccgtgtactattgcgctagagcccctcagtcttggtacgtgggagatgtgtggggccagggcacactggttacagtgtcatctacgcgtgaggacctgaagaacgtgttcccacctgaggtggccgtgttcgagcctagcgaggccgagatcagccacacccagaaagccaccctcgtgtgcctggctaccggcttctaccccgaccatgtggaactgtcttggtgggtcaacggcaaagaggtgcacagcggcgtgtgtaccgacccccagccactgaaagaacagcccgccctgaacgacagccggtactgcctgagcagcagactgagagtgtccgccaccttctggcagaacccccggaaccacttcagatgccaggtgcagttctacggcctgagcgagaacgacgagtggacccaggacagagccaagcccgtgacccagatcgtgtctgccgaagcctggggcagagccgattgcgacgtgaagctggtggaaaagagcttcgagacagacaccaacctgaacttccagaacctgagcgtgatcggcttcagaatcctgctgctgaaagtggccggctttaacctgctgatgaccctgcggctgtggtccagc

SEQ ID NO: 4229 - DNA, 1887 bp, synthetic construct
  source 1..1887: mol_type = other DNA
atggccttaccagtgaccgccttgctcctgccgctggccttgctgctccacgccgccaggccgcagtctgtgctgacacagcctcctagcctgtctgtggcccctggaaagacagccagcatcacatgcggcggcaacaacatcggcatgaagtccgtgcactggtatcagcagaggccaggacaggctcctgtgctggtcatctactacgacagcgacagaccctctggcatccccggcagattttccggcagcaactctggcaataccgccacactgaccatctccagagtggaagctggcgacgaggccgactactactgccaagtgtgggataccaccggcgatcaccctggctatgtgtttggcaccggcaccaaagtgacagtgcttctcgagatccagaaccctgatcctgccgtgtaccagctgcgggatagcaagagcagcgacaagagcgtgtgtctgttcaccgacttcgacagccagaccaacgtgtcccagagcaaggactccgacgtgtacatcaccgataagtgcgtgctggacatgcggagcatggacttcaagagcaactccgccgtggcctggtccaacaagtccgatttcgcctgcgccaacgccttcaacaacagcattatccccgaggacacattcttcccaagccccgagagcagctgcggctttaccagcgagagctaccagcagggcgtgctgagcgccaccatcctgtacgagatcctgctgggcaaggccaccctgtacgccgtgctggtgtctgccctggtgctgatggctatggtcaagcggaaggacagccggggacgcgccaagagaagcggatctggcgtgaagcagaccctgaatttcgacctgctgaagctggctggcgacgtggaatccaacccaggccctactagtatggactggatttggcgcatccttttccttgtcggcgctgctaccggcgcgcattccttcgaacaagttcaactggttcagagcggagccgaagtgaagaaacctggcagcagcgtgaaggtgtcctgcaaagcaagcggcggcacctttagcagctacgccatctcttgggtccgacaggcacctggacaaggactggaatggatgggcggcatcatccccatcttcggcacagccaattacgcccagaaattccagggcagagtgaccatcaccgccgacgagtctacaagcaccgcctacatggaactgagcagcctgagaagcgaggacaccgccgtgtactattgtgccagaggcgtgtacggctacagcggctctgccccttatgatgagtggggccagggaaccctggtcaccgtttcttctacgcgtgaggacctgaagaacgtgttcccacctgaggtggccgtgttcgagcctagcgaggccgagatcagccacacccagaaagccaccctcgtgtgcctggctaccggcttctaccccgaccatgtggaactgtcttggtgggtcaacggcaaagaggtgcacagcggcgtgtgtaccgacccccagccactgaaagaacagcccgccctgaacgacagccggtactgcctgagcagcagactgagagtgtccgccaccttctggcagaacccccggaaccacttcagatgccaggtgcagttctacggcctgagcgagaacgacgagtggacccaggacagagccaagcccgtgacccagatcgtgtctgccgaagcctggggcagagccgattgcgacgtgaagctggtggaaaagagcttcgagacagacaccaacctgaacttccagaacctgagcgtgatcggcttcagaatcctgctgctgaaagtggccggctttaacctgctgatgaccctgcggctgtggtccagc

SEQ ID NO: 4230 - DNA, 1881 bp, synthetic construct
  source 1..1881: mol_type = other DNA
atggccttaccagtgaccgccttgctcctgccgctggccttgctgctccacgccgccaggccggaggtgcaactggttgagtctggcggaggactggtgcagcctggaagaagcctgagactgtcttgtgccgccagcggcttcaccttcgacgattatgccatgcactgggtccgacaggcccctggcaaaggacttgaatgggtgtccggcatctcctggaacagcggctctatcggctacgccgattccgtgaagggcagattcaccatcagccgggacaacgccaagaacagcctgtacctccagatgaactccctgagagccgaggacacagccctgtactactgcgccaaagacaaaggcggaggctactacgacttttggagcggcagcgattattggggccagggcacactggtcacagtgtctagcctcgagatccagaaccctgatcctgccgtgtaccagctgcgggatagcaagagcagcgacaagagcgtgtgtctgttcaccgacttcgacagccagaccaacgtgtcccagagcaaggactccgacgtgtacatcaccgataagtgcgtgctggacatgcggagcatggacttcaagagcaactccgccgtggcctggtccaacaagtccgatttcgcctgcgccaacgccttcaacaacagcattatccccgaggacacattcttcccaagccccgagagcagctgcggctttaccagcgagagctaccagcagggcgtgctgagcgccaccatcctgtacgagatcctgctgggcaaggccaccctgtacgccgtgctggtgtctgccctggtgctgatggctatggtcaagcggaaggacagccggggacgcgccaagagaagcggatctggcgtgaagcagaccctgaatttcgacctgctgaagctggctggcgacgtggaatccaacccaggccctactagtatggactggatttggcgcatccttttccttgtcggcgctgctaccggcgcgcattccttcgaatcttctgagctgacacaggaccctgccgtgtctgttgctctgggccagacagtgcggattacctgtcagggcgatagcctgagaagctactacgcctcctggtatcagcagaagccaggccaggctcctgtgctggtcatctacggcaagaacaacagacccagcggcatccccgatagattcagcggaagcagctctggcaataccgccagcctgacaattactggcgctcaggccgaggacgaggccgactactactgcaacagcagagatagcagcggctgggttttcggcggaggcacaaaactgacagtgctgacgcgtgaggacctgaagaacgtgttcccacctgaggtggccgtgttcgagcctagcgaggccgagatcagccacacccagaaagccaccctcgtgtgcctggctaccggcttctaccccgaccatgtggaactgtcttggtgggtcaacggcaaagaggtgcacagcggcgtgtgtaccgacccccagccactgaaagaacagcccgccctgaacgacagccggtactgcctgagcagcagactgagagtgtccgccaccttctggcagaacccccggaaccacttcagatgccaggtgcagttctacggcctgagcgagaacgacgagtggacccaggacagagccaagcccgtgacccagatcgtgtctgccgaagcctggggcagagccgattgcgacgtgaagctggtggaaaagagcttcgagacagacaccaacctgaacttccagaacctgagcgtgatcggcttcagaatcctgctgctgaaagtggccggctttaacctgctgatgaccctgcggctgtggtccagc

SEQ ID NO: 4231 - DNA, 1908 bp, synthetic construct
  source 1..1908: mol_type = other DNA
atggccttaccagtgaccgccttgctcctgccgctggccttgctgctccacgccgccaggccggaagtgcagctccagcagtctggacctggcctggttaagcctagccagacactgagcctgacctgtgccatcagcggcgatagcgtgctgagcaacagcgacacctggaactggatcagacagagccctagcagaggactggaatggctgggcagaacctaccacagaagcacttggtacgacgactacgccagctctgtgcggggcagagtgtccatcaatgtggacaccagcaagaaccagtacagcctgcaactgaacgccgtgacacctgaggataccggcgtgtactactgcgccagagacagactccaggacggcaactcttggagcgacgcctttgatgtgtggggccagggcacaatggtcaccgtttctagcctcgagatccagaaccctgatcctgccgtgtaccagctgcgggatagcaagagcagcgacaagagcgtgtgtctgttcaccgacttcgacagccagaccaacgtgtcccagagcaaggactccgacgtgtacatcaccgataagtgcgtgctggacatgcggagcatggacttcaagagcaactccgccgtggcctggtccaacaagtccgatttcgcctgcgccaacgccttcaacaacagcattatccccgaggacacattcttcccaagccccgagagcagctgcggctttaccagcgagagctaccagcagggcgtgctgagcgccaccatcctgtacgagatcctgctgggcaaggccaccctgtacgccgtgctggtgtctgccctggtgctgatggctatggtcaagcggaaggacagccggggacgcgccaagagaagcggatctggcgtgaagcagaccctgaatttcgacctgctgaagctggctggcgacgtggaatccaacccaggccctactagtatggactggatttggcgcatccttttccttgtcggcgctgctaccggcgcgcattccttcgaacaatctgctctgacacagcctgccagcgtgtcaggatctcctggacagagcatcaccatctcttgcaccggcaccagctctgatgtcggcggctacaattacgtgtcctggtatcagcagcaccccggcaaggcccctaagctgatgatctacgacgtgtccaacagacccagcggcgtgtccaatagattctccggcagcaagagcggcaacaccgccagcctgacaatttctggactgcaagccgaggacgaggccgactactactgtagcagctacaccagcagcagcacactggtgtacgtgttcggcacaggcaccaaagtgaccgtgcttacgcgtgaggacctgaagaacgtgttcccacctgaggtggccgtgttcgagcctagcgaggccgagatcagccacacccagaaagccaccctcgtgtgcctggctaccggcttctaccccgaccatgtggaactgtcttggtgggtcaacggcaaagaggtgcacagcggcgtgtgtaccgacccccagccactgaaagaacagcccgccctgaacgacagccggtactgcctgagcagcagactgagagtgtccgccaccttctggcagaacccccggaaccacttcagatgccaggtgcagttctacggcctgagcgagaacgacgagtggacccaggacagagccaagcccgtgacccagatcgtgtctgccgaagcctggggcagagccgattgcgacgtgaagctggtggaaaagagcttcgagacagacaccaacctgaacttccagaacctgagcgtgatcggcttcagaatcctgctgctgaaagtggccggctttaacctgctgatgaccctgcggctgtggtccagc

SEQ ID NO: 4232 - DNA, 1842 bp, synthetic construct
  source 1..1842: mol_type = other DNA
atggccttaccagtgaccgccttgctcctgccgctggccttgctgctccacgccgccaggccgcaggtgcaactggttcagtctggggccgaagtgaagaaacctggggcctctgtgaaggtgtcctgcaaggcttccggctacacctttaccagctacgacatcaactgggtccgacaggccacaggccaaggactggaatggatgggctggatgaaccccaacagcggcaataccggctacgcccagaaattccagggcagagtgaccatgaccagaaacaccagcatcagcaccgcctacatggaactgagcagcctgagaagcgaggacaccgccgtgtactattgcgccagaggcgacagcaccaaggtggaaatcaaactcgagatccagaaccctgatcctgccgtgtaccagctgcgggatagcaagagcagcgacaagagcgtgtgtctgttcaccgacttcgacagccagaccaacgtgtcccagagcaaggactccgacgtgtacatcaccgataagtgcgtgctggacatgcggagcatggacttcaagagcaactccgccgtggcctggtccaacaagtccgatttcgcctgcgccaacgccttcaacaacagcattatccccgaggacacattcttcccaagccccgagagcagctgcggctttaccagcgagagctaccagcagggcgtgctgagcgccaccatcctgtacgagatcctgctgggcaaggccaccctgtacgccgtgctggtgtctgccctggtgctgatggctatggtcaagcggaaggacagccggggacgcgccaagagaagcggatctggcgtgaagcagaccctgaatttcgacctgctgaagctggctggcgacgtggaatccaacccaggccctactagtatggactggatttggcgcatccttttccttgtcggcgctgctaccggcgcgcattccttcgaacaatctgtgctgacccagcctagatccgtgtctggctctcctggacagagcgtgaccatctcttgtaccggcaccagctctgatgtcggcggctacaattacgtgtcctggtatcagcagcaccccggcgaagcccctaagctgattatctacgacgccgacaagcggcccagcggcatcagcaatagattcagctctggcaagagcggcaacaccgccagcctgacaatcagcggactccaggtggaagatgaggccgactactactgctgctcctatgccggcggaagcacctgggttttcggaggcggtacaaaagtgaccgtgctgacgcgtgaggacctgaagaacgtgttcccacctgaggtggccgtgttcgagcctagcgaggccgagatcagccacacccagaaagccaccctcgtgtgcctggctaccggcttctaccccgaccatgtggaactgtcttggtgggtcaacggcaaagaggtgcacagcggcgtgtgtaccgacccccagccactgaaagaacagcccgccctgaacgacagccggtactgcctgagcagcagactgagagtgtccgccaccttctggcagaacccccggaaccacttcagatgccaggtgcagttctacggcctgagcgagaacgacgagtggacccaggacagagccaagcccgtgacccagatcgtgtctgccgaagcctggggcagagccgattgcgacgtgaagctggtggaaaagagcttcgagacagacaccaacctgaacttccagaacctgagcgtgatcggcttcagaatcctgctgctgaaagtggccggctttaacctgctgatgaccctgcggctgtggtccagc

SEQ ID NO: 4233 - DNA, 1908 bp, synthetic construct
  source 1..1908: mol_type = other DNA
atggccttaccagtgaccgccttgctcctgccgctggccttgctgctccacgccgccaggccggaagtgcagctccagcagtctggacctggcctggttaagcctagccagacactgagcctgacctgtgccatcagcggcgatagcgtgtcctctaatagcgccgcctggaactggatcagacagagccctagcagaggactggaatggctgggcagaacctactaccgcagcaagtggtacagcgactacgccgtgtccgtgaagtcccggatcaccatcaatcccgacaccagcaagaaccagttcagcctgcaactgaacagcgtgacccctgaggataccgccgtgtactactgcgccagagatccctacgacttttggagcggctaccccgacgcctttgacatctggggacagggcacaatggtcaccgtttctagcctcgagatccagaaccctgatcctgccgtgtaccagctgcgggatagcaagagcagcgacaagagcgtgtgtctgttcaccgacttcgacagccagaccaacgtgtcccagagcaaggactccgacgtgtacatcaccgataagtgcgtgctggacatgcggagcatggacttcaagagcaactccgccgtggcctggtccaacaagtccgatttcgcctgcgccaacgccttcaacaacagcattatccccgaggacacattcttcccaagccccgagagcagctgcggctttaccagcgagagctaccagcagggcgtgctgagcgccaccatcctgtacgagatcctgctgggcaaggccaccctgtacgccgtgctggtgtctgccctggtgctgatggctatggtcaagcggaaggacagccggggacgcgccaagagaagcggatctggcgtgaagcagaccctgaatttcgacctgctgaagctggctggcgacgtggaatccaacccaggccctactagtatggactggatttggcgcatccttttccttgtcggcgctgctaccggcgcgcattccttcgaacaatctgctctgacacagcctgccagcgtgtcaggatctcctggacagagcatcaccatctcttgcaccggcaccagctctgatgtcggcggctacaattacgtgtcctggtatcagcagcaccccggcaaggcccctaaagtgattatcagcgaagtgaacaacagacccagcggcgtgtcccacagattcagcggctctaagtctggcaacaccgccagcctgacaatctctggactgcaagccgaggacgaggccgactacttctgtagcagctacaccagcggcagaaccctgtacgtgttcggcacaggcagcaaagtgacagtgctgggaacgcgtgaggacctgaagaacgtgttcccacctgaggtggccgtgttcgagcctagcgaggccgagatcagccacacccagaaagccaccctcgtgtgcctggctaccggcttctaccccgaccatgtggaactgtcttggtgggtcaacggcaaagaggtgcacagcggcgtgtgtaccgacccccagccactgaaagaacagcccgccctgaacgacagccggtactgcctgagcagcagactgagagtgtccgccaccttctggcagaacccccggaaccacttcagatgccaggtgcagttctacggcctgagcgagaacgacgagtggacccaggacagagccaagcccgtgacccagatcgtgtctgccgaagcctggggcagagccgattgcgacgtgaagctggtggaaaagagcttcgagacagacaccaacctgaacttccagaacctgagcgtgatcggcttcagaatcctgctgctgaaagtggccggctttaacctgctgatgaccctgcggctgtggtccagc

SEQ ID NO: 4234 - DNA, 1905 bp, synthetic construct
  source 1..1905: mol_type = other DNA
atggccttaccagtgaccgccttgctcctgccgctggccttgctgctccacgccgccaggccgcaatctgctctgacacagcctgccagcgcctctggatctcctggacagagcgtgaccatctcctgtaccggcacctcttctgatgtcggcggctacaactacgtgtcctggtatcagcagcaccccggcaaggcccctaagctgatgatctacgacgtgtccaacagacccagcggcgtgtccaatagattctccggcagcaagagcggcaacaccgccagcctgacaatttctggactgcaagccgaggacgaggccgactactactgtagcagctacaccagcagcagcacactgtacgtgttcggcacaggcacccagctcacagttcttctcgagatccagaaccctgatcctgccgtgtaccagctgcgggatagcaagagcagcgacaagagcgtgtgtctgttcaccgacttcgacagccagaccaacgtgtcccagagcaaggactccgacgtgtacatcaccgataagtgcgtgctggacatgcggagcatggacttcaagagcaactccgccgtggcctggtccaacaagtccgatttcgcctgcgccaacgccttcaacaacagcattatccccgaggacacattcttcccaagccccgagagcagctgcggctttaccagcgagagctaccagcagggcgtgctgagcgccaccatcctgtacgagatcctgctgggcaaggccaccctgtacgccgtgctggtgtctgccctggtgctgatggctatggtcaagcggaaggacagccggggacgcgccaagagaagcggatctggcgtgaagcagaccctgaatttcgacctgctgaagctggctggcgacgtggaatccaacccaggccctactagtatggactggatttggcgcatccttttccttgtcggcgctgctaccggcgcgcattccttcgaagaagtgcagctccagcagtctggacctggcctggttaagcctagccagacactgagcctgacctgtgccatcagcggcgattccatgctgagcaacagcgacacctggaactggatcagacagagccccagcagaggcctggaatggctgggcagaacataccacagaagcacttggtacgacgactacgccagctctgtgcggggcagagtgtccatcaatgtggacaccagcaagaaccagtacagcctgcaactgaacgccgtgacacctgaggataccggcgtgtactactgtgccagagtgcggctccaggacggcaattcttggagcgacgcctttgatgtgtggggccagggcacaatggtcaccgtttctagcacgcgtgaggacctgaagaacgtgttcccacctgaggtggccgtgttcgagcctagcgaggccgagatcagccacacccagaaagccaccctcgtgtgcctggctaccggcttctaccccgaccatgtggaactgtcttggtgggtcaacggcaaagaggtgcacagcggcgtgtgtaccgacccccagccactgaaagaacagcccgccctgaacgacagccggtactgcctgagcagcagactgagagtgtccgccaccttctggcagaacccccggaaccacttcagatgccaggtgcagttctacggcctgagcgagaacgacgagtggacccaggacagagccaagcccgtgacccagatcgtgtctgccgaagcctggggcagagccgattgcgacgtgaagctggtggaaaagagcttcgagacagacaccaacctgaacttccagaacctgagcgtgatcggcttcagaatcctgctgctgaaagtggccggctttaacctgctgatgaccctgcggctgtggtccagc

SEQ ID NO: 4235 - DNA, 1905 bp, synthetic construct
  source 1..1905: mol_type = other DNA
atggccttaccagtgaccgccttgctcctgccgctggccttgctgctccacgccgccaggccggacgtgatgctgacccagacaccactgagcctgcctgtgtctctgggcgatcaggccagcatctcctgtagaagcagccagagcatcctgcacagcaccggcgatacctacctggaatggtatctccagaagcctggacagagccccaagctgctgattaacaaggtgtccaaccggctgagcggcgtgcccgatagattttctggcagcggctctggcaccgacttcaccctgaagatcagcagagtggaagccgaggacctgggcgtgtactactgcttccaaggcagccatgttccttggacctttggcggaggcaccaagctggaaatcaagagagctgacgccgctcctaccgtgtccatctttcctctcgagatccagaaccctgatcctgccgtgtaccagctgcgggatagcaagagcagcgacaagagcgtgtgtctgttcaccgacttcgacagccagaccaacgtgtcccagagcaaggactccgacgtgtacatcaccgataagtgcgtgctggacatgcggagcatggacttcaagagcaactccgccgtggcctggtccaacaagtccgatttcgcctgcgccaacgccttcaacaacagcattatccccgaggacacattcttcccaagccccgagagcagctgcggctttaccagcgagagctaccagcagggcgtgctgagcgccaccatcctgtacgagatcctgctgggcaaggccaccctgtacgccgtgctggtgtctgccctggtgctgatggctatggtcaagcggaaggacagccggggacgcgccaagagaagcggatctggcgtgaagcagaccctgaatttcgacctgctgaagctggctggcgacgtggaatccaacccaggccctactagtatggactggatttggcgcatccttttccttgtcggcgctgctaccggcgcgcattccttcgaacaagtgaagctccagcagagcggccctagccttgtgaaacctggcgcttccgtgaagatgagctgcaaggccagcggctacaccttcaccgatttctacatgaaatgggtcaagcagagccacggcaagtctctggaatggatcggcgacatcaaccccaacatcggagacaccttctacaaccagaagttcaagggcaaagccacactgaccgtggacaagagcagcagcaccgcctacatgcagctcaacagcctgaccagcgaggacagcgccgtgtacttttgttccgtgggctacttcgacgtgtggggagccggaacaaccgtgacagtctcttctacgcgtgaggacctgaagaacgtgttcccacctgaggtggccgtgttcgagcctagcgaggccgagatcagccacacccagaaagccaccctcgtgtgcctggctaccggcttctaccccgaccatgtggaactgtcttggtgggtcaacggcaaagaggtgcacagcggcgtgtgtaccgacccccagccactgaaagaacagcccgccctgaacgacagccggtactgcctgagcagcagactgagagtgtccgccaccttctggcagaacccccggaaccacttcagatgccaggtgcagttctacggcctgagcgagaacgacgagtggacccaggacagagccaagcccgtgacccagatcgtgtctgccgaagcctggggcagagccgattgcgacgtgaagctggtggaaaagagcttcgagacagacaccaacctgaacttccagaacctgagcgtgatcggcttcagaatcctgctgctgaaagtggccggctttaacctgctgatgaccctgcggctgtggtccagc

SEQ ID NO: 4236 - DNA, 1893 bp, synthetic construct
  source 1..1893: mol_type = other DNA
atggccttaccagtgaccgccttgctcctgccgctggccttgctgctccacgccgccaggccggagatcgtgctgacacagtctcccgccacactgtcactgtctccaggcgaaagagccacactgagctgtagagccagccagagcgtgtccatctacctggcctggtatcagcagaagcctggacaggctccccggctgctgatctacgatgccagcaatagagccacaggcatccccgccagattttctggctctggcagcggcaccgatttcaccctgaccataagcagcctggaacctgaggacttcgccgtgtactactgccagcagagaagcaactggcctcctttcacattcggccctggcaccaaggtggacatcaaactcgagatccagaaccctgatcctgccgtgtaccagctgcgggatagcaagagcagcgacaagagcgtgtgtctgttcaccgacttcgacagccagaccaacgtgtcccagagcaaggactccgacgtgtacatcaccgataagtgcgtgctggacatgcggagcatggacttcaagagcaactccgccgtggcctggtccaacaagtccgatttcgcctgcgccaacgccttcaacaacagcattatccccgaggacacattcttcccaagccccgagagcagctgcggctttaccagcgagagctaccagcagggcgtgctgagcgccaccatcctgtacgagatcctgctgggcaaggccaccctgtacgccgtgctggtgtctgccctggtgctgatggctatggtcaagcggaaggacagccggggacgcgccaagagaagcggatctggcgtgaagcagaccctgaatttcgacctgctgaagctggctggcgacgtggaatccaacccaggccctactagtatggactggatttggcgcatccttttccttgtcggcgctgctaccggcgcgcattccttcgaacaggtgcagcttgttgaaagcggaggcggagttgtgcagcctggcagaagtctgagactgtcttgtgccgccagcggcttcaccttcagcagctatggaatgcactgggtccgacaggcccctggcaaaggacttgaatgggttgccgtgatctgggacgacggcagcaacaagtattacgtggacagcgtgaagggcagattcaccatcagccgggacaacagcaagaacaccctgtacctccagatgaacagcctgagagccgaggacacagccgtgtattattgcgccagagatgactactacggcagcggctccttcaacagctactatggcacagacgtgtggggccagggcacaacagttaccgttagctctacgcgtgaggacctgaagaacgtgttcccacctgaggtggccgtgttcgagcctagcgaggccgagatcagccacacccagaaagccaccctcgtgtgcctggctaccggcttctaccccgaccatgtggaactgtcttggtgggtcaacggcaaagaggtgcacagcggcgtgtgtaccgacccccagccactgaaagaacagcccgccctgaacgacagccggtactgcctgagcagcagactgagagtgtccgccaccttctggcagaacccccggaaccacttcagatgccaggtgcagttctacggcctgagcgagaacgacgagtggacccaggacagagccaagcccgtgacccagatcgtgtctgccgaagcctggggcagagccgattgcgacgtgaagctggtggaaaagagcttcgagacagacaccaacctgaacttccagaacctgagcgtgatcggcttcagaatcctgctgctgaaagtggccggctttaacctgctgatgaccctgcggctgtggtccagc

SEQ ID NO: 4237 - DNA, 1848 bp, synthetic construct
  source 1..1848: mol_type = other DNA
atggccttaccagtgaccgccttgctcctgccgctggccttgctgctccacgccgccaggccggacatccagatgacacagagccctagcagcctgtctgccagcgtgggagacagagtgaccatcacctgtagagccagccagggcatctcttcttggctggcctggtatcagcagaagcccgagaaggcccctaagagcctgatctatgccgccagctctctccagagcggagtgcctagcagattttctggcagcggctccggcaccgatttcaccctgacaatatccagcctccagcctgaggacttcgccacctactactgccagcagtacaacagctacccctacaccttcggccagggcaccaagctggaaatcaaactcgagatccagaaccctgatcctgccgtgtaccagctgcgggatagcaagagcagcgacaagagcgtgtgtctgttcaccgacttcgacagccagaccaacgtgtcccagagcaaggactccgacgtgtacatcaccgataagtgcgtgctggacatgcggagcatggacttcaagagcaactccgccgtggcctggtccaacaagtccgatttcgcctgcgccaacgccttcaacaacagcattatccccgaggacacattcttcccaagccccgagagcagctgcggctttaccagcgagagctaccagcagggcgtgctgagcgccaccatcctgtacgagatcctgctgggcaaggccaccctgtacgccgtgctggtgtctgccctggtgctgatggctatggtcaagcggaaggacagccggggacgcgccaagagaagcggatctggcgtgaagcagaccctgaatttcgacctgctgaagctggctggcgacgtggaatccaacccaggccctactagtatggactggatttggcgcatccttttccttgtcggcgctgctaccggcgcgcattccttcgaagaagtgcaactggttcaatctggcggcggactggttcatccaggcggttctctgagactgagctgtgccggctctggcttcaccttcagcacctacctgatgtactgggtccgacaggcccctggcaagacactggaatgggtgtccgctattggcagcggaggcgatacctactacgccgactctgtgaagggcagattcaccatcagccgggacaacgccaagaacagcctgtacctccagatgaactccctgagagccgaggacatggccgtgtactactgtgccagaggactcggctattggggccagggaacactggtcacagtgtcctctacgcgtgaggacctgaagaacgtgttcccacctgaggtggccgtgttcgagcctagcgaggccgagatcagccacacccagaaagccaccctcgtgtgcctggctaccggcttctaccccgaccatgtggaactgtcttggtgggtcaacggcaaagaggtgcacagcggcgtgtgtaccgacccccagccactgaaagaacagcccgccctgaacgacagccggtactgcctgagcagcagactgagagtgtccgccaccttctggcagaacccccggaaccacttcagatgccaggtgcagttctacggcctgagcgagaacgacgagtggacccaggacagagccaagcccgtgacccagatcgtgtctgccgaagcctggggcagagccgattgcgacgtgaagctggtggaaaagagcttcgagacagacaccaacctgaacttccagaacctgagcgtgatcggcttcagaatcctgctgctgaaagtggccggctttaacctgctgatgaccctgcggctgtggtccagc

SEQ ID NO: 4238 - DNA, 1905 bp, synthetic construct
  source 1..1905: mol_type = other DNA
atggccttaccagtgaccgccttgctcctgccgctggccttgctgctccacgccgccaggccgctgcctgttctgacacagcctccatccgtgtctgtggcccctggaaagaccgccagaatcacatgcggcggcaacaacatcggcagcaagagcgtgcactggtatcagcagaagcctggacaggctcctgtgctggtggtgtacgacgacagcgatagacctagcggcatccccgagagattcagcggcagcaattccggcaataccgccacactgaccatcagcagagtggaagctggcgacgaggccgactactactgccaagtgtgggacagcagcagcgactacgtggtgtttggcggcggaacaaagctgacagtgcttctcgagatccagaaccctgatcctgccgtgtaccagctgcgggatagcaagagcagcgacaagagcgtgtgtctgttcaccgacttcgacagccagaccaacgtgtcccagagcaaggactccgacgtgtacatcaccgataagtgcgtgctggacatgcggagcatggacttcaagagcaactccgccgtggcctggtccaacaagtccgatttcgcctgcgccaacgccttcaacaacagcattatccccgaggacacattcttcccaagccccgagagcagctgcggctttaccagcgagagctaccagcagggcgtgctgagcgccaccatcctgtacgagatcctgctgggcaaggccaccctgtacgccgtgctggtgtctgccctggtgctgatggctatggtcaagcggaaggacagccggggacgcgccaagagaagcggatctggcgtgaagcagaccctgaatttcgacctgctgaagctggctggcgacgtggaatccaacccaggccctactagtatggactggatttggcgcatccttttccttgtcggcgctgctaccggcgcgcattccttcgaagaagttcaactggtgcagagcggagccgaagtgaagaagccaggcgagagcctgaagattagctgcaaaggcagcggctacagcttcaccagctactggatcggctgggtccgacagatgcctggcaaaggactggaatggatgggcatcatctaccccggcgacagcgacaccagatacagccctagctttcagggccaagtgaccatctccgccgacaagagcatcagcacagcctacctccagtggtcctctctgaaggccagcgataccgccatgtactactgcgccagacaagtctggggatggcaaggcggcatgtaccccaggtctaactggtggtacaacctggactcttggggccagggcacactggtcacagtctcttctacgcgtgaggacctgaagaacgtgttcccacctgaggtggccgtgttcgagcctagcgaggccgagatcagccacacccagaaagccaccctcgtgtgcctggctaccggcttctaccccgaccatgtggaactgtcttggtgggtcaacggcaaagaggtgcacagcggcgtgtgtaccgacccccagccactgaaagaacagcccgccctgaacgacagccggtactgcctgagcagcagactgagagtgtccgccaccttctggcagaacccccggaaccacttcagatgccaggtgcagttctacggcctgagcgagaacgacgagtggacccaggacagagccaagcccgtgacccagatcgtgtctgccgaagcctggggcagagccgattgcgacgtgaagctggtggaaaagagcttcgagacagacaccaacctgaacttccagaacctgagcgtgatcggcttcagaatcctgctgctgaaagtggccggctttaacctgctgatgaccctgcggctgtggtccagc

SEQ ID NO: 4239 - DNA, 1884 bp, synthetic construct
  source 1..1884: mol_type = other DNA
atggccttaccagtgaccgccttgctcctgccgctggccttgctgctccacgccgccaggccggagctggtcatgacacagagccctgcttctctggccgtgtcactgggacagagagccaccatctcttgcagagccagcgagagcgtggacagctacggcaagagcttcatgcactggtatcagctcaagcccggccagcctcctaagctgctgatctacagagcctccaacctggaaagcggcgtgccagccagattttctggcagcggcagcagaaccgacttcaccctgaccattgatcccgtggaagccgatgatgccgccacctactactgccagcagaacaacgaggacccctggacatttggcggaggcaccaagctggaaatcaaactcgagatccagaaccctgatcctgccgtgtaccagctgcgggatagcaagagcagcgacaagagcgtgtgtctgttcaccgacttcgacagccagaccaacgtgtcccagagcaaggactccgacgtgtacatcaccgataagtgcgtgctggacatgcggagcatggacttcaagagcaactccgccgtggcctggtccaacaagtccgatttcgcctgcgccaacgccttcaacaacagcattatccccgaggacacattcttcccaagccccgagagcagctgcggctttaccagcgagagctaccagcagggcgtgctgagcgccaccatcctgtacgagatcctgctgggcaaggccaccctgtacgccgtgctggtgtctgccctggtgctgatggctatggtcaagcggaaggacagccggggacgcgccaagagaagcggatctggcgtgaagcagaccctgaatttcgacctgctgaagctggctggcgacgtggaatccaacccaggccctactagtatggactggatttggcgcatccttttccttgtcggcgctgctaccggcgcgcattccttcgaagaagtgcagctcgaacagtctggccccgagcttgtgaaacctggcgcttccgtgaagatgagctgcaaggccagcggctacaccttcaccaactactacatgaaatgggtcaagcagagccacggcaagtccctggaatggatcggcgatctgaaccccaacaacggcgacaccttctacaaccagaagttcaagggcaaagccacactgaccgtggacaagagcagcaacaccgcctacatgcagctcaactccctgaccagcgaggacagcgccgtgtactactgtgccagaaccggcagatacgaagagaacgctatggactactggggccagggcacaagcgtgacagtctcttctacgcgtgaggacctgaagaacgtgttcccacctgaggtggccgtgttcgagcctagcgaggccgagatcagccacacccagaaagccaccctcgtgtgcctggctaccggcttctaccccgaccatgtggaactgtcttggtgggtcaacggcaaagaggtgcacagcggcgtgtgtaccgacccccagccactgaaagaacagcccgccctgaacgacagccggtactgcctgagcagcagactgagagtgtccgccaccttctggcagaacccccggaaccacttcagatgccaggtgcagttctacggcctgagcgagaacgacgagtggacccaggacagagccaagcccgtgacccagatcgtgtctgccgaagcctggggcagagccgattgcgacgtgaagctggtggaaaagagcttcgagacagacaccaacctgaacttccagaacctgagcgtgatcggcttcagaatcctgctgctgaaagtggccggctttaacctgctgatgaccctgcggctgtggtccagc

SEQ ID NO: 4240 - DNA, 1866 bp, synthetic construct
  source 1..1866: mol_type = other DNA
atggccttaccagtgaccgccttgctcctgccgctggccttgctgctccacgccgccaggccggacgtggtcatgacacagagcccttctagcctgtctgccagcgtgggcgacagagtgaccatcacctgtatggcctccgaggacatctacatccggctggcctggtatcagcagaagcctggaaacgcccctaagctgctgatctacgccgccacctctctggaaacaggcgtgccaagcagattttccggcagcggctctggcaccgatttcaccctgacaatatccagcctccagcctgaggacttcgccacctactactgccagcagtattggagcagcccctggacatttggcggaggcaccaaggtggaaatcaaactcgagatccagaaccctgatcctgccgtgtaccagctgcgggatagcaagagcagcgacaagagcgtgtgtctgttcaccgacttcgacagccagaccaacgtgtcccagagcaaggactccgacgtgtacatcaccgataagtgcgtgctggacatgcggagcatggacttcaagagcaactccgccgtggcctggtccaacaagtccgatttcgcctgcgccaacgccttcaacaacagcattatccccgaggacacattcttcccaagccccgagagcagctgcggctttaccagcgagagctaccagcagggcgtgctgagcgccaccatcctgtacgagatcctgctgggcaaggccaccctgtacgccgtgctggtgtctgccctggtgctgatggctatggtcaagcggaaggacagccggggacgcgccaagagaagcggatctggcgtgaagcagaccctgaatttcgacctgctgaagctggctggcgacgtggaatccaacccaggccctactagtatggactggatttggcgcatccttttccttgtcggcgctgctaccggcgcgcattccttcgaacaggttcagctgcaagagtctggccccggactggtcaagcctagccaaacactgagcctgacctgtaccgtgtccggctacagcatcaccagcgactacacctggaactggatcagacagcctcctggcaacggactggaatggatcggctacatcacctacagcggcagcaccagctacaaccccagcctgaaaagccgggtgctgatctccgtggacaccagcaagaatcaggtgtccctgaagctgagcagcgtgacagccgctgataccgccgtgtactactgtgccagactggggagaagatacacaatggactactggggccagggcaccaccgtgacagtttcttctacgcgtgaggacctgaagaacgtgttcccacctgaggtggccgtgttcgagcctagcgaggccgagatcagccacacccagaaagccaccctcgtgtgcctggctaccggcttctaccccgaccatgtggaactgtcttggtgggtcaacggcaaagaggtgcacagcggcgtgtgtaccgacccccagccactgaaagaacagcccgccctgaacgacagccggtactgcctgagcagcagactgagagtgtccgccaccttctggcagaacccccggaaccacttcagatgccaggtgcagttctacggcctgagcgagaacgacgagtggacccaggacagagccaagcccgtgacccagatcgtgtctgccgaagcctggggcagagccgattgcgacgtgaagctggtggaaaagagcttcgagacagacaccaacctgaacttccagaacctgagcgtgatcggcttcagaatcctgctgctgaaagtggccggctttaacctgctgatgaccctgcggctgtggtccagc

SEQ ID NO: 4241 - DNA, 1878 bp, synthetic construct
  source 1..1878: mol_type = other DNA
atggccttaccagtgaccgccttgctcctgccgctggccttgctgctccacgccgccaggccggatattgtgctgactcagagccctgccactctgagccttagtccaggcgacagagctaccatctcctgtagggcctctgaatccgtgaccattctgggctctcatctcatatattggtatcaacaaaagccgggccagcctccacggctgctcattcaactggcctctaacgtgcagaccggcgtgccagctagattttctggctctggctcccggaccgactttacactgacaatcagctccgtggaacccgaagattttgccgtctattattgcctccagtccaggaccattcctcggacattcggccagggaacaaaactcgaaatcaagcggctcgagatccagaaccctgatcctgccgtgtaccagctgcgggatagcaagagcagcgacaagagcgtgtgtctgttcaccgacttcgacagccagaccaacgtgtcccagagcaaggactccgacgtgtacatcaccgataagtgcgtgctggacatgcggagcatggacttcaagagcaactccgccgtggcctggtccaacaagtccgatttcgcctgcgccaacgccttcaacaacagcattatccccgaggacacattcttcccaagccccgagagcagctgcggctttaccagcgagagctaccagcagggcgtgctgagcgccaccatcctgtacgagatcctgctgggcaaggccaccctgtacgccgtgctggtgtctgccctggtgctgatggctatggtcaagcggaaggacagccggggacgcgccaagagaagcggatctggcgtgaagcagaccctgaatttcgacctgctgaagctggctggcgacgtggaatccaacccaggccctactagtatggactggatttggcgcatccttttccttgtcggcgctgctaccggcgcgcattccttcgaacaggtgcagctcgttcagagtggccccgaagtgaaaaagccaggcgagtccgtgaagatttcctgcaaagcctccggctacacattccggcactactctatgaattgggtcaagcaggccccaggccagggccttaagtggatgggacgcatcaataccgagtccggcgtgccaatctacgccgatgacttcaaaggccggttcagcttcaccgtggatacctctgcctccaccgcctacctggaaatcagcagcctgaccagcgaggatacagctgtgtacttctgtagcaacgattacctctacagcctggatttctggggacagggaaccacactgaccgtgtctagcacgcgtgaggacctgaagaacgtgttcccacctgaggtggccgtgttcgagcctagcgaggccgagatcagccacacccagaaagccaccctcgtgtgcctggctaccggcttctaccccgaccatgtggaactgtcttggtgggtcaacggcaaagaggtgcacagcggcgtgtgtaccgacccccagccactgaaagaacagcccgccctgaacgacagccggtactgcctgagcagcagactgagagtgtccgccaccttctggcagaacccccggaaccacttcagatgccaggtgcagttctacggcctgagcgagaacgacgagtggacccaggacagagccaagcccgtgacccagatcgtgtctgccgaagcctggggcagagccgattgcgacgtgaagctggtggaaaagagcttcgagacagacaccaacctgaacttccagaacctgagcgtgatcggcttcagaatcctgctgctgaaagtggccggctttaacctgctgatgaccctgcggctgtggtccagc

SEQ ID NO: 4242 - DNA, 1878 bp, synthetic construct
  source 1..1878: mol_type = other DNA
atggccttaccagtgaccgccttgctcctgccgctggccttgctgctccacgccgccaggccggacatcgtgctgacacagtctcccgccacactgtcactgagccctggcgatagagccacactgagctgtagagccagcgagagcgtgacaatcctgggcagccacctgatctactggtatcagcagaagcccggacaggcccctagactgctgattcagctcgccagcaatgtgcagacaggcatccctgccagattttccggcagcggcagcagaaccgatttcaccctgaccataagcagcctggaacctgaggacttcgccgtgtactactgcctccagagccggacaatccccagaacctttggacagggcaccaagctggaaatcaagagactcgagatccagaaccctgatcctgccgtgtaccagctgcgggatagcaagagcagcgacaagagcgtgtgtctgttcaccgacttcgacagccagaccaacgtgtcccagagcaaggactccgacgtgtacatcaccgataagtgcgtgctggacatgcggagcatggacttcaagagcaactccgccgtggcctggtccaacaagtccgatttcgcctgcgccaacgccttcaacaacagcattatccccgaggacacattcttcccaagccccgagagcagctgcggctttaccagcgagagctaccagcagggcgtgctgagcgccaccatcctgtacgagatcctgctgggcaaggccaccctgtacgccgtgctggtgtctgccctggtgctgatggctatggtcaagcggaaggacagccggggacgcgccaagagaagcggatctggcgtgaagcagaccctgaatttcgacctgctgaagctggctggcgacgtggaatccaacccaggccctactagtatggactggatttggcgcatccttttccttgtcggcgctgctaccggcgcgcattccttcgaacaggttcagctggtgcagtctggcagcgagctgaagaaacctggcgagagcgtgaagatcagctgcaaggccagcggctacaccttcacacactacagcatgaactgggtccgacaggcccctggacaaggactggaatggatgggcagaatcaacaccgagacaggcgagcccctgtacgccgacgatttcaagggcagattcgtgttcagcctggacaccagcgccagcacagcctatctccagatcagctctctgaaggccgaggacaccgccgtgtactactgctccaacgactacctgtactccctggactattggggccagggcacactggtcacagtgtctagtacgcgtgaggacctgaagaacgtgttcccacctgaggtggccgtgttcgagcctagcgaggccgagatcagccacacccagaaagccaccctcgtgtgcctggctaccggcttctaccccgaccatgtggaactgtcttggtgggtcaacggcaaagaggtgcacagcggcgtgtgtaccgacccccagccactgaaagaacagcccgccctgaacgacagccggtactgcctgagcagcagactgagagtgtccgccaccttctggcagaacccccggaaccacttcagatgccaggtgcagttctacggcctgagcgagaacgacgagtggacccaggacagagccaagcccgtgacccagatcgtgtctgccgaagcctggggcagagccgattgcgacgtgaagctggtggaaaagagcttcgagacagacaccaacctgaacttccagaacctgagcgtgatcggcttcagaatcctgctgctgaaagtggccggctttaacctgctgatgaccctgcggctgtggtccagc

SEQ ID NO: 4243 - DNA, 1881 bp, synthetic construct
  source 1..1881: mol_type = other DNA
atggccttaccagtgaccgccttgctcctgccgctggccttgctgctccacgccgccaggccggacatccagctgactcagagccctagctttctgagcgccagcgtgggcgacagagtgaccattacatgtagagccagccagggcatcagcaccgacctgaactggtatcagcagaagcctggcaaggcccctaagctgctgatctacgccgccagcaatctggaaagcggcgtgccaagcagattttccggctctggcagcggcaccgagttcaccctgacaatatctagcctccagcctgaggacttcgccacctactactgccagcagagctacaactggccctacacctttggcggaggcaccaaggtggaaatcaagagactcgagatccagaaccctgatcctgccgtgtaccagctgcgggatagcaagagcagcgacaagagcgtgtgtctgttcaccgacttcgacagccagaccaacgtgtcccagagcaaggactccgacgtgtacatcaccgataagtgcgtgctggacatgcggagcatggacttcaagagcaactccgccgtggcctggtccaacaagtccgatttcgcctgcgccaacgccttcaacaacagcattatccccgaggacacattcttcccaagccccgagagcagctgcggctttaccagcgagagctaccagcagggcgtgctgagcgccaccatcctgtacgagatcctgctgggcaaggccaccctgtacgccgtgctggtgtctgccctggtgctgatggctatggtcaagcggaaggacagccggggacgcgccaagagaagcggatctggcgtgaagcagaccctgaatttcgacctgctgaagctggctggcgacgtggaatccaacccaggccctactagtatggactggatttggcgcatccttttccttgtcggcgctgctaccggcgcgcattccttcgaagaagttcagctggttgaatcaggcggaggactcgtgaaacctggcggctctctgagactgtcttgtgccgccagcggcttcaccttcagcaacttcgagatgaactgggtccgacaggccccaggcaaaggactggaatgggtgtccggcatcagctccaatggccggtacatcaactacgccgacagcgtgaagggcagattcaccatcagccgggacaacgccaagaacagcctgtacctccagatgaactccctgagagccgaggacaccgccgtgtactattgtgccagagtggtggacttcgaccaggactacaacggcttcgactattggggccagggcaccctggttaccgttagctctacgcgtgaggacctgaagaacgtgttcccacctgaggtggccgtgttcgagcctagcgaggccgagatcagccacacccagaaagccaccctcgtgtgcctggctaccggcttctaccccgaccatgtggaactgtcttggtgggtcaacggcaaagaggtgcacagcggcgtgtgtaccgacccccagccactgaaagaacagcccgccctgaacgacagccggtactgcctgagcagcagactgagagtgtccgccaccttctggcagaacccccggaaccacttcagatgccaggtgcagttctacggcctgagcgagaacgacgagtggacccaggacagagccaagcccgtgacccagatcgtgtctgccgaagcctggggcagagccgattgcgacgtgaagctggtggaaaagagcttcgagacagacaccaacctgaacttccagaacctgagcgtgatcggcttcagaatcctgctgctgaaagtggccggctttaacctgctgatgaccctgcggctgtggtccagc

SEQ ID NO: 4244 - DNA, 1875 bp, synthetic construct
  source 1..1875: mol_type = other DNA
atggccttaccagtgaccgccttgctcctgccgctggccttgctgctccacgccgccaggccggacatccaactgactcagagccccagctttctgagcgcctctgtgggcgacagagtgaccatcacatgtagtctcagcctgggcatcagcacatggcgggattggtttccgccgaggcttggcaggggccttgagccgctgacctacgccgccagcacactgcaaagcggagtgcctagcagattttccggcagcggctctggcaccgagttcaccctgacaatatccagcctccagcctgaggacttcgccacctactactgccagcagctcaacagctaccctctgacctttggcggaggcaccaaggtggaaatcaagagactcgagatccagaaccctgatcctgccgtgtaccagctgcgggatagcaagagcagcgacaagagcgtgtgtctgttcaccgacttcgacagccagaccaacgtgtcccagagcaaggactccgacgtgtacatcaccgataagtgcgtgctggacatgcggagcatggacttcaagagcaactccgccgtggcctggtccaacaagtccgatttcgcctgcgccaacgccttcaacaacagcattatccccgaggacacattcttcccaagccccgagagcagctgcggctttaccagcgagagctaccagcagggcgtgctgagcgccaccatcctgtacgagatcctgctgggcaaggccaccctgtacgccgtgctggtgtctgccctggtgctgatggctatggtcaagcggaaggacagccggggacgcgccaagagaagcggatctggcgtgaagcagaccctgaatttcgacctgctgaagctggctggcgacgtggaatccaacccaggccctactagtatggactggatttggcgcatccttttccttgtcggcgctgctaccggcgcgcattccttcgaagaagttcaactggttgagtctggtggcggcctggttaagcctggcggatctctgagactgagctgtgccgccagcggcttcacctttagcacatacggcatgagctgggtccgacaggcccctggaaaaggacttgagtgggtcgcctacatcaacaacggctccggctacatctactacgccgacagcgtgaagggcagattcaccatcagccgggacaacgccaagaacagcctgtacctccagatgaactccctgagagccgaggacaccgccgtgtactattgtgccagaggacagtggtggagcggcggagactttgattattggggccagggcaccctggtcaccgtttcttctacgcgtgaggacctgaagaacgtgttcccacctgaggtggccgtgttcgagcctagcgaggccgagatcagccacacccagaaagccaccctcgtgtgcctggctaccggcttctaccccgaccatgtggaactgtcttggtgggtcaacggcaaagaggtgcacagcggcgtgtgtaccgacccccagccactgaaagaacagcccgccctgaacgacagccggtactgcctgagcagcagactgagagtgtccgccaccttctggcagaacccccggaaccacttcagatgccaggtgcagttctacggcctgagcgagaacgacgagtggacccaggacagagccaagcccgtgacccagatcgtgtctgccgaagcctggggcagagccgattgcgacgtgaagctggtggaaaagagcttcgagacagacaccaacctgaacttccagaacctgagcgtgatcggcttcagaatcctgctgctgaaagtggccggctttaacctgctgatgaccctgcggctgtggtccagc

SEQ ID NO: 4245 - DNA, 1878 bp, synthetic construct
  source 1..1878: mol_type = other DNA
atggccttaccagtgaccgccttgctcctgccgctggccttgctgctccacgccgccaggccggagatcgtgctgacacagtctcccgccacactgtcactgtctccaggcgaaagagccacactgagctgtagcgccagcagcagcgtgtcctacatgtactggtatcagcagaagcccggacaggcccctagactgctgatctacagaaccagcaacctggcctctggcatccccgccagattttctggctctggcagcggcaccgatttcaccctgaccataagcagcctggaacctgaggacttcgccgtgtactactgccagcagtaccacagctaccccaccacctttggacagggcaccaaggtggaaatcaagcggacagttctcgagatccagaaccctgatcctgccgtgtaccagctgcgggatagcaagagcagcgacaagagcgtgtgtctgttcaccgacttcgacagccagaccaacgtgtcccagagcaaggactccgacgtgtacatcaccgataagtgcgtgctggacatgcggagcatggacttcaagagcaactccgccgtggcctggtccaacaagtccgatttcgcctgcgccaacgccttcaacaacagcattatccccgaggacacattcttcccaagccccgagagcagctgcggctttaccagcgagagctaccagcagggcgtgctgagcgccaccatcctgtacgagatcctgctgggcaaggccaccctgtacgccgtgctggtgtctgccctggtgctgatggctatggtcaagcggaaggacagccggggacgcgccaagagaagcggatctggcgtgaagcagaccctgaatttcgacctgctgaagctggctggcgacgtggaatccaacccaggccctactagtatggactggatttggcgcatccttttccttgtcggcgctgctaccggcgcgcattccttcgaagaagtgcagctggttgaatcaggtggcggcctggttcaacctggcggatctctgagactgtcttgtgccgccagcggcttcagcttcaacacctacgccatgaactgggtccgacaggctcctggcaaaggactggaatgggtgtcccacatcagaagcaagagcaacaacttcgccacctactacgccgacagcgtgaaggacagattcaccatcagccgggacaacgccaagaacagcctgtacctccagatgaactccctgagagccgaggacaccgccgtgtattattgcgccagacaaggcggcgacttccctatggattattggggccagggcaccctggtcaccgtttcttctacgcgtgaggacctgaagaacgtgttcccacctgaggtggccgtgttcgagcctagcgaggccgagatcagccacacccagaaagccaccctcgtgtgcctggctaccggcttctaccccgaccatgtggaactgtcttggtgggtcaacggcaaagaggtgcacagcggcgtgtgtaccgacccccagccactgaaagaacagcccgccctgaacgacagccggtactgcctgagcagcagactgagagtgtccgccaccttctggcagaacccccggaaccacttcagatgccaggtgcagttctacggcctgagcgagaacgacgagtggacccaggacagagccaagcccgtgacccagatcgtgtctgccgaagcctggggcagagccgattgcgacgtgaagctggtggaaaagagcttcgagacagacaccaacctgaacttccagaacctgagcgtgatcggcttcagaatcctgctgctgaaagtggccggctttaacctgctgatgaccctgcggctgtggtccagc

SEQ ID NO: 4246 - DNA, 1866 bp, synthetic construct
  source 1..1866: mol_type = other DNA
atggccttaccagtgaccgccttgctcctgccgctggccttgctgctccacgccgccaggccggacgtggtcatgacacagagcccttctagcctgtctgccagcgtgggcgacagagtgaccatcacctgtaaagccagcgaggacatctacatccggctggcctggtatcagcagaagcctggaaaggcccctaagctgctgatctacgccgccacctctctggaaacaggcgtgccaagcagattttccggcagcggctctggcaccgatttcaccctgacaatatccagcctccagcctgaggacttcgccacctactactgccagcagtattggaccacaccttggacctttggcggaggcaccaaggtggaaatcaaactcgagatccagaaccctgatcctgccgtgtaccagctgcgggatagcaagagcagcgacaagagcgtgtgtctgttcaccgacttcgacagccagaccaacgtgtcccagagcaaggactccgacgtgtacatcaccgataagtgcgtgctggacatgcggagcatggacttcaagagcaactccgccgtggcctggtccaacaagtccgatttcgcctgcgccaacgccttcaacaacagcattatccccgaggacacattcttcccaagccccgagagcagctgcggctttaccagcgagagctaccagcagggcgtgctgagcgccaccatcctgtacgagatcctgctgggcaaggccaccctgtacgccgtgctggtgtctgccctggtgctgatggctatggtcaagcggaaggacagccggggacgcgccaagagaagcggatctggcgtgaagcagaccctgaatttcgacctgctgaagctggctggcgacgtggaatccaacccaggccctactagtatggactggatttggcgcatccttttccttgtcggcgctgctaccggcgcgcattccttcgaacaggtgcagctccaagagtctggccctggactggtcaagcctagccagacactgagcctgacctgtaccgtgtccggctacagcatcaccatcgactacacctggaactggatcagacagcctcctggcaaaggactggaatggatcggctacatcacctacagcggcagcaccgactacaaccccagcctgaaaagccgggtgctgatctccgtggacaccagcaagaatcaggtgtccctgaagctgagcagcgtgacagccgctgataccgccgtgtactactgtgccagactgggcagaagatacgccctggattattggggccagggcaccaccgtgacagtgtcatctacgcgtgaggacctgaagaacgtgttcccacctgaggtggccgtgttcgagcctagcgaggccgagatcagccacacccagaaagccaccctcgtgtgcctggctaccggcttctaccccgaccatgtggaactgtcttggtgggtcaacggcaaagaggtgcacagcggcgtgtgtaccgacccccagccactgaaagaacagcccgccctgaacgacagccggtactgcctgagcagcagactgagagtgtccgccaccttctggcagaacccccggaaccacttcagatgccaggtgcagttctacggcctgagcgagaacgacgagtggacccaggacagagccaagcccgtgacccagatcgtgtctgccgaagcctggggcagagccgattgcgacgtgaagctggtggaaaagagcttcgagacagacaccaacctgaacttccagaacctgagcgtgatcggcttcagaatcctgctgctgaaagtggccggctttaacctgctgatgaccctgcggctgtggtccagc

SEQ ID NO: 4247 - DNA, 1878 bp, synthetic construct
  source 1..1878: mol_type = other DNA
atggccttaccagtgaccgccttgctcctgccgctggccttgctgctccacgccgccaggccggacatccagatgacccagaccacaagcagcctgtctgccagcctgggcgacagagtgaccatctcttgtagagccagccaggacatcagcaactacctgaactggtatcagcagaaacccgacggcaccgtgaagctgctgatctactacaccagcatcctgcacagcggcgtgcccagcagattttctggctctggcagcggcaccgactacagcctgaccatcagcaatctggaacaagaggacttcgctacctacttctgccagcaaggcaacaccctgccttggacatttggcggaggcaccaagctggaaatcaaagctctcgagatccagaaccctgatcctgccgtgtaccagctgcgggatagcaagagcagcgacaagagcgtgtgtctgttcaccgacttcgacagccagaccaacgtgtcccagagcaaggactccgacgtgtacatcaccgataagtgcgtgctggacatgcggagcatggacttcaagagcaactccgccgtggcctggtccaacaagtccgatttcgcctgcgccaacgccttcaacaacagcattatccccgaggacacattcttcccaagccccgagagcagctgcggctttaccagcgagagctaccagcagggcgtgctgagcgccaccatcctgtacgagatcctgctgggcaaggccaccctgtacgccgtgctggtgtctgccctggtgctgatggctatggtcaagcggaaggacagccggggacgcgccaagagaagcggatctggcgtgaagcagaccctgaatttcgacctgctgaagctggctggcgacgtggaatccaacccaggccctactagtatggactggatttggcgcatccttttccttgtcggcgctgctaccggcgcgcattccttcgaagtgcaactggttgaatctggcggcggactggttaagcctggcggatctctgaagctgagctgtgccgcctctggcttcgccttcagcatctacgatatgagctgggtccgacagacccctgagaagagactggaatgggtcgcctacatctctagcggcggagggacctactatcccgacacagtgaagggcagattcaccatctccagagacaacgccaagaacaccctgtacctccagatgagcagcctgaagtccgaggacaccgccatgtactactgcgccagacacagcggctatggcacacattggggagtgctgtttgcctactggggccagggaacactggtcacagtttctgctacgcgtgaggacctgaagaacgtgttcccacctgaggtggccgtgttcgagcctagcgaggccgagatcagccacacccagaaagccaccctcgtgtgcctggctaccggcttctaccccgaccatgtggaactgtcttggtgggtcaacggcaaagaggtgcacagcggcgtgtgtaccgacccccagccactgaaagaacagcccgccctgaacgacagccggtactgcctgagcagcagactgagagtgtccgccaccttctggcagaacccccggaaccacttcagatgccaggtgcagttctacggcctgagcgagaacgacgagtggacccaggacagagccaagcccgtgacccagatcgtgtctgccgaagcctggggcagagccgattgcgacgtgaagctggtggaaaagagcttcgagacagacaccaacctgaacttccagaacctgagcgtgatcggcttcagaatcctgctgctgaaagtggccggctttaacctgctgatgaccctgcggctgtggtccagc

SEQ ID NO: 4248 - DNA, 1911 bp, synthetic construct
  source 1..1911: mol_type = other DNA
atggccttaccagtgaccgccttgctcctgccgctggccttgctgctccacgccgccaggccggacatcgtgatgacacagagccctgatagcctggccgtgtctctgggagagagagccaccatcaactgcaagagcagccagagcctgctgtacagaagcaaccagaagaactacctggcctggtatcagcagaagcccggccagcctcctaagctgctgatctactgggccagcaccagagaaagcggcgtgcccgatagattttctggctctggcagcggcaccgacttcaccctgacaatttctagcctgcaagccgaggacgtggccgtgtactactgccagcagtattacaactaccccagaaccttcggccagggcaccaaggtggaaatcaagagaacagttctcgagatccagaaccctgatcctgccgtgtaccagctgcgggatagcaagagcagcgacaagagcgtgtgtctgttcaccgacttcgacagccagaccaacgtgtcccagagcaaggactccgacgtgtacatcaccgataagtgcgtgctggacatgcggagcatggacttcaagagcaactccgccgtggcctggtccaacaagtccgatttcgcctgcgccaacgccttcaacaacagcattatccccgaggacacattcttcccaagccccgagagcagctgcggctttaccagcgagagctaccagcagggcgtgctgagcgccaccatcctgtacgagatcctgctgggcaaggccaccctgtacgccgtgctggtgtctgccctggtgctgatggctatggtcaagcggaaggacagccggggacgcgccaagagaagcggatctggcgtgaagcagaccctgaatttcgacctgctgaagctggctggcgacgtggaatccaacccaggccctactagtatggactggatttggcgcatccttttccttgtcggcgctgctaccggcgcgcattccttcgaagaagttcagctgcttgaatcaggcggcggactggttcaacctggcggatctctgagactgagctgtgccgccagcggctacagcatcacaagcgactatgcctggaactgggtccgacaggcccctggcaaaggactggaatgggtgtcctacatcagcaacagcggcagcaccagctacaaccccagcctgaagtcccggttcaccatcagcagagacaacagcaagaacaccctgtacctccagatgaacagcctgagagctgaggacaccgccgtgtattattgcgccaaagagcggaactacgactacgacgattactactacgctatggactactggggccagggaaccctggtcacagtctcttctacgcgtgaggacctgaagaacgtgttcccacctgaggtggccgtgttcgagcctagcgaggccgagatcagccacacccagaaagccaccctcgtgtgcctggctaccggcttctaccccgaccatgtggaactgtcttggtgggtcaacggcaaagaggtgcacagcggcgtgtgtaccgacccccagccactgaaagaacagcccgccctgaacgacagccggtactgcctgagcagcagactgagagtgtccgccaccttctggcagaacccccggaaccacttcagatgccaggtgcagttctacggcctgagcgagaacgacgagtggacccaggacagagccaagcccgtgacccagatcgtgtctgccgaagcctggggcagagccgattgcgacgtgaagctggtggaaaagagcttcgagacagacaccaacctgaacttccagaacctgagcgtgatcggcttcagaatcctgctgctgaaagtggccggctttaacctgctgatgaccctgcggctgtggtccagc

SEQ ID NO: 4249 - DNA, 1890 bp, synthetic construct
  source 1..1890: mol_type = other DNA
atggccttaccagtgaccgccttgctcctgccgctggccttgctgctccacgccgccaggccggacgtggtcatgacacagagccctctgagcctgcctgtgacacttggacagcctgccagcatcagctgtagaagcagccagagcctgctgcacagcagcggcaatacctacctggaatggtatcagcagaggcccggacagagccccagacctctgatctacaagatcagcacccggttcagcggcgtgcccgatagattttctggctctggcagcggcaccgacttcaccctgaagattagcagagtggaagccgaggacgtgggcgtgtactactgcttccaaggcagccacgtgccatacacctttggcggcggaacaaaggtggaaatcaagagactcgagatccagaaccctgatcctgccgtgtaccagctgcgggatagcaagagcagcgacaagagcgtgtgtctgttcaccgacttcgacagccagaccaacgtgtcccagagcaaggactccgacgtgtacatcaccgataagtgcgtgctggacatgcggagcatggacttcaagagcaactccgccgtggcctggtccaacaagtccgatttcgcctgcgccaacgccttcaacaacagcattatccccgaggacacattcttcccaagccccgagagcagctgcggctttaccagcgagagctaccagcagggcgtgctgagcgccaccatcctgtacgagatcctgctgggcaaggccaccctgtacgccgtgctggtgtctgccctggtgctgatggctatggtcaagcggaaggacagccggggacgcgccaagagaagcggatctggcgtgaagcagaccctgaatttcgacctgctgaagctggctggcgacgtggaatccaacccaggccctactagtatggactggatttggcgcatccttttccttgtcggcgctgctaccggcgcgcattccttcgaacaagttcagctggttcagagcggagccgaagtgaagaaacctggggcctctgtgaaggtgtcctgcaaagcctctggcctgaccatcgaggactactacatgcactgggtccgacaggcccctggacaaggacttgaatggatgggctggatcgaccccgagaacggcgatacagagtacggccctaagttccagggcagagtgaccatgaccagagacaccagcatcaacaccgcctacatggaactgagccggctgagatccgatgacaccgccgtgtactattgcgccgtgcacaatgcccactacggcacttggtttgcctattggggccagggcacactggtcaccgttagctctacgcgtgaggacctgaagaacgtgttcccacctgaggtggccgtgttcgagcctagcgaggccgagatcagccacacccagaaagccaccctcgtgtgcctggctaccggcttctaccccgaccatgtggaactgtcttggtgggtcaacggcaaagaggtgcacagcggcgtgtgtaccgacccccagccactgaaagaacagcccgccctgaacgacagccggtactgcctgagcagcagactgagagtgtccgccaccttctggcagaacccccggaaccacttcagatgccaggtgcagttctacggcctgagcgagaacgacgagtggacccaggacagagccaagcccgtgacccagatcgtgtctgccgaagcctggggcagagccgattgcgacgtgaagctggtggaaaagagcttcgagacagacaccaacctgaacttccagaacctgagcgtgatcggcttcagaatcctgctgctgaaagtggccggctttaacctgctgatgaccctgcggctgtggtccagc

SEQ ID NO: 4250 - DNA, 1866 bp, synthetic construct
  source 1..1866: mol_type = other DNA
atggccttaccagtgaccgccttgctcctgccgctggccttgctgctccacgccgccaggccggacatccagatgacacagagccctagcagcctgtctgccagcgtgggagacagagtgaccatcacctgtagagccagcgagaacatctacagcaacctggcctggtatcagcagaagcctggcaaggcccctaagctgctgatctacgccgccaccaatctggctgatggcgtgccaagcagattttccggctctggcagcggcaccgatttcaccctgacaatatccagcctccagcctgaggacttcgccacctactactgccagcacttttggggcacccctacattcggccagggcaccaaggtggaaatcaagagaacagttctcgagatccagaaccctgatcctgccgtgtaccagctgcgggatagcaagagcagcgacaagagcgtgtgtctgttcaccgacttcgacagccagaccaacgtgtcccagagcaaggactccgacgtgtacatcaccgataagtgcgtgctggacatgcggagcatggacttcaagagcaactccgccgtggcctggtccaacaagtccgatttcgcctgcgccaacgccttcaacaacagcattatccccgaggacacattcttcccaagccccgagagcagctgcggctttaccagcgagagctaccagcagggcgtgctgagcgccaccatcctgtacgagatcctgctgggcaaggccaccctgtacgccgtgctggtgtctgccctggtgctgatggctatggtcaagcggaaggacagccggggacgcgccaagagaagcggatctggcgtgaagcagaccctgaatttcgacctgctgaagctggctggcgacgtggaatccaacccaggccctactagtatggactggatttggcgcatccttttccttgtcggcgctgctaccggcgcgcattccttcgaagaagtgcagctggttgaatcaggtggcggcctggttcaacctggcggatctctgagactgagctgtgccgcctctggcttcagcctgacaaattacggcgtgcactgggtccgacaggcccctggaaaaggactggaatgggtgtccgtgatttggagcggcggcagcaccgattacaacgccgccttcatcagccggttcaccatcagcgccgacaccagcaagaataccgcctacctccagatgaactccctgagagccgaggacaccgccgtgtactattgcgccagagaactgatccacgctatggacaactggggccagggaaccctggtcacagtctcttctacgcgtgaggacctgaagaacgtgttcccacctgaggtggccgtgttcgagcctagcgaggccgagatcagccacacccagaaagccaccctcgtgtgcctggctaccggcttctaccccgaccatgtggaactgtcttggtgggtcaacggcaaagaggtgcacagcggcgtgtgtaccgacccccagccactgaaagaacagcccgccctgaacgacagccggtactgcctgagcagcagactgagagtgtccgccaccttctggcagaacccccggaaccacttcagatgccaggtgcagttctacggcctgagcgagaacgacgagtggacccaggacagagccaagcccgtgacccagatcgtgtctgccgaagcctggggcagagccgattgcgacgtgaagctggtggaaaagagcttcgagacagacaccaacctgaacttccagaacctgagcgtgatcggcttcagaatcctgctgctgaaagtggccggctttaacctgctgatgaccctgcggctgtggtccagc

SEQ ID NO: 4251 - DNA, 1887 bp, synthetic construct
  source 1..1887: mol_type = other DNA
atggccttaccagtgaccgccttgctcctgccgctggccttgctgctccacgccgccaggccggacttcgtgatgacacagagccctctgagcctgcctgtgacacctggcgaacctgccagcatcagctgtagaagcagccagagcatcgtgcacagcaacggcaacacctacctggaatggtatctccagaagcctggacagagcccacagctgctgatctacaaggtgtccaacagattcagcggcgtgcccgacagattttctggcagcggctctggcaccgacttcaccctgaagattagcagagtggaagccgaggacgtgggcgtgtactactgcttccaaggctctcacgtgcccctgacctttggacagggcaccaagctggaaatcaagagactcgagatccagaaccctgatcctgccgtgtaccagctgcgggatagcaagagcagcgacaagagcgtgtgtctgttcaccgacttcgacagccagaccaacgtgtcccagagcaaggactccgacgtgtacatcaccgataagtgcgtgctggacatgcggagcatggacttcaagagcaactccgccgtggcctggtccaacaagtccgatttcgcctgcgccaacgccttcaacaacagcattatccccgaggacacattcttcccaagccccgagagcagctgcggctttaccagcgagagctaccagcagggcgtgctgagcgccaccatcctgtacgagatcctgctgggcaaggccaccctgtacgccgtgctggtgtctgccctggtgctgatggctatggtcaagcggaaggacagccggggacgcgccaagagaagcggatctggcgtgaagcagaccctgaatttcgacctgctgaagctggctggcgacgtggaatccaacccaggccctactagtatggactggatttggcgcatccttttccttgtcggcgctgctaccggcgcgcattccttcgaagaagtgcagctggttgaaagcggagccgaagtgaagaaacctggggcctctgtgaaggtgtcctgcaaggccagcggctacacctttaccagctactggattcactgggtccgacaggcccctggacaaggacttgagtggatgggcgagaacgacccctccaacggcaggaccaactacaacgagaagttcaagaaccgcgtgaccctgaccgtggacaccagcatctctaccgcctacatggaactgagccggctgagatccgatgacaccgccgtgtactattgcgccagaggacccaactacttttacagcatggactactggggccagggcacaatggtcaccgttagctctacgcgtgaggacctgaagaacgtgttcccacctgaggtggccgtgttcgagcctagcgaggccgagatcagccacacccagaaagccaccctcgtgtgcctggctaccggcttctaccccgaccatgtggaactgtcttggtgggtcaacggcaaagaggtgcacagcggcgtgtgtaccgacccccagccactgaaagaacagcccgccctgaacgacagccggtactgcctgagcagcagactgagagtgtccgccaccttctggcagaacccccggaaccacttcagatgccaggtgcagttctacggcctgagcgagaacgacgagtggacccaggacagagccaagcccgtgacccagatcgtgtctgccgaagcctggggcagagccgattgcgacgtgaagctggtggaaaagagcttcgagacagacaccaacctgaacttccagaacctgagcgtgatcggcttcagaatcctgctgctgaaagtggccggctttaacctgctgatgaccctgcggctgtggtccagc

SEQ ID NO: 4252 - DNA, 1866 bp, synthetic construct
  source 1..1866: mol_type = other DNA
atggccttaccagtgaccgccttgctcctgccgctggccttgctgctccacgccgccaggccggacatccagctgactcagagccctagctttctgagcgccagcgtgggcgacagagtgaccatcacatgtagcgccagatccagcatcagcttcatgtactggtatcagcagaagcccggcaaggcccctaagctgctgatctacgacaccagcaatctggcctctggcgtgcccagcagattttctggaagcggcagcggcaccgagttcaccctgacaatctctagcctggaagccgaggatgccgccacctactattgccagcagtggtccagctatcccctgacatttggacagggcaccaagctggaaatcaaactcgagatccagaaccctgatcctgccgtgtaccagctgcgggatagcaagagcagcgacaagagcgtgtgtctgttcaccgacttcgacagccagaccaacgtgtcccagagcaaggactccgacgtgtacatcaccgataagtgcgtgctggacatgcggagcatggacttcaagagcaactccgccgtggcctggtccaacaagtccgatttcgcctgcgccaacgccttcaacaacagcattatccccgaggacacattcttcccaagccccgagagcagctgcggctttaccagcgagagctaccagcagggcgtgctgagcgccaccatcctgtacgagatcctgctgggcaaggccaccctgtacgccgtgctggtgtctgccctggtgctgatggctatggtcaagcggaaggacagccggggacgcgccaagagaagcggatctggcgtgaagcagaccctgaatttcgacctgctgaagctggctggcgacgtggaatccaacccaggccctactagtatggactggatttggcgcatccttttccttgtcggcgctgctaccggcgcgcattccttcgaacaggttcagctggttcagtctggggccgaagtgaagaaacctggggcctctgtgaaggtgtcctgcaaggcttccggctacacctttaccggctcttggatgaactgggtccgacaggctcctggacagggactcgaatggatcggcagaatctatcctggcgacggcgagacaaactacaacggcaagttcaaggaccgcgtgacaatcaccgccgacaagagcacaagcaccgcctacatggaactgagcagcctgcggagcgaagataccgccgtgtactactgcgcccggatctacggcaacaacgtgtacttcgatgtgtggggccagggcacaaccgtgacagtctcttctacgcgtgaggacctgaagaacgtgttcccacctgaggtggccgtgttcgagcctagcgaggccgagatcagccacacccagaaagccaccctcgtgtgcctggctaccggcttctaccccgaccatgtggaactgtcttggtgggtcaacggcaaagaggtgcacagcggcgtgtgtaccgacccccagccactgaaagaacagcccgccctgaacgacagccggtactgcctgagcagcagactgagagtgtccgccaccttctggcagaacccccggaaccacttcagatgccaggtgcagttctacggcctgagcgagaacgacgagtggacccaggacagagccaagcccgtgacccagatcgtgtctgccgaagcctggggcagagccgattgcgacgtgaagctggtggaaaagagcttcgagacagacaccaacctgaacttccagaacctgagcgtgatcggcttcagaatcctgctgctgaaagtggccggctttaacctgctgatgaccctgcggctgtggtccagc

SEQ ID NO: 4253 - DNA, 1890 bp, synthetic construct
  source 1..1890: mol_type = other DNA
atggccttaccagtgaccgccttgctcctgccgctggccttgctgctccacgccgccaggccgcagctggtgctgacacagtctccaagcgcctctgccagcctgggatctagcgtgaagctgacctgtacactgagcagcggccacaagaccgacaccatcgactggtatcagcagcagcctggcaaggcccctagatacctgatgaagctggaaggcagcggcagctacaacaaaggctctggcgtgcccgatagattcagcggcagttcttctggcgctgattggtatctgaccatcagcagcctccagagcgaggacgaggccgattactactgcggcacagactaccccggcaactacctgtttggcggcggaacacagctgacagtgcttggcctcgagatccagaaccctgatcctgccgtgtaccagctgcgggatagcaagagcagcgacaagagcgtgtgtctgttcaccgacttcgacagccagaccaacgtgtcccagagcaaggactccgacgtgtacatcaccgataagtgcgtgctggacatgcggagcatggacttcaagagcaactccgccgtggcctggtccaacaagtccgatttcgcctgcgccaacgccttcaacaacagcattatccccgaggacacattcttcccaagccccgagagcagctgcggctttaccagcgagagctaccagcagggcgtgctgagcgccaccatcctgtacgagatcctgctgggcaaggccaccctgtacgccgtgctggtgtctgccctggtgctgatggctatggtcaagcggaaggacagccggggacgcgccaagagaagcggatctggcgtgaagcagaccctgaatttcgacctgctgaagctggctggcgacgtggaatccaacccaggccctactagtatggactggatttggcgcatccttttccttgtcggcgctgctaccggcgcgcattccttcgaacaagaacagctggttgaaagcggcggaggactggttcaacctggcggttctctgagactgagctgtgccgccagcggcttcaccttcagcgactactacatgagctggatcagacaggccccaggcaaaggactggaatgggtcgccacaatctaccccagcagcggcaagacctactacgccgattctgccaagggcagactgaccatctccagcgacaacgccaaggacagcctgtacctccagatgaacagcctgagagccgaggacaccgccgtgtactactgcaccagagatagctacgccgacgacgccgctctgtttgacatttggggccagggcaccaccgtgaccgtttcttctacgcgtgaggacctgaagaacgtgttcccacctgaggtggccgtgttcgagcctagcgaggccgagatcagccacacccagaaagccaccctcgtgtgcctggctaccggcttctaccccgaccatgtggaactgtcttggtgggtcaacggcaaagaggtgcacagcggcgtgtgtaccgacccccagccactgaaagaacagcccgccctgaacgacagccggtactgcctgagcagcagactgagagtgtccgccaccttctggcagaacccccggaaccacttcagatgccaggtgcagttctacggcctgagcgagaacgacgagtggacccaggacagagccaagcccgtgacccagatcgtgtctgccgaagcctggggcagagccgattgcgacgtgaagctggtggaaaagagcttcgagacagacaccaacctgaacttccagaacctgagcgtgatcggcttcagaatcctgctgctgaaagtggccggctttaacctgctgatgaccctgcggctgtggtccagc

SEQ ID NO: 4254 - DNA, 1866 bp, synthetic construct; identical to SEQ ID NO: 4250
  source 1..1866: mol_type = other DNA

SEQ ID NO: 4255 - DNA, 1887 bp, synthetic construct; identical to SEQ ID NO: 4251
  source 1..1887: mol_type = other DNA

SEQ ID NO: 4256 - DNA, 1866 bp, synthetic construct; identical to SEQ ID NO: 4252
  source 1..1866: mol_type = other DNA

SEQ ID NO: 4257 - DNA, 1890 bp, synthetic construct; identical to SEQ ID NO: 4253
  source 1..1890: mol_type = other DNA

SEQ ID NO: 4258 - DNA, 1887 bp, synthetic construct
  source 1..1887: mol_type = other DNA
atggccttaccagtgaccgccttgctcctgccgctggccttgctgctccacgccgccaggccggatatccagctcactcaaagcccctctagtctctctgcctcagtgggggatcgggtcagttttacttgtcaagcttcacaggatatcaacaacttccttaattggtatcagcagaagccaggaaaagcacccaagctgctcatctatgatgcctcaaatttggagacgggtgttcccagtcgattctctgggtcagggtccgggaccgactttacgtttacgatctcctctctgcagcccgaagacatcgccacatactattgtcaacagtacggcaacttgcctttcacatttgggggcgggactaaggttgaaatcaagaggctcgagatccagaaccctgatcctgccgtgtaccagctgcgggatagcaagagcagcgacaagagcgtgtgtctgttcaccgacttcgacagccagaccaacgtgtcccagagcaaggactccgacgtgtacatcaccgataagtgcgtgctggacatgcggagcatggacttcaagagcaactccgccgtggcctggtccaacaagtccgatttcgcctgcgccaacgccttcaacaacagcattatccccgaggacacattcttcccaagccccgagagcagctgcggctttaccagcgagagctaccagcagggcgtgctgagcgccaccatcctgtacgagatcctgctgggcaaggccaccctgtacgccgtgctggtgtctgccctggtgctgatggctatggtcaagcggaaggacagccggggacgcgccaagagaagcggatctggcgtgaagcagaccctgaatttcgacctgctgaagctggctggcgacgtggaatccaacccaggccctactagtatggactggatttggcgcatccttttccttgtcggcgctgctaccggcgcgcattccttcgaacaggtacagctgcaggaatctgggcccggacttgtcaagccaagtcagacactttctcttacatgtaccgtgagcggcggaagtataagcagtggaggcttttactggtcttggatacggcagcacccaggcaaaggcttggagtggattggatacattcatcattcaggatctacacactataatccatcccttaagtcccgggtcaccattagcattgatacgtctaagaatctgttcagtctcaggctgtcctccgtcactgctgccgacacagccgtgtactactgcgcctccttggtttactgcggaggcgactgttatagcggctttgattattgggggcaggggaccctcgtaaccgtgagctctacgcgtgaggacctgaagaacgtgttcccacctgaggtggccgtgttcgagcctagcgaggccgagatcagccacacccagaaagccaccctcgtgtgcctggctaccggcttctaccccgaccatgtggaactgtcttggtgggtcaacggcaaagaggtgcacagcggcgtgtgtaccgacccccagccactgaaagaacagcccgccctgaacgacagccggtactgcctgagcagcagactgagagtgtccgccaccttctggcagaacccccggaaccacttcagatgccaggtgcagttctacggcctgagcgagaacgacgagtggacccaggacagagccaagcccgtgacccagatcgtgtctgccgaagcctggggcagagccgattgcgacgtgaagctggtggaaaagagcttcgagacagacaccaacctgaacttccagaacctgagcgtgatcggcttcagaatcctgctgctgaaagtggccggctttaacctgctgatgaccctgcggctgtggtccagc

SEQ ID NO: 4259 - DNA, 1875 bp, synthetic construct
  source 1..1875: mol_type = other DNA
atggccttaccagtgaccgccttgctcctgccgctggccttgctgctccacgccgccaggccggacattcagatgacacagagccctagcagcctgagcgcctctgtgggagacagagtgaccatcacatgcaagagcagccagagcgtgctgtactccagcaatcagaagaactacctggcctggttccagcagaagcctggcaaggctcctaagctgctgatctactgggccagcaccagagaaagcggcgtgccaagcagattttctggcagcggctctggcaccgacttcaccctgacaatatccagcctccagcctgaggacttcgccacctacttttgccaccagtacctgagcagctacacattcggacagggcaccaaggtggaaatcaagcggctcgagatccagaaccctgatcctgccgtgtaccagctgcgggatagcaagagcagcgacaagagcgtgtgtctgttcaccgacttcgacagccagaccaacgtgtcccagagcaaggactccgacgtgtacatcaccgataagtgcgtgctggacatgcggagcatggacttcaagagcaactccgccgtggcctggtccaacaagtccgatttcgcctgcgccaacgccttcaacaacagcattatccccgaggacacattcttcccaagccccgagagcagctgcggctttaccagcgagagctaccagcagggcgtgctgagcgccaccatcctgtacgagatcctgctgggcaaggccaccctgtacgccgtgctggtgtctgccctggtgctgatggctatggtcaagcggaaggacagccggggacgcgccaagagaagcggatctggcgtgaagcagaccctgaatttcgacctgctgaagctggctggcgacgtggaatccaacccaggccctactagtatggactggatttggcgcatccttttccttgtcggcgctgctaccggcgcgcattccttcgaagaggtgcagctggttgaatctggcggaggactggttcagcctggcggatctctgagactgtcttgtgccgccagcggctacaccttcaccacctattggatgcactgggtccgacaggcccctggcaaaggacttgagtgggtcggatatatcaggcccagcaccggctacacagagtacaaccagaagttcaaggaccgcttcaccatcagcgccgacaccagcaagaataccgcctacctccagatgaacagcctgagagccgaggacaccgccgtgtactactgtgccagatccagatggctgctggactattggggccagggcacactggttacagtttctacgcgtgaggacctgaagaacgtgttcccacctgaggtggccgtgttcgagcctagcgaggccgagatcagccacacccagaaagccaccctcgtgtgcctggctaccggcttctaccccgaccatgtggaactgtcttggtgggtcaacggcaaagaggtgcacagcggcgtgtgtaccgacccccagccactgaaagaacagcccgccctgaacgacagccggtactgcctgagcagcagactgagagtgtccgccaccttctggcagaacccccggaaccacttcagatgccaggtgcagttctacggcctgagcgagaacgacgagtggacccaggacagagccaagcccgtgacccagatcgtgtctgccgaagcctggggcagagccgattgcgacgtgaagctggtggaaaagagcttcgagacagacaccaacctgaacttccagaacctgagcgtgatcggcttcagaatcctgctgctgaaagtggccggctttaacctgctgatgaccctgcggctgtggtccagc

SEQ ID NO: 4260 - DNA, 1866 bp, synthetic construct
  source 1..1866: mol_type = other DNA
atggccttaccagtgaccgccttgctcctgccgctggccttgctgctccacgccgccaggccggacatccagatgacacagagccctagcagcctgtctgccagcgtgggagacagagtgaccatcacctgtagagccagccaggacatcagcaactacctgaactggtatcagcagaagcccggcaaggcccctaagctgctgatctactacaccagcagactgcacagcggcgtgcccagcagattttctggctctggcagcggcaccgacttcaccctgacaatatctagcctccagcctgaggacttcgccacctactattgccagcagggcaacaccctgccttacacatttggacagggcaccaaggtggaaatcaagagactcgagatccagaaccctgatcctgccgtgtaccagctgcgggatagcaagagcagcgacaagagcgtgtgtctgttcaccgacttcgacagccagaccaacgtgtcccagagcaaggactccgacgtgtacatcaccgataagtgcgtgctggacatgcggagcatggacttcaagagcaactccgccgtggcctggtccaacaagtccgatttcgcctgcgccaacgccttcaacaacagcattatccccgaggacacattcttcccaagccccgagagcagctgcggctttaccagcgagagctaccagcagggcgtgctgagcgccaccatcctgtacgagatcctgctgggcaaggccaccctgtacgccgtgctggtgtctgccctggtgctgatggctatggtcaagcggaaggacagccggggacgcgccaagagaagcggatctggcgtgaagcagaccctgaatttcgacctgctgaagctggctggcgacgtggaatccaacccaggccctactagtatggactggatttggcgcatccttttccttgtcggcgctgctaccggcgcgcattccttcgaagaagtgcagctggttgaatcaggtggcggcctggttcaacctggcggatctctgagactgagctgtgccgccagcggcttcaccttcagcgactactttatgagctgggtccgacaggcccctggcaaaggacttgaatgggtcgccaccatcagcaatggcggcacctacacttactaccccgacagcgtgaagggcagattcaccatctccagagacaacagcaagaacaccctgtacctccagatgaactccctgagagccgaggacaccgccgtgtactactgcgccagattcgacggctacatcttcgactattggggccagggcaccctggtcacagtctcttctacgcgtgaggacctgaagaacgtgttcccacctgaggtggccgtgttcgagcctagcgaggccgagatcagccacacccagaaagccaccctcgtgtgcctggctaccggcttctaccccgaccatgtggaactgtcttggtgggtcaacggcaaagaggtgcacagcggcgtgtgtaccgacccccagccactgaaagaacagcccgccctgaacgacagccggtactgcctgagcagcagactgagagtgtccgccaccttctggcagaacccccggaaccacttcagatgccaggtgcagttctacggcctgagcgagaacgacgagtggacccaggacagagccaagcccgtgacccagatcgtgtctgccgaagcctggggcagagccgattgcgacgtgaagctggtggaaaagagcttcgagacagacaccaacctgaacttccagaacctgagcgtgatcggcttcagaatcctgctgctgaaagtggccggctttaacctgctgatgaccctgcggctgtggtccagc

SEQ ID NO: 4261 - DNA, 2262 bp, synthetic construct
  source 1..2262: mol_type = other DNA
atggccttaccagtgaccgccttgctcctgccgctggccttgctgctccacgccgccaggccggaagtgcagctggttgaatctggcggaggactggttcagcctggcggatctctgagactgtcttgtgccgccagcggcttcagcttcagcgacttttggatgagctgggtccgacaggcccctggcaaaggacttgaatgggtcgccacaatcagccaggccggcagcgagaaggactacgtggactctgtgaagggcagattcaccatcagccgggacaacgccaagaagtccctgtacctccagatgaacagcctgagagccgaggacaccgccgtgtactattgtgcctctggcgtgtacagcttcgactacagaggccagggcaccctggtcacagtctcttctggtaccggcggaggcggatctggcggcggaggtagcggtggcggaggatctgaattcgacatccagatgacacagactacatcctccctgtctgcctctctgggagacagagtcaccatcagttgcagggcaagtcaggacattagtaagtacctgaactggtatcagcagaaaccagatggaactgttaaactcctgatctaccatacatcaagattacactcaggagtcccatcaaggttcagtggcagtgggtctggaacagattattctctcaccattagcaacctggagcaagaagatattgccacttacttttgccaacagggtaatacgcttccgtacacgttcggaggggggaccaagctggagatcacactcgaggacctgaagaacgtgttcccacctgaggtggccgtgttcgagcctagcgaggccgagatcagccacacccagaaagccaccctcgtgtgcctggctaccggcttctaccccgaccatgtggaactgtcttggtgggtcaacggcaaagaggtgcacagcggcgtgtgtaccgacccccagccactgaaagaacagcccgccctgaacgacagccggtactgcctgagcagcagactgagagtgtccgccaccttctggcagaacccccggaaccacttcagatgccaggtgcagttctacggcctgagcgagaacgacgagtggacccaggacagagccaagcccgtgacccagatcgtgtctgccgaagcctggggcagagccgattgcgacgtgaagctggtggaaaagagcttcgagacagacaccaacctgaacttccagaacctgagcgtgatcggcttcagaatcctgctgctgaaagtggccggctttaacctgctgatgaccctgcggctgtggtccagcagggccaagcgatctggatctggagcaacaaacttctcactactcaaacaagcaggtgacgtggaggagaatcccgggcctactagtatggactggatttggcgcatccttttccttgtcggcgctgctaccggcgcgcattccttcgaagtgaaactgcaggagtcaggacctggcctggtggcgccctcacagagcctgtccgtcacatgcactgtctcaggggtctcattacccgactatggtgtaagctggattcgccagcctccacgaaagggtctggagtggctgggagtaatatggggtagtgaaaccacatactataattcagctctcaaatccagactgaccatcatcaaggacaactccaagagccaagttttcttaaaaatgaacagtctgcaaactgatgacacagccatttactactgtgccaaacattattactacggtggtagctatgctatggactactggggccaaggaacctcagtcaccgtctcctcaacgcgtatccagaaccctgatcctgccgtgtaccagctgcgggatagcaagagcagcgacaagagcgtgtgtctgttcaccgacttcgacagccagaccaacgtgtcccagagcaaggactccgacgtgtacatcaccgataagtgcgtgctggacatgcggagcatggacttcaagagcaactccgccgtggcctggtccaacaagtccgatttcgcctgcgccaacgccttcaacaacagcattatccccgaggacacattcttcccaagccccgagagcagctgcggctttaccagcgagagctaccagcagggcgtgctgagcgccaccatcctgtacgagatcctgctgggcaaggccaccctgtacgccgtgctggtgtctgccctggtgctgatggctatggtcaagcggaaggacagccgggga

SEQ ID NO: 4262 - DNA, 2265 bp, synthetic construct
  source 1..2265: mol_type = other DNA
atggccttaccagtgaccgccttgctcctgccgctggccttgctgctccacgccgccaggccggaagtgcagctggttgaatctggcggaggactggttcagcctggcggatctctgagactgtcttgtgccgccagcggcttcagcttcagcgacttttggatgagctgggtccgacaggcccctggcaaaggacttgaatgggtcgccacaatcagccaggccggcagcgagaaggactacgtggactctgtgaagggcagattcaccatcagccgggacaacgccaagaagtccctgtacctccagatgaacagcctgagagccgaggacaccgccgtgtactattgtgcctctggcgtgtacagcttcgactacagaggccagggcaccctggtcacagtctcttctggtaccggcggaggcggatctggcggcggaggtagcggtggcggaggatctgaattcgagatcgtgatgacccagagccctgccaccctgtctctgagccctggcgaaagagccaccctgagctgtagagccagccaggacatcagcaagtacctgaactggtatcagcagaagcccggccaggcccccagactgctgatctaccacaccagcagactgcacagcggcatccccgccagattttctggctctggcagcggcaccgactacaccctgacaatcagcagcctccagcccgaggacttcgccgtgtacttctgtcagcaaggcaacaccctgccctacaccttcggccagggcaccaagctggaaatcaagctcgaggacctgaagaacgtgttcccacctgaggtggccgtgttcgagcctagcgaggccgagatcagccacacccagaaagccaccctcgtgtgcctggctaccggcttctaccccgaccatgtggaactgtcttggtgggtcaacggcaaagaggtgcacagcggcgtgtgtaccgacccccagccactgaaagaacagcccgccctgaacgacagccggtactgcctgagcagcagactgagagtgtccgccaccttctggcagaacccccggaaccacttcagatgccaggtgcagttctacggcctgagcgagaacgacgagtggacccaggacagagccaagcccgtgacccagatcgtgtctgccgaagcctggggcagagccgattgcgacgtgaagctggtggaaaagagcttcgagacagacaccaacctgaacttccagaacctgagcgtgatcggcttcagaatcctgctgctgaaagtggccggctttaacctgctgatgaccctgcggctgtggtccagcagggccaagcgatctggatctggagcaacaaacttctcactactcaaacaagcaggtgacgtggaggagaatcccgggcctactagtatggactggatttggcgcatccttttccttgtcggcgctgctaccggcgcgcattccttcgaacaggtgcaactccaggaatctggccctggcctcgtgaagcccagcgagacactgagcctgacctgtaccgtgtccggcgtgtccctgcctgactatggcgtgtcctggatcagacagccccctggcaagggcctggaatggatcggagtgatttggggcagcgaaaccacctactacaacagctccctgaagtccagagtgaccatctccaaggacaactccaagaaccaggtgtccctgaagctgagcagcgtgacagccgccgacaccgccgtgtattactgcgccaagcactactactacggcggcagctacgctatggactactggggccagggaaccctcgtgaccgtgtctagtacgcgtatccagaaccctgatcctgccgtgtaccagctgcgggatagcaagagcagcgacaagagcgtgtgtctgttcaccgacttcgacagccagaccaacgtgtcccagagcaaggactccgacgtgtacatcaccgataagtgcgtgctggacatgcggagcatggacttcaagagcaactccgccgtggcctggtccaacaagtccgatttcgcctgcgccaacgccttcaacaacagcattatccccgaggacacattcttcccaagccccgagagcagctgcggctttaccagcgagagctaccagcagggcgtgctgagcgccaccatcctgtacgagatcctgctgggcaaggccaccctgtacgccgtgctggtgtctgccctggtgctgatggctatggtcaagcggaaggacagccgggga

SEQ ID NO: 4263 - DNA, 2268 bp, synthetic construct
  source 1..2268: mol_type = other DNA
atggccttaccagtgaccgccttgctcctgccgctggccttgctgctccacgccgccaggccggaagtgcagctggttgaatctggcggaggactggttcagcctggcggatctctgagactgtcttgtgccgccagcggcttcagcttcagcgacttttggatgagctgggtccgacaggcccctggcaaaggacttgaatgggtcgccacaatcagccaggccggcagcgagaaggactacgtggactctgtgaagggcagattcaccatcagccgggacaacgccaagaagtccctgtacctccagatgaacagcctgagagccgaggacaccgccgtgtactattgtgcctctggcgtgtacagcttcgactacagaggccagggcaccctggtcacagtctcttctggtaccggcggaggcggatctggcggcggaggtagcggtggcggaggatctgaattcgacgagatcgtgctgacacagagccccgccaccctgtcactgtctccaggcgaaagagccaccctgagctgtagcgccagcagcagcgtgtcctacatgcactggtatcagcagaagcccggccaggcccccagactgctgatctacgataccagcaagctggcctccggcatccccgccagattttctggcagcggctccggcaccgacttcaccctgacaatcagcagcctggaacccgaggacgtggccgtgtactactgttttcaaggcagcgtgtaccccttcaccttcggccagggcaccaagctggaaatcaagagactcgaggacctgaagaacgtgttcccacctgaggtggccgtgttcgagcctagcgaggccgagatcagccacacccagaaagccaccctcgtgtgcctggctaccggcttctaccccgaccatgtggaactgtcttggtgggtcaacggcaaagaggtgcacagcggcgtgtgtaccgacccccagccactgaaagaacagcccgccctgaacgacagccggtactgcctgagcagcagactgagagtgtccgccaccttctggcagaacccccggaaccacttcagatgccaggtgcagttctacggcctgagcgagaacgacgagtggacccaggacagagccaagcccgtgacccagatcgtgtctgccgaagcctggggcagagccgattgcgacgtgaagctggtggaaaagagcttcgagacagacaccaacctgaacttccagaacctgagcgtgatcggcttcagaatcctgctgctgaaagtggccggctttaacctgctgatgaccctgcggctgtggtccagcagggccaagcgatctggatctggagcaacaaacttctcactactcaaacaagcaggtgacgtggaggagaatcccgggcctactagtatggactggatttggcgcatccttttccttgtcggcgctgctaccggcgcgcattccttcgaacaggtgcagctccaggaatctggccctggcctcgtgaagcctagccagaccctgagcctgacctgtaccgtgtctggcggcagcatcagcacaagcggcatgggcgtgggctggatcagacagcaccctggcaagggcctggaatggatcggccacatttggtgggacgacgacaagcggtacaaccccgccctgaagtccagagtgaccatcagcgtggacaccagcaagaaccagttcagcctgaagctgagcagcgtgacagccgccgataccgccgtgtattattgcgcccggatggaactgtggtcctactacttcgactactggggccagggaaccctcgtgaccgtgtctagtacgcgtatccagaaccctgatcctgccgtgtaccagctgcgggatagcaagagcagcgacaagagcgtgtgtctgttcaccgacttcgacagccagaccaacgtgtcccagagcaaggactccgacgtgtacatcaccgataagtgcgtgctggacatgcggagcatggacttcaagagcaactccgccgtggcctggtccaacaagtccgatttcgcctgcgccaacgccttcaacaacagcattatccccgaggacacattcttcccaagccccgagagcagctgcggctttaccagcgagagctaccagcagggcgtgctgagcgccaccatcctgtacgagatcctgctgggcaaggccaccctgtacgccgtgctggtgtctgccctggtgctgatggctatggtcaagcggaaggacagccgggga

SEQ ID NO: 4264 - DNA, 2262 bp, synthetic construct
  source 1..2262: mol_type = other DNA
atggccttaccagtgaccgccttgctcctgccgctggccttgctgctccacgccgccaggccggaagtgcagctggttgaatctggcggaggactggttcagcctggcggatctctgagactgtcttgtgccgccagcggcttcagcttcagcgacttttggatgagctgggtccgacaggcccctggcaaaggacttgaatgggtcgccacaatcagccaggccggcagcgagaaggactacgtggactctgtgaagggcagattcaccatcagccgggacaacgccaagaagtccctgtacctccagatgaacagcctgagagccgaggacaccgccgtgtactattgtgcctctggcgtgtacagcttcgactacagaggccagggcaccctggtcacagtctcttctggtaccggcggaggcggatctggcggcggaggtagcggtggcggaggatctgaattcgactacatccacgtgacacagagccctagcagcctgtccgtgtccatcggcgatagagtgaccatcaactgccagacctctcaaggcgtgggcagcgacctgcactggtatcagcacaaacctggcagagcccctaagctgctgatccaccatgccagctctgtggaagatggcgtgcccagcagattttccggcaccggatttcacaccagcttcaacctgacaatcaacgacctccaggccgacgacatcggcacctactactgtcaagtgctccagagcttcggcagaggcagcagactggatacaaaactcgaggacctgaagaacgtgttcccacctgaggtggccgtgttcgagcctagcgaggccgagatcagccacacccagaaagccaccctcgtgtgcctggctaccggcttctaccccgaccatgtggaactgtcttggtgggtcaacggcaaagaggtgcacagcggcgtgtgtaccgacccccagccactgaaagaacagcccgccctgaacgacagccggtactgcctgagcagcagactgagagtgtccgccaccttctggcagaacccccggaaccacttcagatgccaggtgcagttctacggcctgagcgagaacgacgagtggacccaggacagagccaagcccgtgacccagatcgtgtctgccgaagcctggggcagagccgattgcgacgtgaagctggtggaaaagagcttcgagacagacaccaacctgaacttccagaacctgagcgtgatcggcttcagaatcctgctgctgaaagtggccggctttaacctgctgatgaccctgcggctgtggtccagcagggccaagcgatctggatctggagcaacaaacttctcactactcaaacaagcaggtgacgtggaggagaatcccgggcctactagtatggactggatttggcgcatccttttccttgtcggcgctgctaccggcgcgcattccttcgaaagggcacacctggtgcagtctggcaccgccatgaagaaacctggcgcttccgtcagagtgtcctgtcagacaagcggctacaccttcacagcccacatcctgttctggttcagacaggccccaggcagaggactggaatgggtcggatggatcaagccccagtacggggccgtgaatttcggcggaggcttcagagacagagtgaccctgaccagggacgtgtaccgggaaatcgcctacatggacatccggggcctgaagcctgatgacaccgccgtgtactactgcgccagggatagaagctacggcgacagctcttgggctctcgatgcttggggacagggcacaacagtggtggtgtctgctacgcgtatccagaaccctgatcctgccgtgtaccagctgcgggatagcaagagcagcgacaagagcgtgtgtctgttcaccgacttcgacagccagaccaacgtgtcccagagcaaggactccgacgtgtacatcaccgataagtgcgtgctggacatgcggagcatggacttcaagagcaactccgccgtggcctggtccaacaagtccgatttcgcctgcgccaacgccttcaacaacagcattatccccgaggacacattcttcccaagccccgagagcagctgcggctttaccagcgagagctaccagcagggcgtgctgagcgccaccatcctgtacgagatcctgctgggcaaggccaccctgtacgccgtgctggtgtctgccctggtgctgatggctatggtcaagcggaaggacagccgggga

SEQ ID NO: 4265 - DNA, 2292 bp, synthetic construct
  source 1..2292: mol_type = other DNA
atggccttaccagtgaccgccttgctcctgccgctggccttgctgctccacgccgccaggccggaagtgcagctggttgaatctggcggaggactggttcagcctggcggatctctgagactgtcttgtgccgccagcggcttcagcttcagcgacttttggatgagctgggtccgacaggcccctggcaaaggacttgaatgggtcgccacaatcagccaggccggcagcgagaaggactacgtggactctgtgaagggcagattcaccatcagccgggacaacgccaagaagtccctgtacctccagatgaacagcctgagagccgaggacaccgccgtgtactattgtgcctctggcgtgtacagcttcgactacagaggccagggcaccctggtcacagtctcttctggtaccggcggaggcggatctggcggcggaggtagcggtggcggaggatctgaattcgacgtgcagatgatccagacccccgatagcctggccgtgtccctgggacagagagccaccatctcttgcagagccagcgagagcgtggacaactacggcatcagcttcatgcactggtatcagcagaagcccggccagagccccaagctgctgatctacagagcctccaacctggaaagcggcatccccgccagattttccggcagcggcagcagaaccgacttcaccctgaccatcaaccccgtggaaaccgacgacgtggcaacctactactgccagcagaacaacaaggacccccccacctttggcggaggcaccaagctggaaatcaagctcgaggacctgaagaacgtgttcccacctgaggtggccgtgttcgagcctagcgaggccgagatcagccacacccagaaagccaccctcgtgtgcctggctaccggcttctaccccgaccatgtggaactgtcttggtgggtcaacggcaaagaggtgcacagcggcgtgtgtaccgacccccagccactgaaagaacagcccgccctgaacgacagccggtactgcctgagcagcagactgagagtgtccgccaccttctggcagaacccccggaaccacttcagatgccaggtgcagttctacggcctgagcgagaacgacgagtggacccaggacagagccaagcccgtgacccagatcgtgtctgccgaagcctggggcagagccgattgcgacgtgaagctggtggaaaagagcttcgagacagacaccaacctgaacttccagaacctgagcgtgatcggcttcagaatcctgctgctgaaagtggccggctttaacctgctgatgaccctgcggctgtggtccagcagggccaagcgatctggatctggagcaacaaacttctcactactcaaacaagcaggtgacgtggaggagaatcccgggcctactagtatggactggatttggcgcatccttttccttgtcggcgctgctaccggcgcgcattccttcgaagggggaggcggctctcaggtgcaactccagcagtctggcgctgagcttgtgaagcctggggccagcgtgaagattagctgcaaggccagcggctacgccttcagcagctactggatgaactgggtcaagcagcggcctggcaagggcctggaatggatcggccaaatctaccccggcgacggcgacaccacctacaacggcaagttcaagggcaaggccaccctgacagccgacaagagcagcagcaccgtgtacatgcaactgaacagcctgaccagcgaggacagcgccgtgtacttctgcgtgcggtactactacggcagctccggctacttcgactattggggccagggcaccacactgaccgtgtcctctacgcgtatccagaaccctgatcctgccgtgtaccagctgcgggatagcaagagcagcgacaagagcgtgtgtctgttcaccgacttcgacagccagaccaacgtgtcccagagcaaggactccgacgtgtacatcaccgataagtgcgtgctggacatgcggagcatggacttcaagagcaactccgccgtggcctggtccaacaagtccgatttcgcctgcgccaacgccttcaacaacagcattatccccgaggacacattcttcccaagccccgagagcagctgcggctttaccagcgagagctaccagcagggcgtgctgagcgccaccatcctgtacgagatcctgctgggcaaggccaccctgtacgccgtgctggtgtctgccctggtgctgatggctatggtcaagcggaaggacagccgggga

SEQ ID NO: 4266 - DNA, 2265 bp, synthetic construct
  source 1..2265: mol_type = other DNA
atggccttaccagtgaccgccttgctcctgccgctggccttgctgctccacgccgccaggccggaagtgcagctggttgaatctggcggaggactggttcagcctggcggatctctgagactgtcttgtgccgccagcggcttcagcttcagcgacttttggatgagctgggtccgacaggcccctggcaaaggacttgaatgggtcgccacaatcagccaggccggcagcgagaaggactacgtggactctgtgaagggcagattcaccatcagccgggacaacgccaagaagtccctgtacctccagatgaacagcctgagagccgaggacaccgccgtgtactattgtgcctctggcgtgtacagcttcgactacagaggccagggcaccctggtcacagtctcttctggtaccggcggaggcggatctggcggcggaggtagcggtggcggaggatctgaattcgacgtgcagatgatccagacccccagcagcctgtctgccagcctgggcgatagagtgaccatcagctgtcgggccagccaggacatcggcaactacctgaactggtatcagcagaaacccgacggcaccgtgaagctgctgatctactacaccagcagactgcacagcggcgtgcccagcagattttctggcagcggctctggcaccgagtacagcctgaccatctccaacctggaacaggaagatattgctacctacttctgtcagcaaggcagcgccctgccccctacatttggcggcggaacaaagctggaaatcaacctcgaggacctgaagaacgtgttcccacctgaggtggccgtgttcgagcctagcgaggccgagatcagccacacccagaaagccaccctcgtgtgcctggctaccggcttctaccccgaccatgtggaactgtcttggtgggtcaacggcaaagaggtgcacagcggcgtgtgtaccgacccccagccactgaaagaacagcccgccctgaacgacagccggtactgcctgagcagcagactgagagtgtccgccaccttctggcagaacccccggaaccacttcagatgccaggtgcagttctacggcctgagcgagaacgacgagtggacccaggacagagccaagcccgtgacccagatcgtgtctgccgaagcctggggcagagccgattgcgacgtgaagctggtggaaaagagcttcgagacagacaccaacctgaacttccagaacctgagcgtgatcggcttcagaatcctgctgctgaaagtggccggctttaacctgctgatgaccctgcggctgtggtccagcagggccaagcgatctggatctggagcaacaaacttctcactactcaaacaagcaggtgacgtggaggagaatcccgggcctactagtatggactggatttggcgcatccttttccttgtcggcgctgctaccggcgcgcattccttcgaagctctccagctccagcagtctggcgcagaactcgtgcggcctggcgcttctgtgaccctgagctgtaaagccagcggctacaccttcaccgactacgagatgcactgggtcaagcagacccctgtgcacggcctggaatggatcggagccatcgaccctgagacaggcggcaccgcctacaaccagaagttcgagggcaaggccatcctgaccgccgacaagagcagcagcacagcctacatggaactgcggagcctgacctccgaggacagccccgtgtactactgtgccagacggcggtactacggcagcagctccttcgactattggggccagggcaccaccctgaccgtgtctagtacgcgtatccagaaccctgatcctgccgtgtaccagctgcgggatagcaagagcagcgacaagagcgtgtgtctgttcaccgacttcgacagccagaccaacgtgtcccagagcaaggactccgacgtgtacatcaccgataagtgcgtgctggacatgcggagcatggacttcaagagcaactccgccgtggcctggtccaacaagtccgatttcgcctgcgccaacgccttcaacaacagcattatccccgaggacacattcttcccaagccccgagagcagctgcggctttaccagcgagagctaccagcagggcgtgctgagcgccaccatcctgtacgagatcctgctgggcaaggccaccctgtacgccgtgctggtgtctgccctggtgctgatggctatggtcaagcggaaggacagccgggga

SEQ ID NO: 4267 - DNA, 2277 bp, synthetic construct
  source 1..2277: mol_type = other DNA
atggccttaccagtgaccgccttgctcctgccgctggccttgctgctccacgccgccaggccggaagtgcagctggttgaatctggcggaggactggttcagcctggcggatctctgagactgtcttgtgccgccagcggcttcagcttcagcgacttttggatgagctgggtccgacaggcccctggcaaaggacttgaatgggtcgccacaatcagccaggccggcagcgagaaggactacgtggactctgtgaagggcagattcaccatcagccgggacaacgccaagaagtccctgtacctccagatgaacagcctgagagccgaggacaccgccgtgtactattgtgcctctggcgtgtacagcttcgactacagaggccagggcaccctggtcacagtctcttctggtaccggcggaggcggatctggcggcggaggtagcggtggcggaggatctgaattcgacatcgtcctgacccagtccccagccagcctggcggtgtccctgggtcaacgagctaccatttcctgcagagcctctaagtccgtatccacttccggctatagttacctgcattggtaccaacagaaaccagggcagccacccaagctgctcatctatctggcctcaaacctggagtccggcgtgcccgccagattctccggaagtgggagcggcaccgactttacattgaacatccacccagtcgaagaggaagatgctgccacttattactgtcagcactccagggagctgccatttacatttggctctggcacaaaactggagatcaaactcgaggacctgaagaacgtgttcccacctgaggtggccgtgttcgagcctagcgaggccgagatcagccacacccagaaagccaccctcgtgtgcctggctaccggcttctaccccgaccatgtggaactgtcttggtgggtcaacggcaaagaggtgcacagcggcgtgtgtaccgacccccagccactgaaagaacagcccgccctgaacgacagccggtactgcctgagcagcagactgagagtgtccgccaccttctggcagaacccccggaaccacttcagatgccaggtgcagttctacggcctgagcgagaacgacgagtggacccaggacagagccaagcccgtgacccagatcgtgtctgccgaagcctggggcagagccgattgcgacgtgaagctggtggaaaagagcttcgagacagacaccaacctgaacttccagaacctgagcgtgatcggcttcagaatcctgctgctgaaagtggccggctttaacctgctgatgaccctgcggctgtggtccagcagggccaagcgatctggatctggagcaacaaacttctcactactcaaacaagcaggtgacgtggaggagaatcccgggcctactagtatggactggatttggcgcatccttttccttgtcggcgctgctaccggcgcgcattccttcgaacaggttcagctggtcgagtccgggggaggtctggtacagccgggtggcagcctcaagctgtcatgtgccgcatctggttttgactttagcaggtattggatgagctgggtccgccaggccccgggcaagggacttgagtggattggagaaataaaccctacttccagcacaatcaacttcacaccttctttgaaagataaggtttttatctctcgggataacgctaaaaacacactgtacttgcagatgtctaaggtgcgaagcgaagacaccgccctctattattgcgcccggggtaattactaccgctatggggatgcgatggactattgggggcaaggtacctccgtcacggtctcaacgcgtatccagaaccctgatcctgccgtgtaccagctgcgggatagcaagagcagcgacaagagcgtgtgtctgttcaccgacttcgacagccagaccaacgtgtcccagagcaaggactccgacgtgtacatcaccgataagtgcgtgctggacatgcggagcatggacttcaagagcaactccgccgtggcctggtccaacaagtccgatttcgcctgcgccaacgccttcaacaacagcattatccccgaggacacattcttcccaagccccgagagcagctgcggctttaccagcgagagctaccagcagggcgtgctgagcgccaccatcctgtacgagatcctgctgggcaaggccaccctgtacgccgtgctggtgtctgccctggtgctgatggctatggtcaagcggaaggacagccgggga

SEQ ID NO: 4268 - DNA, 2271 bp, synthetic construct
  source 1..2271: mol_type = other DNA
atggccttaccagtgaccgccttgctcctgccgctggccttgctgctccacgccgccaggccggaagtgcagctggttgaatctggcggaggactggttcagcctggcggatctctgagactgtcttgtgccgccagcggcttcagcttcagcgacttttggatgagctgggtccgacaggcccctggcaaaggacttgaatgggtcgccacaatcagccaggccggcagcgagaaggactacgtggactctgtgaagggcagattcaccatcagccgggacaacgccaagaagtccctgtacctccagatgaacagcctgagagccgaggacaccgccgtgtactattgtgcctctggcgtgtacagcttcgactacagaggccagggcaccctggtcacagtctcttctggtaccggcggaggcggatctggcggcggaggtagcggtggcggaggatctgaattcgacatccagatgacccagagccctagctcactgagcgccagcgtgggcgacagggtgaccattacctgctccgccagccaggacatcagcaactacctgaactggtaccagcagaagcccggcaaggcccccaagctgctgatctactacacctccaacctgcactccggcgtgcccagcaggttcagcggaagcggcagcggcaccgatttcaccctgaccatctccagcctgcagcccgaggacttcgccacctactactgccagcagtacaggaagctcccctggactttcggccagggcaccaaactggagatcaagcgtctcgaggacctgaagaacgtgttcccacctgaggtggccgtgttcgagcctagcgaggccgagatcagccacacccagaaagccaccctcgtgtgcctggctaccggcttctaccccgaccatgtggaactgtcttggtgggtcaacggcaaagaggtgcacagcggcgtgtgtaccgacccccagccactgaaagaacagcccgccctgaacgacagccggtactgcctgagcagcagactgagagtgtccgccaccttctggcagaacccccggaaccacttcagatgccaggtgcagttctacggcctgagcgagaacgacgagtggacccaggacagagccaagcccgtgacccagatcgtgtctgccgaagcctggggcagagccgattgcgacgtgaagctggtggaaaagagcttcgagacagacaccaacctgaacttccagaacctgagcgtgatcggcttcagaatcctgctgctgaaagtggccggctttaacctgctgatgaccctgcggctgtggtccagcagggccaagcgatctggatctggagcaacaaacttctcactactcaaacaagcaggtgacgtggaggagaatcccgggcctactagtatggactggatttggcgcatccttttccttgtcggcgctgctaccggcgcgcattccttcgaacaggtgcagctggtccagagcggcgccgaagtgaagaagcccggcagctccgtgaaagtgagctgcaaggccagcggcggcaccttcagcaactactggatgcactgggtgaggcaggcccccggacagggcctggagtggatgggcgccacctacaggggccacagcgacacctactacaaccagaagttcaagggccgggtgaccatcaccgccgacaagagcaccagcaccgcctacatggaactgagcagcctcaggagcgaggacaccgctgtgtattactgcgccaggggcgccatctacgacggctacgacgtgctggacaactggggccagggcacactggtgaccgtgtccagcacgcgtatccagaaccctgatcctgccgtgtaccagctgcgggatagcaagagcagcgacaagagcgtgtgtctgttcaccgacttcgacagccagaccaacgtgtcccagagcaaggactccgacgtgtacatcaccgataagtgcgtgctggacatgcggagcatggacttcaagagcaactccgccgtggcctggtccaacaagtccgatttcgcctgcgccaacgccttcaacaacagcattatccccgaggacacattcttcccaagccccgagagcagctgcggctttaccagcgagagctaccagcagggcgtgctgagcgccaccatcctgtacgagatcctgctgggcaaggccaccctgtacgccgtgctggtgtctgccctggtgctgatggctatggtcaagcggaaggacagccgggga

SEQ ID NO: 4269 - DNA, 2271 bp, synthetic construct
  source 1..2271: mol_type = other DNA
atggccttaccagtgaccgccttgctcctgccgctggccttgctgctccacgccgccaggccggaagtgcagctggttgaatctggcggaggactggttcagcctggcggatctctgagactgtcttgtgccgccagcggcttcagcttcagcgacttttggatgagctgggtccgacaggcccctggcaaaggacttgaatgggtcgccacaatcagccaggccggcagcgagaaggactacgtggactctgtgaagggcagattcaccatcagccgggacaacgccaagaagtccctgtacctccagatgaacagcctgagagccgaggacaccgccgtgtactattgtgcctctggcgtgtacagcttcgactacagaggccagggcaccctggtcacagtctcttctggtaccggcggaggcggatctggcggcggaggtagcggtggcggaggatctgaattcgacatcgtgctgacacagagccctgccaccctgtctctgagccctggcgatagagccaccatcagctgtagagccagcgagagcgtgaccatcctgggcagccacctgatctactggtatcagcagaagcccggccagccccccagactgctgattcagctggcctccaatgtgcagaccggcgtgccagccagattttccggcagcggcagcagaaccgacttcaccctgaccatcagcagcgtggaacccgaggacttcgccgtgtactactgcctccagagccggaccatccccagaacattcggccagggcaccaagctggaaatcaagagactcgaggacctgaagaacgtgttcccacctgaggtggccgtgttcgagcctagcgaggccgagatcagccacacccagaaagccaccctcgtgtgcctggctaccggcttctaccccgaccatgtggaactgtcttggtgggtcaacggcaaagaggtgcacagcggcgtgtgtaccgacccccagccactgaaagaacagcccgccctgaacgacagccggtactgcctgagcagcagactgagagtgtccgccaccttctggcagaacccccggaaccacttcagatgccaggtgcagttctacggcctgagcgagaacgacgagtggacccaggacagagccaagcccgtgacccagatcgtgtctgccgaagcctggggcagagccgattgcgacgtgaagctggtggaaaagagcttcgagacagacaccaacctgaacttccagaacctgagcgtgatcggcttcagaatcctgctgctgaaagtggccggctttaacctgctgatgaccctgcggctgtggtccagcagggccaagcgatctggatctggagcaacaaacttctcactactcaaacaagcaggtgacgtggaggagaatcccgggcctactagtatggactggatttggcgcatccttttccttgtcggcgctgctaccggcgcgcattccttcgaacaggtgcagctggtgcagtctggccccgaagtgaagaaacccggcgagtccgtgaagatcagctgcaaggccagcggctacaccttccggcactacagcatgaactgggtcaagcaggccccaggccagggcctgaagtggatgggcagaatcaacaccgagagcggcgtgcccatctacgccgacgacttcaagggccggttcagcttcaccgtggacaccagcgccagcaccgcctacctggaaatctccagcctgaccagcgaggataccgccgtgtatttctgctccaacgactacctgtacagcctggatttctggggccagggaaccaccctgacagtgtcctctacgcgtatccagaaccctgatcctgccgtgtaccagctgcgggatagcaagagcagcgacaagagcgtgtgtctgttcaccgacttcgacagccagaccaacgtgtcccagagcaaggactccgacgtgtacatcaccgataagtgcgtgctggacatgcggagcatggacttcaagagcaactccgccgtggcctggtccaacaagtccgatttcgcctgcgccaacgccttcaacaacagcattatccccgaggacacattcttcccaagccccgagagcagctgcggctttaccagcgagagctaccagcagggcgtgctgagcgccaccatcctgtacgagatcctgctgggcaaggccaccctgtacgccgtgctggtgtctgccctggtgctgatggctatggtcaagcggaaggacagccgggga

SEQ ID NO: 4270 - DNA, 2274 bp, synthetic construct
  source 1..2274: mol_type = other DNA
atggccttaccagtgaccgccttgctcctgccgctggccttgctgctccacgccgccaggccggaagtgcagctggttgaatctggcggaggactggttcagcctggcggatctctgagactgtcttgtgccgccagcggcttcagcttcagcgacttttggatgagctgggtccgacaggcccctggcaaaggacttgaatgggtcgccacaatcagccaggccggcagcgagaaggactacgtggactctgtgaagggcagattcaccatcagccgggacaacgccaagaagtccctgtacctccagatgaacagcctgagagccgaggacaccgccgtgtactattgtgcctctggcgtgtacagcttcgactacagaggccagggcaccctggtcacagtctcttctggtaccggcggaggcggatctggcggcggaggtagcggtggcggaggatctgaattccagtctgtgctgacacagcctcctagtgtgtctggcgctcctggacagagagtgaccatcagctgtacaggcagcagcagcaatatcggagccggctttgacgtgcactggtatcagcagctgcctggcacagcccctaaactgctgatctacggcaacagcaacagacccagcggcgtgcccgatagattttccggctctaagagcggcacaagcgccagcctggctattactggactccaggccgaggacgaggccgactactactgtcagagctacgacagcagcctgagcggctacgttttcggcaccggcaccaaagtgacagtgcttggtctcgaggacctgaagaacgtgttcccacctgaggtggccgtgttcgagcctagcgaggccgagatcagccacacccagaaagccaccctcgtgtgcctggctaccggcttctaccccgaccatgtggaactgtcttggtgggtcaacggcaaagaggtgcacagcggcgtgtgtaccgacccccagccactgaaagaacagcccgccctgaacgacagccggtactgcctgagcagcagactgagagtgtccgccaccttctggcagaacccccggaaccacttcagatgccaggtgcagttctacggcctgagcgagaacgacgagtggacccaggacagagccaagcccgtgacccagatcgtgtctgccgaagcctggggcagagccgattgcgacgtgaagctggtggaaaagagcttcgagacagacaccaacctgaacttccagaacctgagcgtgatcggcttcagaatcctgctgctgaaagtggccggctttaacctgctgatgaccctgcggctgtggtccagcagggccaagcgatctggatctggagcaacaaacttctcactactcaaacaagcaggtgacgtggaggagaatcccgggcctactagtatggactggatttggcgcatccttttccttgtcggcgctgctaccggcgcgcattccttcgaacaagttcagctggttcagagcggagccgaagtgaagaaacctggggcctctgtgaaggtgtcctgcaaggcttccggctacacctttaccgattactacatgcactgggtccgacaggctcccggccaaagacttgaatggatgggctggatcaaccccaacagcggcggcacaaattacgcccagaagttccaggaccggatcaccgtgaccagagacaccagctccaacaccggctacatggaactgacccggctgagatccgatgacaccgccgtgtactactgcgctagaagcccttactccggcgtgctggataagtggggacagggcacactggtcaccgtgtcatctacgcgtatccagaaccctgatcctgccgtgtaccagctgcgggatagcaagagcagcgacaagagcgtgtgtctgttcaccgacttcgacagccagaccaacgtgtcccagagcaaggactccgacgtgtacatcaccgataagtgcgtgctggacatgcggagcatggacttcaagagcaactccgccgtggcctggtccaacaagtccgatttcgcctgcgccaacgccttcaacaacagcattatccccgaggacacattcttcccaagccccgagagcagctgcggctttaccagcgagagctaccagcagggcgtgctgagcgccaccatcctgtacgagatcctgctgggcaaggccaccctgtacgccgtgctggtgtctgccctggtgctgatggctatggtcaagcggaaggacagccgggga

SEQ ID NO: 4271 - DNA, 2265 bp, synthetic construct
  source 1..2265: mol_type = other DNA
atggccttaccagtgaccgccttgctcctgccgctggccttgctgctccacgccgccaggccggaagtgcagctggttgaatctggcggaggactggttcagcctggcggatctctgagactgtcttgtgccgccagcggcttcagcttcagcgacttttggatgagctgggtccgacaggcccctggcaaaggacttgaatgggtcgccacaatcagccaggccggcagcgagaaggactacgtggactctgtgaagggcagattcaccatcagccgggacaacgccaagaagtccctgtacctccagatgaacagcctgagagccgaggacaccgccgtgtactattgtgcctctggcgtgtacagcttcgactacagaggccagggcaccctggtcacagtctcttctggtaccggcggaggcggatctggcggcggaggtagcggtggcggaggatctgaattccaggctgttctgacacagcctccatctgcctctggcacacctggacagagagtgaccatctcctgtagcggcagcagcagcaacatcggcagctacaccgtgtcctggtatcagcagctccctggaacagcccctaagttcctgatctacagcaacaaccagcggcctagcggcgtgcccgatagattttctggcagcaagagcggcacaagcgccagcctggctatttctggactccagtctgaggacgaggccgactactattgtgccgcctgggacgatagcctgaacggctatgtgtttggcaccggcaccaaagtgacagtgcttggtctcgaggacctgaagaacgtgttcccacctgaggtggccgtgttcgagcctagcgaggccgagatcagccacacccagaaagccaccctcgtgtgcctggctaccggcttctaccccgaccatgtggaactgtcttggtgggtcaacggcaaagaggtgcacagcggcgtgtgtaccgacccccagccactgaaagaacagcccgccctgaacgacagccggtactgcctgagcagcagactgagagtgtccgccaccttctggcagaacccccggaaccacttcagatgccaggtgcagttctacggcctgagcgagaacgacgagtggacccaggacagagccaagcccgtgacccagatcgtgtctgccgaagcctggggcagagccgattgcgacgtgaagctggtggaaaagagcttcgagacagacaccaacctgaacttccagaacctgagcgtgatcggcttcagaatcctgctgctgaaagtggccggctttaacctgctgatgaccctgcggctgtggtccagcagggccaagcgatctggatctggagcaacaaacttctcactactcaaacaagcaggtgacgtggaggagaatcccgggcctactagtatggactggatttggcgcatccttttccttgtcggcgctgctaccggcgcgcattccttcgaagttcaactggttcagagcggagccgaagtgaagaagcctggcgagagcctgaagattagctgcaaaggcagcggctacgacttcaccacctactggatcggctgggtccgacagatgcctggcaaaggactggaatggatgggcatcatctaccccggcgacagcgacaccagatacagccctagcgttagaggccgcgtgaccatcagcgccgacaagtctatcaacaccgcctacctccagtggtccagcctggaagcctctgacaccgccatgtactactgcgccagaatgtggaccttcagccaggatggatggggccagggaacactggtcacagtgtcatctacgcgtatccagaaccctgatcctgccgtgtaccagctgcgggatagcaagagcagcgacaagagcgtgtgtctgttcaccgacttcgacagccagaccaacgtgtcccagagcaaggactccgacgtgtacatcaccgataagtgcgtgctggacatgcggagcatggacttcaagagcaactccgccgtggcctggtccaacaagtccgatttcgcctgcgccaacgccttcaacaacagcattatccccgaggacacattcttcccaagccccgagagcagctgcggctttaccagcgagagctaccagcagggcgtgctgagcgccaccatcctgtacgagatcctgctgggcaaggccaccctgtacgccgtgctggtgtctgccctggtgctgatggctatggtcaagcggaaggacagccgggga

SEQ ID NO: 4272 - DNA, 2274 bp, synthetic construct
  source 1..2274: mol_type = other DNA
atggccttaccagtgaccgccttgctcctgccgctggccttgctgctccacgccgccaggccggaagtgcagctggttgaatctggcggaggactggttcagcctggcggatctctgagactgtcttgtgccgccagcggcttcagcttcagcgacttttggatgagctgggtccgacaggcccctggcaaaggacttgaatgggtcgccacaatcagccaggccggcagcgagaaggactacgtggactctgtgaagggcagattcaccatcagccgggacaacgccaagaagtccctgtacctccagatgaacagcctgagagccgaggacaccgccgtgtactattgtgcctctggcgtgtacagcttcgactacagaggccagggcaccctggtcacagtctcttctggtaccggcggaggcggatctggcggcggaggtagcggtggcggaggatctgaattcgacatcgtgatgacccagagccccgatagcctggccgtgtctctgggagagagagccaccatcaactgcaagagcagccagagcatcctgtacagcagcaaccagaagaactacctggcctggtatcagcagaagcccggccagagccctaagctgctgatctactgggccagcaccagagaaagcggcgtgcccgatagattcagcggcagcggctctggcaccgacttcaccctgaccatcagttctcttcaggccgaggacgtggccgtgtactactgccaccagtacatcagctcctacaccttcggccagggcaccaagctggaaatcaagctcgaggacctgaagaacgtgttcccacctgaggtggccgtgttcgagcctagcgaggccgagatcagccacacccagaaagccaccctcgtgtgcctggctaccggcttctaccccgaccatgtggaactgtcttggtgggtcaacggcaaagaggtgcacagcggcgtgtgtaccgacccccagccactgaaagaacagcccgccctgaacgacagccggtactgcctgagcagcagactgagagtgtccgccaccttctggcagaacccccggaaccacttcagatgccaggtgcagttctacggcctgagcgagaacgacgagtggacccaggacagagccaagcccgtgacccagatcgtgtctgccgaagcctggggcagagccgattgcgacgtgaagctggtggaaaagagcttcgagacagacaccaacctgaacttccagaacctgagcgtgatcggcttcagaatcctgctgctgaaagtggccggctttaacctgctgatgaccctgcggctgtggtccagcagggccaagcgatctggatctggagcaacaaacttctcactactcaaacaagcaggtgacgtggaggagaatcccgggcctactagtatggactggatttggcgcatccttttccttgtcggcgctgctaccggcgcgcattccttcgaacaggtgcagctggtgcagtctggcgctgaagtgaagaaacctggggccagcgtgaaggtgtcctgcaaggccagcggctacacctttgccagccagtggatgcactggatgagacaggcccctggacagggcctggaatggatcggctggatcaaccccggcaacgtgaacaccaagtacaacgagaagttcaagggcagagccaccctgacagtggacaccagcaccaacaccgcctacatggaactgagcagcctgcggagcgaggacaccgccgtgtattattgcgccagaagcacctggtacagacccctggattattggggccagggaacccttgtgaccgtgtcctctacgcgtatccagaaccctgatcctgccgtgtaccagctgcgggatagcaagagcagcgacaagagcgtgtgtctgttcaccgacttcgacagccagaccaacgtgtcccagagcaaggactccgacgtgtacatcaccgataagtgcgtgctggacatgcggagcatggacttcaagagcaactccgccgtggcctggtccaacaagtccgatttcgcctgcgccaacgccttcaacaacagcattatccccgaggacacattcttcccaagccccgagagcagctgcggctttaccagcgagagctaccagcagggcgtgctgagcgccaccatcctgtacgagatcctgctgggcaaggccaccctgtacgccgtgctggtgtctgccctggtgctgatggctatggtcaagcggaaggacagccgggga

SEQ ID NO: 4273 - DNA, 2274 bp, synthetic construct
  source 1..2274: mol_type = other DNA
atggccttaccagtgaccgccttgctcctgccgctggccttgctgctccacgccgccaggccggaagtgcagctggttgaatctggcggaggactggttcagcctggcggatctctgagactgtcttgtgccgccagcggcttcagcttcagcgacttttggatgagctgggtccgacaggcccctggcaaaggacttgaatgggtcgccacaatcagccaggccggcagcgagaaggactacgtggactctgtgaagggcagattcaccatcagccgggacaacgccaagaagtccctgtacctccagatgaacagcctgagagccgaggacaccgccgtgtactattgtgcctctggcgtgtacagcttcgactacagaggccagggcaccctggtcacagtctcttctggtaccggcggaggcggatctggcggcggaggtagcggtggcggaggatctgaattcgaccacatcgtgctgacccagagccctagcagcctgtctgccagcctgggcgacagagtgaccatcagctgtagagccagccaggacatcagcacctacctgaactggtatcagcagaaacccgacggcaccgtgaagctgctgatcttctacaccagcagactgcacgccggggtgcccagcagattttctggcagcggctctggcacccaccacagcctgaccatctccaacctggaacaggaagatattgctacctacttctgtcagcaaggcaacagcctgcccttcaccttcggcagcggcaccaagctggaaatcaagagactcgaggacctgaagaacgtgttcccacctgaggtggccgtgttcgagcctagcgaggccgagatcagccacacccagaaagccaccctcgtgtgcctggctaccggcttctaccccgaccatgtggaactgtcttggtgggtcaacggcaaagaggtgcacagcggcgtgtgtaccgacccccagccactgaaagaacagcccgccctgaacgacagccggtactgcctgagcagcagactgagagtgtccgccaccttctggcagaacccccggaaccacttcagatgccaggtgcagttctacggcctgagcgagaacgacgagtggacccaggacagagccaagcccgtgacccagatcgtgtctgccgaagcctggggcagagccgattgcgacgtgaagctggtggaaaagagcttcgagacagacaccaacctgaacttccagaacctgagcgtgatcggcttcagaatcctgctgctgaaagtggccggctttaacctgctgatgaccctgcggctgtggtccagcagggccaagcgatctggatctggagcaacaaacttctcactactcaaacaagcaggtgacgtggaggagaatcccgggcctactagtatggactggatttggcgcatccttttccttgtcggcgctgctaccggcgcgcattccttcgaacaggtgcagctgaaagagagcggccctgagctggaaaagcctggggccagcgtgaagattagctgcaaggccagcggctacagcttcaccgcctacagcatgaactgggtcaagcagaacaacggcatgagcctggaatggatcggcagcatcgacccctactacggcgacaccaaatacgcccagaagttcaagggcaaggccaccctgaccgtggataaggccagcagcaccgcctacctccagctgaagtctctgaccagcgaggacagcgccgtgtactactgcgccagacggatgattaccaccggcgactggtacttcgacgtgtggggagccggaaccaccgtgacagtgtctagcacgcgtatccagaaccctgatcctgccgtgtaccagctgcgggatagcaagagcagcgacaagagcgtgtgtctgttcaccgacttcgacagccagaccaacgtgtcccagagcaaggactccgacgtgtacatcaccgataagtgcgtgctggacatgcggagcatggacttcaagagcaactccgccgtggcctggtccaacaagtccgatttcgcctgcgccaacgccttcaacaacagcattatccccgaggacacattcttcccaagccccgagagcagctgcggctttaccagcgagagctaccagcagggcgtgctgagcgccaccatcctgtacgagatcctgctgggcaaggccaccctgtacgccgtgctggtgtctgccctggtgctgatggctatggtcaagcggaaggacagccgggga

SEQ ID NO: 4274 - DNA, 2274 bp, synthetic construct; identical to SEQ ID NO: 4273
  source 1..2274: mol_type = other DNA

SEQ ID NO: 4275 - DNA, 2274 bp, synthetic construct
  source 1..2274: mol_type = other DNA
atggccttaccagtgaccgccttgctcctgccgctggccttgctgctccacgccgccaggccggaagtgcagctggttgaatctggcggaggactggttcagcctggcggatctctgagactgtcttgtgccgccagcggcttcagcttcagcgacttttggatgagctgggtccgacaggcccctggcaaaggacttgaatgggtcgccacaatcagccaggccggcagcgagaaggactacgtggactctgtgaagggcagattcaccatcagccgggacaacgccaagaagtccctgtacctccagatgaacagcctgagagccgaggacaccgccgtgtactattgtgcctctggcgtgtacagcttcgactacagaggccagggcaccctggtcacagtctcttctggtaccggcggaggcggatctggcggcggaggtagcggtggcggaggatctgaattcgacgagatcgtgctgacacagagccctgccaccctgtctctgagccctggcgaaagagccaccctgagctgtagagccagccagagcgtgtccagctacctggcctggtatcagcagaagcccggccaggctccccggctgctgatctacgatgccagcaatagagccaccggcatccccgccagattttccggctctggcagcggcaccgacttcaccctgaccatcagctccctggaacccgaggacttcgccgtgtactactgccagcagcggagcaactggcccatcacattcggccagggcacccggctggaaatcaaactcgaggacctgaagaacgtgttcccacctgaggtggccgtgttcgagcctagcgaggccgagatcagccacacccagaaagccaccctcgtgtgcctggctaccggcttctaccccgaccatgtggaactgtcttggtgggtcaacggcaaagaggtgcacagcggcgtgtgtaccgacccccagccactgaaagaacagcccgccctgaacgacagccggtactgcctgagcagcagactgagagtgtccgccaccttctggcagaacccccggaaccacttcagatgccaggtgcagttctacggcctgagcgagaacgacgagtggacccaggacagagccaagcccgtgacccagatcgtgtctgccgaagcctggggcagagccgattgcgacgtgaagctggtggaaaagagcttcgagacagacaccaacctgaacttccagaacctgagcgtgatcggcttcagaatcctgctgctgaaagtggccggctttaacctgctgatgaccctgcggctgtggtccagcagggccaagcgatctggatctggagcaacaaacttctcactactcaaacaagcaggtgacgtggaggagaatcccgggcctactagtatggactggatttggcgcatccttttccttgtcggcgctgctaccggcgcgcattccttcgaagaagtgcagctggtggaatcaggcggcggactggtgcagcctggcagaagcctgagactgagctgtgccgccagcggcttcaccttcaacgactacgccatgcactgggtgcgccaggcccctggaaaaggactggaatgggtgtccacaatcagctggaacagcggcagcatcggctacgccgatagcgtgaagggccggttcaccatcagccgggacaacgccaagaagtccctgtacctccagatgaacagcctgcgggccgaggacacagccctgtactattgcgccaaggacatccagtacggcaactactactacggcatggacgtgtggggccagggaaccaccgtgaccgtgtcatctacgcgtatccagaaccctgatcctgccgtgtaccagctgcgggatagcaagagcagcgacaagagcgtgtgtctgttcaccgacttcgacagccagaccaacgtgtcccagagcaaggactccgacgtgtacatcaccgataagtgcgtgctggacatgcggagcatggacttcaagagcaactccgccgtggcctggtccaacaagtccgatttcgcctgcgccaacgccttcaacaacagcattatccccgaggacacattcttcccaagccccgagagcagctgcggctttaccagcgagagctaccagcagggcgtgctgagcgccaccatcctgtacgagatcctgctgggcaaggccaccctgtacgccgtgctggtgtctgccctggtgctgatggctatggtcaagcggaaggacagccgggga

SEQ ID NO: 4276 - DNA, 2280 bp, synthetic construct
  source 1..2280: mol_type = other DNA
atggccttaccagtgaccgccttgctcctgccgctggccttgctgctccacgccgccaggccggaagtgcagctggttgaatctggcggaggactggttcagcctggcggatctctgagactgtcttgtgccgccagcggcttcagcttcagcgacttttggatgagctgggtccgacaggcccctggcaaaggacttgaatgggtcgccacaatcagccaggccggcagcgagaaggactacgtggactctgtgaagggcagattcaccatcagccgggacaacgccaagaagtccctgtacctccagatgaacagcctgagagccgaggacaccgccgtgtactattgtgcctctggcgtgtacagcttcgactacagaggccagggcaccctggtcacagtctcttctggtaccggcggaggcggatctggcggcggaggtagcggtggcggaggatctgaattcgacatcgtgatgacccagacccccctgagcctgcctgtgacacctggcgagcctgccagcatctcctgcagaagcagcaagagcctgctgcacagcaacggcatcacctacctgtactggtatctgcagaaacccggccagagcccccaactgctgatctaccagatgagcaacctggtgtccggcgtgcccgacagattttctggcagcggctccggcaccgacttcaccctgaagatcagccgggtggaagccgaggacgtgggcgtgtactactgcgcccagaacctggaactgccctacacctttggcggcggaacaaaggtggaaatcaagcggctcgaggacctgaagaacgtgttcccacctgaggtggccgtgttcgagcctagcgaggccgagatcagccacacccagaaagccaccctcgtgtgcctggctaccggcttctaccccgaccatgtggaactgtcttggtgggtcaacggcaaagaggtgcacagcggcgtgtgtaccgacccccagccactgaaagaacagcccgccctgaacgacagccggtactgcctgagcagcagactgagagtgtccgccaccttctggcagaacccccggaaccacttcagatgccaggtgcagttctacggcctgagcgagaacgacgagtggacccaggacagagccaagcccgtgacccagatcgtgtctgccgaagcctggggcagagccgattgcgacgtgaagctggtggaaaagagcttcgagacagacaccaacctgaacttccagaacctgagcgtgatcggcttcagaatcctgctgctgaaagtggccggctttaacctgctgatgaccctgcggctgtggtccagcagggccaagcgatctggatctggagcaacaaacttctcactactcaaacaagcaggtgacgtggaggagaatcccgggcctactagtatggactggatttggcgcatccttttccttgtcggcgctgctaccggcgcgcattccttcgaacaggtgcaactggtgcagagcggagccgaagtgaaaaagcccggcagcagcgtgaaggtgtcctgcaaggccagcggctacgccttcagctactcctggatcaactgggtgcgccaggcccctggacagggcctggaatggatgggcagaatcttccccggcgacggcgacaccgactacaacggcaagttcaagggcagagtgaccatcaccgccgacaagagcaccagcaccgcctacatggaactgagcagcctgcggagcgaggataccgccgtgtactattgtgccagaaacgtgttcgacggctactggctggtgtactggggccagggaacacttgtgaccgtgtccagcacgcgtatccagaaccctgatcctgccgtgtaccagctgcgggatagcaagagcagcgacaagagcgtgtgtctgttcaccgacttcgacagccagaccaacgtgtcccagagcaaggactccgacgtgtacatcaccgataagtgcgtgctggacatgcggagcatggacttcaagagcaactccgccgtggcctggtccaacaagtccgatttcgcctgcgccaacgccttcaacaacagcattatccccgaggacacattcttcccaagccccgagagcagctgcggctttaccagcgagagctaccagcagggcgtgctgagcgccaccatcctgtacgagatcctgctgggcaaggccaccctgtacgccgtgctggtgtctgccctggtgctgatggctatggtcaagcggaaggacagccgggga

SEQ ID NO: 4277 - DNA, 2283 bp, synthetic construct
  source 1..2283: mol_type = other DNA
atggccttaccagtgaccgccttgctcctgccgctggccttgctgctccacgccgccaggccggaagtgcagctggttgaatctggcggaggactggttcagcctggcggatctctgagactgtcttgtgccgccagcggcttcagcttcagcgacttttggatgagctgggtccgacaggcccctggcaaaggacttgaatgggtcgccacaatcagccaggccggcagcgagaaggactacgtggactctgtgaagggcagattcaccatcagccgggacaacgccaagaagtccctgtacctccagatgaacagcctgagagccgaggacaccgccgtgtactattgtgcctctggcgtgtacagcttcgactacagaggccagggcaccctggtcacagtctcttctggtaccggcggaggcggatctggcggcggaggtagcggtggcggaggatctgaattcgacatccagatgacccagagccccagcagcctgtctgccagcgtgggcgacagagtgaccatcacctgtcggagcagccagagcatcgtgcactccgtgggcaacaccttcctggaatggtatcagcagaagcccggcaaggcccccaagctgctgatctacaaggtgtccaacagattcagcggcgtgcccagcaggtttagcggctctggcagcggcaccgacttcaccctgaccatctctagcctccagcccgaggacttcgccacctactactgttttcaaggcagccagttcccctacaccttcggccagggaacaaaggtggaaatcaagcggctcgaggacctgaagaacgtgttcccacctgaggtggccgtgttcgagcctagcgaggccgagatcagccacacccagaaagccaccctcgtgtgcctggctaccggcttctaccccgaccatgtggaactgtcttggtgggtcaacggcaaagaggtgcacagcggcgtgtgtaccgacccccagccactgaaagaacagcccgccctgaacgacagccggtactgcctgagcagcagactgagagtgtccgccaccttctggcagaacccccggaaccacttcagatgccaggtgcagttctacggcctgagcgagaacgacgagtggacccaggacagagccaagcccgtgacccagatcgtgtctgccgaagcctggggcagagccgattgcgacgtgaagctggtggaaaagagcttcgagacagacaccaacctgaacttccagaacctgagcgtgatcggcttcagaatcctgctgctgaaagtggccggctttaacctgctgatgaccctgcggctgtggtccagcagggccaagcgatctggatctggagcaacaaacttctcactactcaaacaagcaggtgacgtggaggagaatcccgggcctactagtatggactggatttggcgcatccttttccttgtcggcgctgctaccggcgcgcattccttcgaagaagtgcaactggtggaaagcggaggcggcctggtgcagcctggcggatctctgagactgagctgtgccgccagcggctacgagttcagccggtcctggatgaactgggtgcgccaggcccctggcaagggactggaatgggtgggaagaatctaccccggcgacggcgacaccaactacagcggcaagttcaagggccggttcaccatcagcgccgacaccagcaagaacaccgcctacctccagatgaacagcctgcgggccgaggataccgccgtgtactactgtgccagagatggcagctcctgggactggtacttcgacgtgtggggacagggaacccttgtgaccgtgtccagcacgcgtatccagaaccctgatcctgccgtgtaccagctgcgggatagcaagagcagcgacaagagcgtgtgtctgttcaccgacttcgacagccagaccaacgtgtcccagagcaaggactccgacgtgtacatcaccgataagtgcgtgctggacatgcggagcatggacttcaagagcaactccgccgtggcctggtccaacaagtccgatttcgcctgcgccaacgccttcaacaacagcattatccccgaggacacattcttcccaagccccgagagcagctgcggctttaccagcgagagctaccagcagggcgtgctgagcgccaccatcctgtacgagatcctgctgggcaaggccaccctgtacgccgtgctggtgtctgccctggtgctgatggctatggtcaagcggaaggacagccgggga

SEQ ID NO: 4278 - DNA, 2277 bp, synthetic construct
  source 1..2277: mol_type = other DNA
atggccttaccagtgaccgccttgctcctgccgctggccttgctgctccacgccgccaggccggaagtgcagctggttgaatctggcggaggactggttcagcctggcggatctctgagactgtcttgtgccgccagcggcttcagcttcagcgacttttggatgagctgggtccgacaggcccctggcaaaggacttgaatgggtcgccacaatcagccaggccggcagcgagaaggactacgtggactctgtgaagggcagattcaccatcagccgggacaacgccaagaagtccctgtacctccagatgaacagcctgagagccgaggacaccgccgtgtactattgtgcctctggcgtgtacagcttcgactacagaggccagggcaccctggtcacagtctcttctggtaccggcggaggcggatctggcggcggaggtagcggtggcggaggatctgaattcgacatccagatgacccagagccccagcagcctgtctgccagcgtgggcgacagagtgaccatcacctgtagagccagccagaccatctggtcctacctgaactggtatcagcagaggcccggcaaggcccccaacctgctgatctatgccgccagctctctccagagcggcgtgcccagcagattttccggcagaggcagcggcaccgacttcaccctgaccatcagttccttgcaggccgaggacttcgccacctactactgccagcagagctacagcatcccccagattttcggccagggcaccaagctggaaatcaagctcgaggacctgaagaacgtgttcccacctgaggtggccgtgttcgagcctagcgaggccgagatcagccacacccagaaagccaccctcgtgtgcctggctaccggcttctaccccgaccatgtggaactgtcttggtgggtcaacggcaaagaggtgcacagcggcgtgtgtaccgacccccagccactgaaagaacagcccgccctgaacgacagccggtactgcctgagcagcagactgagagtgtccgccaccttctggcagaacccccggaaccacttcagatgccaggtgcagttctacggcctgagcgagaacgacgagtggacccaggacagagccaagcccgtgacccagatcgtgtctgccgaagcctggggcagagccgattgcgacgtgaagctggtggaaaagagcttcgagacagacaccaacctgaacttccagaacctgagcgtgatcggcttcagaatcctgctgctgaaagtggccggctttaacctgctgatgaccctgcggctgtggtccagcagggccaagcgatctggatctggagcaacaaacttctcactactcaaacaagcaggtgacgtggaggagaatcccgggcctactagtatggactggatttggcgcatccttttccttgtcggcgctgctaccggcgcgcattccttcgaacaggtgcagctccagcagtctggacccggcctcgtgaagcctagccagacactgagcctgacctgcgccatcagcggcgatagcgtgtccagcaatagcgccgcctggaactggatcagacagtccccctctcggggcctggaatggctgggccggacctactaccgcagcaagtggtacaacgactacgccgtgtccgtgaagtcccggatcaccatcaaccccgacaccagcaagaaccagttctccttgcaactgaacagcgtgacccccgaggacaccgccgtgtactactgcgccagagaagtgaccggcgacctggaagatgccttcgacatctggggccagggaacaatggtcacagtgtccagcacgcgtatccagaaccctgatcctgccgtgtaccagctgcgggatagcaagagcagcgacaagagcgtgtgtctgttcaccgacttcgacagccagaccaacgtgtcccagagcaaggactccgacgtgtacatcaccgataagtgcgtgctggacatgcggagcatggacttcaagagcaactccgccgtggcctggtccaacaagtccgatttcgcctgcgccaacgccttcaacaacagcattatccccgaggacacattcttcccaagccccgagagcagctgcggctttaccagcgagagctaccagcagggcgtgctgagcgccaccatcctgtacgagatcctgctgggcaaggccaccctgtacgccgtgctggtgtctgccctggtgctgatggctatggtcaagcggaaggacagccgggga

SEQ ID NO: 4279 - DNA, 2256 bp, synthetic construct
  source 1..2256: mol_type = other DNA
atggccttaccagtgaccgccttgctcctgccgctggccttgctgctccacgccgccaggccggaagtgcagctggttgaatctggcggaggactggttcagcctggcggatctctgagactgtcttgtgccgccagcggcttcagcttcagcgacttttggatgagctgggtccgacaggcccctggcaaaggacttgaatgggtcgccacaatcagccaggccggcagcgagaaggactacgtggactctgtgaagggcagattcaccatcagccgggacaacgccaagaagtccctgtacctccagatgaacagcctgagagccgaggacaccgccgtgtactattgtgcctctggcgtgtacagcttcgactacagaggccagggcaccctggtcacagtctcttctggtaccggcggaggcggatctggcggcggaggtagcggtggcggaggatctgaattcgacatccagatgacccagagccccgccaccatcgagaacacaagcctgtctgccagcgtgggcgacagagtgaccatcacctgtagagccagccagggcatcagctcttggctgacctggtatcagcagaagcccgagaaggcccccaagagcctgatctacgccgccagctctctgcagtctggcgtgcccagcagattttccggcagcggctctggcaccgacttcaccctgacaatcagcagcctgcagcccgaggacttcgccacctactactgccagcagtacgacagctaccccatcaccttcggccagggcacccggctggaaatcaagctcgaggacctgaagaacgtgttcccacctgaggtggccgtgttcgagcctagcgaggccgagatcagccacacccagaaagccaccctcgtgtgcctggctaccggcttctaccccgaccatgtggaactgtcttggtgggtcaacggcaaagaggtgcacagcggcgtgtgtaccgacccccagccactgaaagaacagcccgccctgaacgacagccggtactgcctgagcagcagactgagagtgtccgccaccttctggcagaacccccggaaccacttcagatgccaggtgcagttctacggcctgagcgagaacgacgagtggacccaggacagagccaagcccgtgacccagatcgtgtctgccgaagcctggggcagagccgattgcgacgtgaagctggtggaaaagagcttcgagacagacaccaacctgaacttccagaacctgagcgtgatcggcttcagaatcctgctgctgaaagtggccggctttaacctgctgatgaccctgcggctgtggtccagcagggccaagcgatctggatctggagcaacaaacttctcactactcaaacaagcaggtgacgtggaggagaatcccgggcctactagtatggactggatttggcgcatccttttccttgtcggcgctgctaccggcgcgcattccttcgaacaggtgcaactgcagcagtggggagccggactgctgaagcctagcgagacactgagcctgacctgcgccgtgtacggcggcagcttcagcgcctactattggagctggatcagacagccccctggcaagggcctggaatggatcggcgacatcaatcacggcggaggcaccaactacaaccccagcctgaagtcccgcgtgaccatctccgtggacaccagcaagaaccagttctccctgaagctgaacagcgtgacagccgccgacacagccgtgtactactgtgccagcctgaccgcctattggggccagggatctcttgtgaccgtgtccagcacgcgtatccagaaccctgatcctgccgtgtaccagctgcgggatagcaagagcagcgacaagagcgtgtgtctgttcaccgacttcgacagccagaccaacgtgtcccagagcaaggactccgacgtgtacatcaccgataagtgcgtgctggacatgcggagcatggacttcaagagcaactccgccgtggcctggtccaacaagtccgatttcgcctgcgccaacgccttcaacaacagcattatccccgaggacacattcttcccaagccccgagagcagctgcggctttaccagcgagagctaccagcagggcgtgctgagcgccaccatcctgtacgagatcctgctgggcaaggccaccctgtacgccgtgctggtgtctgccctggtgctgatggctatggtcaagcggaaggacagccgggga

SEQ ID NO: 4280 - DNA, 2271 bp, synthetic construct
  source 1..2271: mol_type = other DNA
atggccttaccagtgaccgccttgctcctgccgctggccttgctgctccacgccgccaggccggaagtgcagctggttgaatctggcggaggactggttcagcctggcggatctctgagactgtcttgtgccgccagcggcttcagcttcagcgacttttggatgagctgggtccgacaggcccctggcaaaggacttgaatgggtcgccacaatcagccaggccggcagcgagaaggactacgtggactctgtgaagggcagattcaccatcagccgggacaacgccaagaagtccctgtacctccagatgaacagcctgagagccgaggacaccgccgtgtactattgtgcctctggcgtgtacagcttcgactacagaggccagggcaccctggtcacagtctcttctggtaccggcggaggcggatctggcggcggaggtagcggtggcggaggatctgaattcgacgagatcgtgctgacccagagccctgatagcctggccgtgtctctgggcgagagagccaccatcaactgcaaggccagccagagcgtggacttcgacggcgacagctacctgaactggtatcagcagaagcccggccagccccccaaggtgctgatctatgccgccagcacactgcagagcggcgtgcccagcagattttctggcagcggctccggcaccgacttcaccctgaccatcaacagcctggaagccgaggacgccgccacctactactgccagcagagcaacgaggacccctggacctttggcggcggaacaaaggtggaaatcaagctcgaggacctgaagaacgtgttcccacctgaggtggccgtgttcgagcctagcgaggccgagatcagccacacccagaaagccaccctcgtgtgcctggctaccggcttctaccccgaccatgtggaactgtcttggtgggtcaacggcaaagaggtgcacagcggcgtgtgtaccgacccccagccactgaaagaacagcccgccctgaacgacagccggtactgcctgagcagcagactgagagtgtccgccaccttctggcagaacccccggaaccacttcagatgccaggtgcagttctacggcctgagcgagaacgacgagtggacccaggacagagccaagcccgtgacccagatcgtgtctgccgaagcctggggcagagccgattgcgacgtgaagctggtggaaaagagcttcgagacagacaccaacctgaacttccagaacctgagcgtgatcggcttcagaatcctgctgctgaaagtggccggctttaacctgctgatgaccctgcggctgtggtccagcagggccaagcgatctggatctggagcaacaaacttctcactactcaaacaagcaggtgacgtggaggagaatcccgggcctactagtatggactggatttggcgcatccttttccttgtcggcgctgctaccggcgcgcattccttcgaacaggtgcaactggtgcagtccggcgctgaagtgaagaaacctggggccagcgtgaaggtgtcctgcaaggtgtccggctacacctttaccgactactacattacctgggtgcgccaggcccctggacaggccctggaatggatgggctggatctaccccggcagcggcaacaccaagtacagccagaagttccagggcagattcgtgttcagcgtggacaccagcgccagcaccgcctacctgcaactgtctagcctgaaggccgaagataccgccgtgtactactgcgccaactacggcaactattggttcgcctattggggccagggaacccttgtgaccgtgtcctctacgcgtatccagaaccctgatcctgccgtgtaccagctgcgggatagcaagagcagcgacaagagcgtgtgtctgttcaccgacttcgacagccagaccaacgtgtcccagagcaaggactccgacgtgtacatcaccgataagtgcgtgctggacatgcggagcatggacttcaagagcaactccgccgtggcctggtccaacaagtccgatttcgcctgcgccaacgccttcaacaacagcattatccccgaggacacattcttcccaagccccgagagcagctgcggctttaccagcgagagctaccagcagggcgtgctgagcgccaccatcctgtacgagatcctgctgggcaaggccaccctgtacgccgtgctggtgtctgccctggtgctgatggctatggtcaagcggaaggacagccgggga

SEQ ID NO: 4281 - DNA, 2262 bp, synthetic construct
  source 1..2262: mol_type = other DNA
atggccttaccagtgaccgccttgctcctgccgctggccttgctgctccacgccgccaggccggaagtgcagctggttgaatctggcggaggactggttcagcctggcggatctctgagactgtcttgtgccgccagcggcttcagcttcagcgacttttggatgagctgggtccgacaggcccctggcaaaggacttgaatgggtcgccacaatcagccaggccggcagcgagaaggactacgtggactctgtgaagggcagattcaccatcagccgggacaacgccaagaagtccctgtacctccagatgaacagcctgagagccgaggacaccgccgtgtactattgtgcctctggcgtgtacagcttcgactacagaggccagggcaccctggtcacagtctcttctggtaccggcggaggcggatctggcggcggaggtagcggtggcggaggatctgaattcgacatccagatgacccagagccccagcagcctgtctgccagcgtgggcgacagagtgaccatcacctgtagagccagccagggcatcagctcttggctggcctggtatcagcagaagcccgagaaggcccccaagagcctgatctacgccgcctctagtctccagagcggcgtgcccagcagattttctggcagcggctccggcaccgacttcaccctgacaatcagctccctccagcccgaggacttcgccacctactactgccagcagtacaacagctaccctcccacctttggcggaggcaccaaggtggaaatcaagctcgaggacctgaagaacgtgttcccacctgaggtggccgtgttcgagcctagcgaggccgagatcagccacacccagaaagccaccctcgtgtgcctggctaccggcttctaccccgaccatgtggaactgtcttggtgggtcaacggcaaagaggtgcacagcggcgtgtgtaccgacccccagccactgaaagaacagcccgccctgaacgacagccggtactgcctgagcagcagactgagagtgtccgccaccttctggcagaacccccggaaccacttcagatgccaggtgcagttctacggcctgagcgagaacgacgagtggacccaggacagagccaagcccgtgacccagatcgtgtctgccgaagcctggggcagagccgattgcgacgtgaagctggtggaaaagagcttcgagacagacaccaacctgaacttccagaacctgagcgtgatcggcttcagaatcctgctgctgaaagtggccggctttaacctgctgatgaccctgcggctgtggtccagcagggccaagcgatctggatctggagcaacaaacttctcactactcaaacaagcaggtgacgtggaggagaatcccgggcctactagtatggactggatttggcgcatccttttccttgtcggcgctgctaccggcgcgcattccttcgaagaagtgcaactggtgcagtctggcggagggctggtgcatcctgggggaagcctgagactgagctgtgccggctctggcttcgccttcagcagcagcaccatgcactggatcagacaggcccctggcaagggcctggaatggatcagcctgatcggaagcggagggggcatctactacggcgacagcgtgaagggccggttcaccatcagccgggacaacgccaagaacagcctgtacctccagatgaactccctgcgggccgaggacatggccgtgtactattgtgtgcggggctacttcgactgggtggactacttcgattactggggccagggcaccctcgtgaccgtgtcatctacgcgtatccagaaccctgatcctgccgtgtaccagctgcgggatagcaagagcagcgacaagagcgtgtgtctgttcaccgacttcgacagccagaccaacgtgtcccagagcaaggactccgacgtgtacatcaccgataagtgcgtgctggacatgcggagcatggacttcaagagcaactccgccgtggcctggtccaacaagtccgatttcgcctgcgccaacgccttcaacaacagcattatccccgaggacacattcttcccaagccccgagagcagctgcggctttaccagcgagagctaccagcagggcgtgctgagcgccaccatcctgtacgagatcctgctgggcaaggccaccctgtacgccgtgctggtgtctgccctggtgctgatggctatggtcaagcggaaggacagccgggga

SEQ ID NO: 4282 - DNA, 2292 bp, synthetic construct
  source 1..2292: mol_type = other DNA
atggccttaccagtgaccgccttgctcctgccgctggccttgctgctccacgccgccaggccggaagtgcagctggttgaatctggcggaggactggttcagcctggcggatctctgagactgtcttgtgccgccagcggcttcagcttcagcgacttttggatgagctgggtccgacaggcccctggcaaaggacttgaatgggtcgccacaatcagccaggccggcagcgagaaggactacgtggactctgtgaagggcagattcaccatcagccgggacaacgccaagaagtccctgtacctccagatgaacagcctgagagccgaggacaccgccgtgtactattgtgcctctggcgtgtacagcttcgactacagaggccagggcaccctggtcacagtctcttctggtaccggcggaggcggatctggcggcggaggtagcggtggcggaggatctgaattcgacgacatcgtgatgacacagtcaccagatagcctcaccgtctccctgggggagcggaccaccattaattgtaaatccagccaaagcgtgctggactcaagcaagaacaagaatagcctcgcctggtatcagcagaagcccggtcagcctccaaagctgctgctttcttgggcctccaccagagagtccgggattcctgataggtttagtggttcaggctccggcacagattttactctgaccattgattctctccagccagaggattctgcaacttattactgccagcaaagcgcccactttcctataacttttggccagggaacccgacttgaaatcaagctcgaggacctgaagaacgtgttcccacctgaggtggccgtgttcgagcctagcgaggccgagatcagccacacccagaaagccaccctcgtgtgcctggctaccggcttctaccccgaccatgtggaactgtcttggtgggtcaacggcaaagaggtgcacagcggcgtgtgtaccgacccccagccactgaaagaacagcccgccctgaacgacagccggtactgcctgagcagcagactgagagtgtccgccaccttctggcagaacccccggaaccacttcagatgccaggtgcagttctacggcctgagcgagaacgacgagtggacccaggacagagccaagcccgtgacccagatcgtgtctgccgaagcctggggcagagccgattgcgacgtgaagctggtggaaaagagcttcgagacagacaccaacctgaacttccagaacctgagcgtgatcggcttcagaatcctgctgctgaaagtggccggctttaacctgctgatgaccctgcggctgtggtccagcagggccaagcgatctggatctggagcaacaaacttctcactactcaaacaagcaggtgacgtggaggagaatcccgggcctactagtatggactggatttggcgcatccttttccttgtcggcgctgctaccggcgcgcattccttcgaacaggtgcagctggtgcagagcggtgccgaagtgaagaaaccaggtgcatccgttaaagtttcatgtaaggctagtggatataccttcaccaattacggaatgaactgggtgaaacaggcccctggccagggactgaagtggatggggtggattaacacctacaccggggagccgacttatgcagacgactttaaggggcgggtcacgatgacctccgacacctccaccagtaccgcctacctggagctgcacaaccttaggtcagacgataccgccgtgtattactgtgcccgatggtcttggtccgacggatactatgtctacttcgactattggggccaggggaccacagttaccgtgtcctctacgcgtatccagaaccctgatcctgccgtgtaccagctgcgggatagcaagagcagcgacaagagcgtgtgtctgttcaccgacttcgacagccagaccaacgtgtcccagagcaaggactccgacgtgtacatcaccgataagtgcgtgctggacatgcggagcatggacttcaagagcaactccgccgtggcctggtccaacaagtccgatttcgcctgcgccaacgccttcaacaacagcattatccccgaggacacattcttcccaagccccgagagcagctgcggctttaccagcgagagctaccagcagggcgtgctgagcgccaccatcctgtacgagatcctgctgggcaaggccaccctgtacgccgtgctggtgtctgccctggtgctgatggctatggtcaagcggaaggacagccgggga

SEQ ID NO: 4283 - DNA, 2280 bp, synthetic construct
  source 1..2280: mol_type = other DNA
atggccttaccagtgaccgccttgctcctgccgctggccttgctgctccacgccgccaggccggaagtgcagctggttgaatctggcggaggactggttcagcctggcggatctctgagactgtcttgtgccgccagcggcttcagcttcagcgacttttggatgagctgggtccgacaggcccctggcaaaggacttgaatgggtcgccacaatcagccaggccggcagcgagaaggactacgtggactctgtgaagggcagattcaccatcagccgggacaacgccaagaagtccctgtacctccagatgaacagcctgagagccgaggacaccgccgtgtactattgtgcctctggcgtgtacagcttcgactacagaggccagggcaccctggtcacagtctcttctggtaccggcggaggcggatctggcggcggaggtagcggtggcggaggatctgaattcgacgagatcgtgctgacacagagccctggaagcctggccgtgtctcctggcgagcgcgtgacaatgagctgcaagagcagccagagcgtgttcttcagcagctcccagaagaactacctggcctggtatcagcagatccccggccagagccccagactgctgatctactgggccagcaccagagaaagcggcgtgcccgatagattcaccggcagcggctctggcaccgacttcaccctgacaatcagcagcgtgcagcccgaggacctggctatctactactgccaccagtacctgagcagccggaccttcggccagggcaccaagctggaaatcaagagactcgaggacctgaagaacgtgttcccacctgaggtggccgtgttcgagcctagcgaggccgagatcagccacacccagaaagccaccctcgtgtgcctggctaccggcttctaccccgaccatgtggaactgtcttggtgggtcaacggcaaagaggtgcacagcggcgtgtgtaccgacccccagccactgaaagaacagcccgccctgaacgacagccggtactgcctgagcagcagactgagagtgtccgccaccttctggcagaacccccggaaccacttcagatgccaggtgcagttctacggcctgagcgagaacgacgagtggacccaggacagagccaagcccgtgacccagatcgtgtctgccgaagcctggggcagagccgattgcgacgtgaagctggtggaaaagagcttcgagacagacaccaacctgaacttccagaacctgagcgtgatcggcttcagaatcctgctgctgaaagtggccggctttaacctgctgatgaccctgcggctgtggtccagcagggccaagcgatctggatctggagcaacaaacttctcactactcaaacaagcaggtgacgtggaggagaatcccgggcctactagtatggactggatttggcgcatccttttccttgtcggcgctgctaccggcgcgcattccttcgaacaggtgcaactgcagcagcctggcgctgaggtcgtgaagccaggcgcttccgtgaagatgtcctgcaaggccagcggctacaccttcaccagctactacatccactggatcaagcagacccctggacagggcctggaatgggtgggagtgatctaccccggcaacgacgacatcagctacaaccagaagttccagggcaaggccaccctgaccgccgacaagtctagcaccaccgcctacatgcaactgtccagcctgaccagcgaggacagcgccgtgtactactgcgccagagaagtgcggctgcggtacttcgatgtgtggggccagggaaccaccgtgaccgtgtcatctacgcgtatccagaaccctgatcctgccgtgtaccagctgcgggatagcaagagcagcgacaagagcgtgtgtctgttcaccgacttcgacagccagaccaacgtgtcccagagcaaggactccgacgtgtacatcaccgataagtgcgtgctggacatgcggagcatggacttcaagagcaactccgccgtggcctggtccaacaagtccgatttcgcctgcgccaacgccttcaacaacagcattatccccgaggacacattcttcccaagccccgagagcagctgcggctttaccagcgagagctaccagcagggcgtgctgagcgccaccatcctgtacgagatcctgctgggcaaggccaccctgtacgccgtgctggtgtctgccctggtgctgatggctatggtcaagcggaaggacagccgggga

SEQ ID NO: 4284 - DNA, 2292 bp, synthetic construct
  source 1..2292: mol_type = other DNA
atggccttaccagtgaccgccttgctcctgccgctggccttgctgctccacgccgccaggccggaagtgcagctggttgaatctggcggaggactggttcagcctggcggatctctgagactgtcttgtgccgccagcggcttcagcttcagcgacttttggatgagctgggtccgacaggcccctggcaaaggacttgaatgggtcgccacaatcagccaggccggcagcgagaaggactacgtggactctgtgaagggcagattcaccatcagccgggacaacgccaagaagtccctgtacctccagatgaacagcctgagagccgaggacaccgccgtgtactattgtgcctctggcgtgtacagcttcgactacagaggccagggcaccctggtcacagtctcttctggtaccggcggaggcggatctggcggcggaggtagcggtggcggaggatctgaattcgatgtgctgctgacccagagccctctgagcctgcctgtgacactgggacagcctgccagcatctcctgtcggagcagccagaccatcgtgcacagcaacggcaacacctacctggaatggttccagcagcggccaggccagagccccagactgctgatctaccaggtgtccaacagattcagcggcgtgcccgacagattctccggcagcggctctggcaccgacttcaccctgaagatcagccgggtggaagccgaggacgtgggcgtgtactactgttttcaaggcagccacgtgccccggacctttggcggaggaacaaaggtggaaatcaagagagccctcgaggacctgaagaacgtgttcccacctgaggtggccgtgttcgagcctagcgaggccgagatcagccacacccagaaagccaccctcgtgtgcctggctaccggcttctaccccgaccatgtggaactgtcttggtgggtcaacggcaaagaggtgcacagcggcgtgtgtaccgacccccagccactgaaagaacagcccgccctgaacgacagccggtactgcctgagcagcagactgagagtgtccgccaccttctggcagaacccccggaaccacttcagatgccaggtgcagttctacggcctgagcgagaacgacgagtggacccaggacagagccaagcccgtgacccagatcgtgtctgccgaagcctggggcagagccgattgcgacgtgaagctggtggaaaagagcttcgagacagacaccaacctgaacttccagaacctgagcgtgatcggcttcagaatcctgctgctgaaagtggccggctttaacctgctgatgaccctgcggctgtggtccagcagggccaagcgatctggatctggagcaacaaacttctcactactcaaacaagcaggtgacgtggaggagaatcccgggcctactagtatggactggatttggcgcatccttttccttgtcggcgctgctaccggcgcgcattccttcgaacagatccaactggtgcagagcggcagcgagctgaagaaacctggggccagcgtgaaggtgtcctgcaaggccagcggctacacctttaccaactacggcatgaactgggtgcgccaggcccctggacagggcctgaaatggatgggctggatcaacaccaacaccggcgagcctaagtacgccgaagagttcaagggcagattcgccctgagcctggacaccagcgtgtccacagcctacctccagatcaacagcctgaaggccgaggataccgccgtgtacttctgcgccagaggctacggcaactacgccagaggggcttggctggcctattggggccagggaacactcgtgaccgtgtcctctacgcgtatccagaaccctgatcctgccgtgtaccagctgcgggatagcaagagcagcgacaagagcgtgtgtctgttcaccgacttcgacagccagaccaacgtgtcccagagcaaggactccgacgtgtacatcaccgataagtgcgtgctggacatgcggagcatggacttcaagagcaactccgccgtggcctggtccaacaagtccgatttcgcctgcgccaacgccttcaacaacagcattatccccgaggacacattcttcccaagccccgagagcagctgcggctttaccagcgagagctaccagcagggcgtgctgagcgccaccatcctgtacgagatcctgctgggcaaggccaccctgtacgccgtgctggtgtctgccctggtgctgatggctatggtcaagcggaaggacagccgggga

SEQ ID NO: 4285 - DNA, 2247 bp, synthetic construct
  source 1..2247: mol_type = other DNA
atggccttaccagtgaccgccttgctcctgccgctggccttgctgctccacgccgccaggccggaagtgcagctggttgaatctggcggaggactggttcagcctggcggatctctgagactgtcttgtgccgccagcggcttcagcttcagcgacttttggatgagctgggtccgacaggcccctggcaaaggacttgaatgggtcgccacaatcagccaggccggcagcgagaaggactacgtggactctgtgaagggcagattcaccatcagccgggacaacgccaagaagtccctgtacctccagatgaacagcctgagagccgaggacaccgccgtgtactattgtgcctctggcgtgtacagcttcgactacagaggccagggcaccctggtcacagtctcttctggtaccggcggaggcggatctggcggcggaggtagcggtggcggaggatctgaattcgacgagatcgtgctgacacagagccctgccacactctctctgagccctggcgaaagagccaccctgagctgtagcgccagcagcagcatcaactacatctactggctccagcagaagcccggccaggcccccagaatcctgatctacctgaccagcaacctggcctccggcgtgccagccagattttctggcagcggctccggcaccgacttcaccctgacaatcagcagcctggaacccgaggacttcgccgtgtactactgcctccagtggtccagcaaccccctgacctttggcggaggcaccaaggtggaaatcaagctcgaggacctgaagaacgtgttcccacctgaggtggccgtgttcgagcctagcgaggccgagatcagccacacccagaaagccaccctcgtgtgcctggctaccggcttctaccccgaccatgtggaactgtcttggtgggtcaacggcaaagaggtgcacagcggcgtgtgtaccgacccccagccactgaaagaacagcccgccctgaacgacagccggtactgcctgagcagcagactgagagtgtccgccaccttctggcagaacccccggaaccacttcagatgccaggtgcagttctacggcctgagcgagaacgacgagtggacccaggacagagccaagcccgtgacccagatcgtgtctgccgaagcctggggcagagccgattgcgacgtgaagctggtggaaaagagcttcgagacagacaccaacctgaacttccagaacctgagcgtgatcggcttcagaatcctgctgctgaaagtggccggctttaacctgctgatgaccctgcggctgtggtccagcagggccaagcgatctggatctggagcaacaaacttctcactactcaaacaagcaggtgacgtggaggagaatcccgggcctactagtatggactggatttggcgcatccttttccttgtcggcgctgctaccggcgcgcattccttcgaagaagtgcaactggtggaaagcgggggaggacttgtgaagcctggcggctctctgagactgagctgtgccgcctctggcttcaccttcagcagctacgacatgagctgggtgcgccaggctcctggcaagggactggaatgggtgtccaccatcagcagcggcggcagctacacctactacctggacagcatcaagggccggttcaccatctccagagacaacgccaagaacagcctgtacctccagatgaactccctgcgggccgaggacacagccgtgtattattgcgccagacagggcctggattactggggcagaggcacccttgtgaccgtgtcctctacgcgtatccagaaccctgatcctgccgtgtaccagctgcgggatagcaagagcagcgacaagagcgtgtgtctgttcaccgacttcgacagccagaccaacgtgtcccagagcaaggactccgacgtgtacatcaccgataagtgcgtgctggacatgcggagcatggacttcaagagcaactccgccgtggcctggtccaacaagtccgatttcgcctgcgccaacgccttcaacaacagcattatccccgaggacacattcttcccaagccccgagagcagctgcggctttaccagcgagagctaccagcagggcgtgctgagcgccaccatcctgtacgagatcctgctgggcaaggccaccctgtacgccgtgctggtgtctgccctggtgctgatggctatggtcaagcggaaggacagccgggga

SEQ ID NO: 4286 - DNA, 2274 bp, synthetic construct
  source 1..2274: mol_type = other DNA
atggccttaccagtgaccgccttgctcctgccgctggccttgctgctccacgccgccaggccggaagtgcagctggttgaatctggcggaggactggttcagcctggcggatctctgagactgtcttgtgccgccagcggcttcagcttcagcgacttttggatgagctgggtccgacaggcccctggcaaaggacttgaatgggtcgccacaatcagccaggccggcagcgagaaggactacgtggactctgtgaagggcagattcaccatcagccgggacaacgccaagaagtccctgtacctccagatgaacagcctgagagccgaggacaccgccgtgtactattgtgcctctggcgtgtacagcttcgactacagaggccagggcaccctggtcacagtctcttctggtaccggcggaggcggatctggcggcggaggtagcggtggcggaggatctgaattcgacatcgtgatgacccagagccccgatagcctggccgtgtctctgggagagagagccaccatcaactgccgggccagcaagagcgtgtccaccagcggctacagcttcatgcactggtatcagcagaagcccggccagccccccaagctgctgatctacctggcctccaacctggaaagcggcgtgcccgatagattcagcggcagcggctctggcaccgacttcaccctgaccatcagttctcttcaggccgaggacgtggccgtgtactactgccagcacagcagagaggtgccctggacattcggccagggcacaaaggtggaaatcaagcggctcgaggacctgaagaacgtgttcccacctgaggtggccgtgttcgagcctagcgaggccgagatcagccacacccagaaagccaccctcgtgtgcctggctaccggcttctaccccgaccatgtggaactgtcttggtgggtcaacggcaaagaggtgcacagcggcgtgtgtaccgacccccagccactgaaagaacagcccgccctgaacgacagccggtactgcctgagcagcagactgagagtgtccgccaccttctggcagaacccccggaaccacttcagatgccaggtgcagttctacggcctgagcgagaacgacgagtggacccaggacagagccaagcccgtgacccagatcgtgtctgccgaagcctggggcagagccgattgcgacgtgaagctggtggaaaagagcttcgagacagacaccaacctgaacttccagaacctgagcgtgatcggcttcagaatcctgctgctgaaagtggccggctttaacctgctgatgaccctgcggctgtggtccagcagggccaagcgatctggatctggagcaacaaacttctcactactcaaacaagcaggtgacgtggaggagaatcccgggcctactagtatggactggatttggcgcatccttttccttgtcggcgctgctaccggcgcgcattccttcgaacaggtgcagctggtgcagtctggggccgaagtgaagaaacctggggccagcgtgaaggtgtcctgcaaggccagcggatacacctttaccaactacggcatgaactgggtgcgccaggcccctggacagggcctggaatggatgggctggatcaacacctacaccggcgagcccacatacgccgacgccttcaagggcagattcgccttcagcctggacaccagcacctccaccgcctacctccagatcaacagcctgcggagcgacgacaccgccgtgtattattgcgccagagattacggcgactacgggatggactattggggccagggaaccaccgtgaccgtgtcctctacgcgtatccagaaccctgatcctgccgtgtaccagctgcgggatagcaagagcagcgacaagagcgtgtgtctgttcaccgacttcgacagccagaccaacgtgtcccagagcaaggactccgacgtgtacatcaccgataagtgcgtgctggacatgcggagcatggacttcaagagcaactccgccgtggcctggtccaacaagtccgatttcgcctgcgccaacgccttcaacaacagcattatccccgaggacacattcttcccaagccccgagagcagctgcggctttaccagcgagagctaccagcagggcgtgctgagcgccaccatcctgtacgagatcctgctgggcaaggccaccctgtacgccgtgctggtgtctgccctggtgctgatggctatggtcaagcggaaggacagccgggga

SEQ ID NO: 4287 - DNA, 2262 bp, synthetic construct
  source 1..2262: mol_type = other DNA
atggccttaccagtgaccgccttgctcctgccgctggccttgctgctccacgccgccaggccggaagtgcagctggttgaatctggcggaggactggttcagcctggcggatctctgagactgtcttgtgccgccagcggcttcagcttcagcgacttttggatgagctgggtccgacaggcccctggcaaaggacttgaatgggtcgccacaatcagccaggccggcagcgagaaggactacgtggactctgtgaagggcagattcaccatcagccgggacaacgccaagaagtccctgtacctccagatgaacagcctgagagccgaggacaccgccgtgtactattgtgcctctggcgtgtacagcttcgactacagaggccagggcaccctggtcacagtctcttctggtaccggcggaggcggatctggcggcggaggtagcggtggcggaggatctgaattcgacatcgtgatgacccagacccccctgaccctgagcgtgacaatcggacagcctgccagcatctcctgcaagagcagccagagcctgctggacagcgacggcaagacctacctgaactggctgctgcagaggccaggccagagccccgagagactgatctacctggtgtccaagctggactccggcgtgcccgatagattcacaggcagcggctccggcaccgacttcaccctgaagatcagccgggtggaagccgaggacctgggcgtgtactgttgttggcagggcacccacttcccttacaccttcggcggagggaccaaggtggaaatcaagggcctcgaggacctgaagaacgtgttcccacctgaggtggccgtgttcgagcctagcgaggccgagatcagccacacccagaaagccaccctcgtgtgcctggctaccggcttctaccccgaccatgtggaactgtcttggtgggtcaacggcaaagaggtgcacagcggcgtgtgtaccgacccccagccactgaaagaacagcccgccctgaacgacagccggtactgcctgagcagcagactgagagtgtccgccaccttctggcagaacccccggaaccacttcagatgccaggtgcagttctacggcctgagcgagaacgacgagtggacccaggacagagccaagcccgtgacccagatcgtgtctgccgaagcctggggcagagccgattgcgacgtgaagctggtggaaaagagcttcgagacagacaccaacctgaacttccagaacctgagcgtgatcggcttcagaatcctgctgctgaaagtggccggctttaacctgctgatgaccctgcggctgtggtccagcagggccaagcgatctggatctggagcaacaaacttctcactactcaaacaagcaggtgacgtggaggagaatcccgggcctactagtatggactggatttggcgcatccttttccttgtcggcgctgctaccggcgcgcattccttcgaacaggtgcaactgcagcagcctggcgctgaacttgtgcggccaggcgcctctgtgaagctgagctgtaaagccagcggctacaccttcaccagctactggatgaactgggtcaagcagcgcccaggccagggcctggaatggatcggaatgatcgaccccagcgacagcgagacacactacaaccacatcttcaaggacaaggccaccctgaccgtggacaagtccagcagcacagcctacctgcaactgtccagcctgaccagcgaggacagcgccgtgtactactgcgcccggaacctgtatctgtggggccagggaacaagcgtgaccgtgtctagcacgcgtatccagaaccctgatcctgccgtgtaccagctgcgggatagcaagagcagcgacaagagcgtgtgtctgttcaccgacttcgacagccagaccaacgtgtcccagagcaaggactccgacgtgtacatcaccgataagtgcgtgctggacatgcggagcatggacttcaagagcaactccgccgtggcctggtccaacaagtccgatttcgcctgcgccaacgccttcaacaacagcattatccccgaggacacattcttcccaagccccgagagcagctgcggctttaccagcgagagctaccagcagggcgtgctgagcgccaccatcctgtacgagatcctgctgggcaaggccaccctgtacgccgtgctggtgtctgccctggtgctgatggctatggtcaagcggaaggacagccgggga

SEQ ID NO: 4288 - DNA, 2286 bp, synthetic construct
  source 1..2286: mol_type = other DNA
atggccttaccagtgaccgccttgctcctgccgctggccttgctgctccacgccgccaggccggaagtgcagctggttgaatctggcggaggactggttcagcctggcggatctctgagactgtcttgtgccgccagcggcttcagcttcagcgacttttggatgagctgggtccgacaggcccctggcaaaggacttgaatgggtcgccacaatcagccaggccggcagcgagaaggactacgtggactctgtgaagggcagattcaccatcagccgggacaacgccaagaagtccctgtacctccagatgaacagcctgagagccgaggacaccgccgtgtactattgtgcctctggcgtgtacagcttcgactacagaggccagggcaccctggtcacagtctcttctggtaccggcggaggcggatctggcggcggaggtagcggtggcggaggatctgaattcgacatcgtgatgacccagagccccgatagcctggccgtgtctctgggagagagagccaccatcaactgcgagagcagccagagcctgctgaacagcggcaaccagaagaactacctgacctggtatcagcagaagcccggccagccccccaagcccctgatctattgggccagcaccagagaaagcggcgtgcccgatagattcagcggcagcggaagcggcaccgacttcaccctgaccatcagttctcttcaggccgaggacgtggccgtgtactactgccagaacgactacagctacccctacaccttcggccagggcaccaagctggaaatcaagagactcgaggacctgaagaacgtgttcccacctgaggtggccgtgttcgagcctagcgaggccgagatcagccacacccagaaagccaccctcgtgtgcctggctaccggcttctaccccgaccatgtggaactgtcttggtgggtcaacggcaaagaggtgcacagcggcgtgtgtaccgacccccagccactgaaagaacagcccgccctgaacgacagccggtactgcctgagcagcagactgagagtgtccgccaccttctggcagaacccccggaaccacttcagatgccaggtgcagttctacggcctgagcgagaacgacgagtggacccaggacagagccaagcccgtgacccagatcgtgtctgccgaagcctggggcagagccgattgcgacgtgaagctggtggaaaagagcttcgagacagacaccaacctgaacttccagaacctgagcgtgatcggcttcagaatcctgctgctgaaagtggccggctttaacctgctgatgaccctgcggctgtggtccagcagggccaagcgatctggatctggagcaacaaacttctcactactcaaacaagcaggtgacgtggaggagaatcccgggcctactagtatggactggatttggcgcatccttttccttgtcggcgctgctaccggcgcgcattccttcgaagaagtgcagctggtgcagtctggggccgaagtgaagaagcctggcgagagcctgaagatcagctgcaagggcagcggctacagcttcaccgactactacatgaagtgggccagacagatgcccggcaagggcctggaatggatgggcgacatcatccccagcaacggggccaccttctacaaccagaaattcaagggccaagtgaccatctccgccgacaagagcatcagcaccacctacctccagtggtccagcctgaaggccagcgacaccgccatgtactattgcgccagaagccatctgctgcgggccagttggttcgcctattggggccagggaacaatggtcacagtgtccagcacgcgtatccagaaccctgatcctgccgtgtaccagctgcgggatagcaagagcagcgacaagagcgtgtgtctgttcaccgacttcgacagccagaccaacgtgtcccagagcaaggactccgacgtgtacatcaccgataagtgcgtgctggacatgcggagcatggacttcaagagcaactccgccgtggcctggtccaacaagtccgatttcgcctgcgccaacgccttcaacaacagcattatccccgaggacacattcttcccaagccccgagagcagctgcggctttaccagcgagagctaccagcagggcgtgctgagcgccaccatcctgtacgagatcctgctgggcaaggccaccctgtacgccgtgctggtgtctgccctggtgctgatggctatggtcaagcggaaggacagccgggga

SEQ ID NO: 4289 - DNA, 2271 bp, synthetic construct
  source 1..2271: mol_type = other DNA
atggccttaccagtgaccgccttgctcctgccgctggccttgctgctccacgccgccaggccggaagtgcagctggttgaatctggcggaggactggttcagcctggcggatctctgagactgtcttgtgccgccagcggcttcagcttcagcgacttttggatgagctgggtccgacaggcccctggcaaaggacttgaatgggtcgccacaatcagccaggccggcagcgagaaggactacgtggactctgtgaagggcagattcaccatcagccgggacaacgccaagaagtccctgtacctccagatgaacagcctgagagccgaggacaccgccgtgtactattgtgcctctggcgtgtacagcttcgactacagaggccagggcaccctggtcacagtctcttctggtaccggcggaggcggatctggcggcggaggtagcggtggcggaggatctgaattcgacatccagatgacccagtctaccagttccctgagtgcatccctcggagacagggtgacgatcagttgcagcgcaagccaagggatcaataactatctgaactggtatcagcagaaaccggacggaacagtcgaactcctgatttattacaccagcacccttcagagtggcgtcccttcccggttcagtggctccggaagcgggaccgattactccctgaccatttctaatctggagccagaggacataggaacgtattattgccagcagtatagtaaactgccacgaacttttggaggggggacgaaactggagatcaaactcgaggacctgaagaacgtgttcccacctgaggtggccgtgttcgagcctagcgaggccgagatcagccacacccagaaagccaccctcgtgtgcctggctaccggcttctaccccgaccatgtggaactgtcttggtgggtcaacggcaaagaggtgcacagcggcgtgtgtaccgacccccagccactgaaagaacagcccgccctgaacgacagccggtactgcctgagcagcagactgagagtgtccgccaccttctggcagaacccccggaaccacttcagatgccaggtgcagttctacggcctgagcgagaacgacgagtggacccaggacagagccaagcccgtgacccagatcgtgtctgccgaagcctggggcagagccgattgcgacgtgaagctggtggaaaagagcttcgagacagacaccaacctgaacttccagaacctgagcgtgatcggcttcagaatcctgctgctgaaagtggccggctttaacctgctgatgaccctgcggctgtggtccagcagggccaagcgatctggatctggagcaacaaacttctcactactcaaacaagcaggtgacgtggaggagaatcccgggcctactagtatggactggatttggcgcatccttttccttgtcggcgctgctaccggcgcgcattccttcgaacaggtgcaactccagcagtccggaagcgagcttatgatgccaggggcatcagtgaagatcagctgcaaggctactggctacaccttctctaattactggatagagtgggttaaacaaaggccagggcacggcctggaatggatcggcgagatcctgcctgggacaggccgaaccatttataacgagaagttcaaaggcaaggctactttcaccgcagatataagctctaatacagtgcaaatgcagctctcttccctgacaagtgaggatagtgccgtgtattattgcgcacgaagagattactatggaaatttttattacgctatggattattggggtcaaggaacaagtgtgaccgttagcagcacgcgtatccagaaccctgatcctgccgtgtaccagctgcgggatagcaagagcagcgacaagagcgtgtgtctgttcaccgacttcgacagccagaccaacgtgtcccagagcaaggactccgacgtgtacatcaccgataagtgcgtgctggacatgcggagcatggacttcaagagcaactccgccgtggcctggtccaacaagtccgatttcgcctgcgccaacgccttcaacaacagcattatccccgaggacacattcttcccaagccccgagagcagctgcggctttaccagcgagagctaccagcagggcgtgctgagcgccaccatcctgtacgagatcctgctgggcaaggccaccctgtacgccgtgctggtgtctgccctggtgctgatggctatggtcaagcggaaggacagccgggga

SEQ ID NO: 4290 - DNA, 2256 bp, synthetic construct
  source 1..2256: mol_type = other DNA
atggccttaccagtgaccgccttgctcctgccgctggccttgctgctccacgccgccaggccggaagtgcagctggttgaatctggcggaggactggttcagcctggcggatctctgagactgtcttgtgccgccagcggcttcagcttcagcgacttttggatgagctgggtccgacaggcccctggcaaaggacttgaatgggtcgccacaatcagccaggccggcagcgagaaggactacgtggactctgtgaagggcagattcaccatcagccgggacaacgccaagaagtccctgtacctccagatgaacagcctgagagccgaggacaccgccgtgtactattgtgcctctggcgtgtacagcttcgactacagaggccagggcaccctggtcacagtctcttctggtaccggcggaggcggatctggcggcggaggtagcggtggcggaggatctgaattcgacatccagatgacccagagccctgccagcctgtccgtgtctgtgggcgagacagtgaccatcacctgtcgggccagcgagaacatctacagcaacctggcctggtatcagcagaagcagggcaagagcccccaactgctggtgtacgccgccaccaatctggccgatggcgtgcccagcagattttccggctctggcagcggcacccagtacagcctgaagatcaacagcctccagagcgaggacttcggcagctactactgccagcacttctggggcacctggacctttggaggaggcaccaccctggaaatcaagctcgaggacctgaagaacgtgttcccacctgaggtggccgtgttcgagcctagcgaggccgagatcagccacacccagaaagccaccctcgtgtgcctggctaccggcttctaccccgaccatgtggaactgtcttggtgggtcaacggcaaagaggtgcacagcggcgtgtgtaccgacccccagccactgaaagaacagcccgccctgaacgacagccggtactgcctgagcagcagactgagagtgtccgccaccttctggcagaacccccggaaccacttcagatgccaggtgcagttctacggcctgagcgagaacgacgagtggacccaggacagagccaagcccgtgacccagatcgtgtctgccgaagcctggggcagagccgattgcgacgtgaagctggtggaaaagagcttcgagacagacaccaacctgaacttccagaacctgagcgtgatcggcttcagaatcctgctgctgaaagtggccggctttaacctgctgatgaccctgcggctgtggtccagcagggccaagcgatctggatctggagcaacaaacttctcactactcaaacaagcaggtgacgtggaggagaatcccgggcctactagtatggactggatttggcgcatccttttccttgtcggcgctgctaccggcgcgcattccttcgaagaagtgcaactccagcagagcggccctgagcttgtgaagcctggcgcttccgtgaagatgagctgcaaggccagcggctacaccttcaccgactactacatgaagtggatgaagcagagccacggcaagtccctggaatggatcggcgacatcaaccccaacaacggcggcaccacctacaaccagaagttcaagggcaaggccaccctgaccgtggacaagagcagcagcaccgcctacatgcaactgaacagcctgaccagcgaggacagcgccgtgtactactgcgccagagactacggctacggctatttcgactactggggccagggcacaaccctgacagtgtcctctacgcgtatccagaaccctgatcctgccgtgtaccagctgcgggatagcaagagcagcgacaagagcgtgtgtctgttcaccgacttcgacagccagaccaacgtgtcccagagcaaggactccgacgtgtacatcaccgataagtgcgtgctggacatgcggagcatggacttcaagagcaactccgccgtggcctggtccaacaagtccgatttcgcctgcgccaacgccttcaacaacagcattatccccgaggacacattcttcccaagccccgagagcagctgcggctttaccagcgagagctaccagcagggcgtgctgagcgccaccatcctgtacgagatcctgctgggcaaggccaccctgtacgccgtgctggtgtctgccctggtgctgatggctatggtcaagcggaaggacagccgggga

SEQ ID NO: 4291 - DNA, 2265 bp, synthetic construct
  source 1..2265: mol_type = other DNA
atggccttaccagtgaccgccttgctcctgccgctggccttgctgctccacgccgccaggccggaagtgcagctggttgaatctggcggaggactggttcagcctggcggatctctgagactgtcttgtgccgccagcggcttcagcttcagcgacttttggatgagctgggtccgacaggcccctggcaaaggacttgaatgggtcgccacaatcagccaggccggcagcgagaaggactacgtggactctgtgaagggcagattcaccatcagccgggacaacgccaagaagtccctgtacctccagatgaacagcctgagagccgaggacaccgccgtgtactattgtgcctctggcgtgtacagcttcgactacagaggccagggcaccctggtcacagtctcttctggtaccggcggaggcggatctggcggcggaggtagcggtggcggaggatctgaattcgagatcgtgctgacacagagccctggcaccctgagcctgtctccaggcgaaagagccacactgagctgtcgggcctctcagagcgtgggaggctacctggcttggtatcagcagaagccaggccaggcccccagactgctgatctacgacgccagcaatcgggccacaggcatccccgccagattttctggcagcggctccggcaccgacttcaccctgacaatcagcagcctggaacccgaggacttcgccgtgtactactgccagcagcggaacaactggccccccatgtacacattcggccagggcaccaagctggaaatcaagagactcgaggacctgaagaacgtgttcccacctgaggtggccgtgttcgagcctagcgaggccgagatcagccacacccagaaagccaccctcgtgtgcctggctaccggcttctaccccgaccatgtggaactgtcttggtgggtcaacggcaaagaggtgcacagcggcgtgtgtaccgacccccagccactgaaagaacagcccgccctgaacgacagccggtactgcctgagcagcagactgagagtgtccgccaccttctggcagaacccccggaaccacttcagatgccaggtgcagttctacggcctgagcgagaacgacgagtggacccaggacagagccaagcccgtgacccagatcgtgtctgccgaagcctggggcagagccgattgcgacgtgaagctggtggaaaagagcttcgagacagacaccaacctgaacttccagaacctgagcgtgatcggcttcagaatcctgctgctgaaagtggccggctttaacctgctgatgaccctgcggctgtggtccagcagggccaagcgatctggatctggagcaacaaacttctcactactcaaacaagcaggtgacgtggaggagaatcccgggcctactagtatggactggatttggcgcatccttttccttgtcggcgctgctaccggcgcgcattccttcgaacaggtgcaactggtgcagagcggagccgaagtgaagaaacccggcagcagcgtgaaggtgtcctgcaaggcttccggcggcaccttcagcagctacgccatttcttgggtgcgccaggctcctggacagggcctggaatggatgggcggcatcatccctatcctgggcaccgccaactacgcccagaaattccagggcagagtgaccatcaccgccgacgagagcaccagcaccgcctacatggaactgagcagcctgcggagcgaggacacagccgtgtattattgcgccagatggggcggaggggccttcgacatttggggccagggaacaatggtcaccgtgtccagcacgcgtatccagaaccctgatcctgccgtgtaccagctgcgggatagcaagagcagcgacaagagcgtgtgtctgttcaccgacttcgacagccagaccaacgtgtcccagagcaaggactccgacgtgtacatcaccgataagtgcgtgctggacatgcggagcatggacttcaagagcaactccgccgtggcctggtccaacaagtccgatttcgcctgcgccaacgccttcaacaacagcattatccccgaggacacattcttcccaagccccgagagcagctgcggctttaccagcgagagctaccagcagggcgtgctgagcgccaccatcctgtacgagatcctgctgggcaaggccaccctgtacgccgtgctggtgtctgccctggtgctgatggctatggtcaagcggaaggacagccgggga

SEQ ID NO: 4292 - DNA, 2250 bp, synthetic construct
  source 1..2250: mol_type = other DNA
atggccttaccagtgaccgccttgctcctgccgctggccttgctgctccacgccgccaggccggaagtgcagctggttgaatctggcggaggactggttcagcctggcggatctctgagactgtcttgtgccgccagcggcttcagcttcagcgacttttggatgagctgggtccgacaggcccctggcaaaggacttgaatgggtcgccacaatcagccaggccggcagcgagaaggactacgtggactctgtgaagggcagattcaccatcagccgggacaacgccaagaagtccctgtacctccagatgaacagcctgagagccgaggacaccgccgtgtactattgtgcctctggcgtgtacagcttcgactacagaggccagggcaccctggtcacagtctcttctggtaccggcggaggcggatctggcggcggaggtagcggtggcggaggatctgaattccagatcgtgctgacacagagccctgccctgatgagcgccagccctggcgagaaagtgaccatgacctgtagcgccagcagcagcgtgcgctacatgtactggtatcagcagaagcccagaagcagccccaagccctggattcacctgaccagcaatctggcctctggcgtgcccgctagattttccggctctggcagcggcaccagctacagcctgaccatcagcagcatggaagccgaggacgccgccacctactactgccagcagtggtccagccaccccttcacatttggctccggcaccaagctggaaatcaagctcgaggacctgaagaacgtgttcccacctgaggtggccgtgttcgagcctagcgaggccgagatcagccacacccagaaagccaccctcgtgtgcctggctaccggcttctaccccgaccatgtggaactgtcttggtgggtcaacggcaaagaggtgcacagcggcgtgtgtaccgacccccagccactgaaagaacagcccgccctgaacgacagccggtactgcctgagcagcagactgagagtgtccgccaccttctggcagaacccccggaaccacttcagatgccaggtgcagttctacggcctgagcgagaacgacgagtggacccaggacagagccaagcccgtgacccagatcgtgtctgccgaagcctggggcagagccgattgcgacgtgaagctggtggaaaagagcttcgagacagacaccaacctgaacttccagaacctgagcgtgatcggcttcagaatcctgctgctgaaagtggccggctttaacctgctgatgaccctgcggctgtggtccagcagggccaagcgatctggatctggagcaacaaacttctcactactcaaacaagcaggtgacgtggaggagaatcccgggcctactagtatggactggatttggcgcatccttttccttgtcggcgctgctaccggcgcgcattccttcgaagatgtgcaactccaggaaagcggccctggccttgtgaagcctagccagagcctgtccctgacctgtaccgtgaccggcttcagcatcaccagcgactactcttggaactggatcagacagttccctggcaacaaactggaatggatgggctacatcagctactccggccacacctcctacaaccccagcctggaaagccggatctccatcaccagagacaccagcaagaaccagttcttcttgcaactgaacagcgtgaccaccgaggataccgccacatattactgtaccagaggcaactgggacgtggtgtactggggccagggcacacttgtgaccgtgtctgctacgcgtatccagaaccctgatcctgccgtgtaccagctgcgggatagcaagagcagcgacaagagcgtgtgtctgttcaccgacttcgacagccagaccaacgtgtcccagagcaaggactccgacgtgtacatcaccgataagtgcgtgctggacatgcggagcatggacttcaagagcaactccgccgtggcctggtccaacaagtccgatttcgcctgcgccaacgccttcaacaacagcattatccccgaggacacattcttcccaagccccgagagcagctgcggctttaccagcgagagctaccagcagggcgtgctgagcgccaccatcctgtacgagatcctgctgggcaaggccaccctgtacgccgtgctggtgtctgccctggtgctgatggctatggtcaagcggaaggacagccgggga

SEQ ID NO: 4293 - DNA, 2280 bp, synthetic construct
  source 1..2280: mol_type = other DNA
atggccttaccagtgaccgccttgctcctgccgctggccttgctgctccacgccgccaggccggaagtgcagctggttgaatctggcggaggactggttcagcctggcggatctctgagactgtcttgtgccgccagcggcttcagcttcagcgacttttggatgagctgggtccgacaggcccctggcaaaggacttgaatgggtcgccacaatcagccaggccggcagcgagaaggactacgtggactctgtgaagggcagattcaccatcagccgggacaacgccaagaagtccctgtacctccagatgaacagcctgagagccgaggacaccgccgtgtactattgtgcctctggcgtgtacagcttcgactacagaggccagggcaccctggtcacagtctcttctggtaccggcggaggcggatctggcggcggaggtagcggtggcggaggatctgaattcgacgtcgtgatgacccagagccctctgagcctgcctgtgacactgggacagcctgccagcatctcctgtcggagcagccagagcatcgtgcacagcgacggcaacacctacctggaatggtatcagcagcggccaggccagagccccagacggctgatctacaaggtgtccaacagattcagcggcgtgcccgacagattctccggcagcggctctggcaccgacttcaccctgaagatcagcagagtggaagccgaggacgtgggcgtgtactactgttttcaaggcagccacgccccctggacctttggcggaggaacaaaggtggaaatcaagctcgaggacctgaagaacgtgttcccacctgaggtggccgtgttcgagcctagcgaggccgagatcagccacacccagaaagccaccctcgtgtgcctggctaccggcttctaccccgaccatgtggaactgtcttggtgggtcaacggcaaagaggtgcacagcggcgtgtgtaccgacccccagccactgaaagaacagcccgccctgaacgacagccggtactgcctgagcagcagactgagagtgtccgccaccttctggcagaacccccggaaccacttcagatgccaggtgcagttctacggcctgagcgagaacgacgagtggacccaggacagagccaagcccgtgacccagatcgtgtctgccgaagcctggggcagagccgattgcgacgtgaagctggtggaaaagagcttcgagacagacaccaacctgaacttccagaacctgagcgtgatcggcttcagaatcctgctgctgaaagtggccggctttaacctgctgatgaccctgcggctgtggtccagcagggccaagcgatctggatctggagcaacaaacttctcactactcaaacaagcaggtgacgtggaggagaatcccgggcctactagtatggactggatttggcgcatccttttccttgtcggcgctgctaccggcgcgcattccttcgaagaagtgcaactggtggaatcaggcggcggactggtgcagcctggcggatctctgagactgagctgtgccgccagcggcttcaccttcagcagctacggaatgcactgggtgcgccaggcccctggcaaaggactggaatgggtggcctacatcaccaccagaagcagcaccatctactacgccgacagcgtgaagggccggttcaccatctccagagacaacgccaagaacagcctgtacctccagatgaactccctgcgggccgaggacaccgccgtgtactattgcaccagagagcccctgaccggctactacgctatggactattggggccagggcaccagcgtgaccgtgtctagtacgcgtatccagaaccctgatcctgccgtgtaccagctgcgggatagcaagagcagcgacaagagcgtgtgtctgttcaccgacttcgacagccagaccaacgtgtcccagagcaaggactccgacgtgtacatcaccgataagtgcgtgctggacatgcggagcatggacttcaagagcaactccgccgtggcctggtccaacaagtccgatttcgcctgcgccaacgccttcaacaacagcattatccccgaggacacattcttcccaagccccgagagcagctgcggctttaccagcgagagctaccagcagggcgtgctgagcgccaccatcctgtacgagatcctgctgggcaaggccaccctgtacgccgtgctggtgtctgccctggtgctgatggctatggtcaagcggaaggacagccgggga

SEQ ID NO: 4294 - DNA, 2256 bp, synthetic construct
  source 1..2256: mol_type = other DNA
atggccttaccagtgaccgccttgctcctgccgctggccttgctgctccacgccgccaggccggaagtgcagctggttgaatctggcggaggactggttcagcctggcggatctctgagactgtcttgtgccgccagcggcttcagcttcagcgacttttggatgagctgggtccgacaggcccctggcaaaggacttgaatgggtcgccacaatcagccaggccggcagcgagaaggactacgtggactctgtgaagggcagattcaccatcagccgggacaacgccaagaagtccctgtacctccagatgaacagcctgagagccgaggacaccgccgtgtactattgtgcctctggcgtgtacagcttcgactacagaggccagggcaccctggtcacagtctcttctggtaccggcggaggcggatctggcggcggaggtagcggtggcggaggatctgaattcgacatccagatgacccagagccccagcagcctgtctgccagcgtgggcgacagagtgaccatcacctgtagagccagccagagcatcagcctgtggctgaactggtatcagcagaagcccggcaaggcccccaagctgctgatctacgccgccagcacactccagagcggcgtgccaagcagattttccggcagcggctccggcaccgacttcaccctgacaatcagctccctccagcccgaggacttcgccacctactactgccagcagtactacaccagcccctacaccttcggccagggcaccaaggtggaaatcaagagactcgaggacctgaagaacgtgttcccacctgaggtggccgtgttcgagcctagcgaggccgagatcagccacacccagaaagccaccctcgtgtgcctggctaccggcttctaccccgaccatgtggaactgtcttggtgggtcaacggcaaagaggtgcacagcggcgtgtgtaccgacccccagccactgaaagaacagcccgccctgaacgacagccggtactgcctgagcagcagactgagagtgtccgccaccttctggcagaacccccggaaccacttcagatgccaggtgcagttctacggcctgagcgagaacgacgagtggacccaggacagagccaagcccgtgacccagatcgtgtctgccgaagcctggggcagagccgattgcgacgtgaagctggtggaaaagagcttcgagacagacaccaacctgaacttccagaacctgagcgtgatcggcttcagaatcctgctgctgaaagtggccggctttaacctgctgatgaccctgcggctgtggtccagcagggccaagcgatctggatctggagcaacaaacttctcactactcaaacaagcaggtgacgtggaggagaatcccgggcctactagtatggactggatttggcgcatccttttccttgtcggcgctgctaccggcgcgcattccttcgaacaggtgcaactgctggaatctggcggcggactggtgcagcctggcggatctctgagactgagctgtgccgccagcggcttcaccttcagcagctacgccatgagctgggtgcgccaggcccctggaaaaggactggaatgggtgtccgtgatccggtccagcggcagcagcacctattacgccgatagcgtgaagggccggttcaccatcagccgggacaacagcaagaacaccctgtacctccagatgaacagcctgcgggccgaggacaccgccgtgtactattgtgctaggggaggcggctacttcgactactggggccagggaacactcgtgaccgtgtcctctacgcgtatccagaaccctgatcctgccgtgtaccagctgcgggatagcaagagcagcgacaagagcgtgtgtctgttcaccgacttcgacagccagaccaacgtgtcccagagcaaggactccgacgtgtacatcaccgataagtgcgtgctggacatgcggagcatggacttcaagagcaactccgccgtggcctggtccaacaagtccgatttcgcctgcgccaacgccttcaacaacagcattatccccgaggacacattcttcccaagccccgagagcagctgcggctttaccagcgagagctaccagcagggcgtgctgagcgccaccatcctgtacgagatcctgctgggcaaggccaccctgtacgccgtgctggtgtctgccctggtgctgatggctatggtcaagcggaaggacagccgggga

SEQ ID NO: 4295 - DNA, 2265 bp, synthetic construct
  source 1..2265: mol_type = other DNA
atggccttaccagtgaccgccttgctcctgccgctggccttgctgctccacgccgccaggccggaagtgcagctggttgaatctggcggaggactggttcagcctggcggatctctgagactgtcttgtgccgccagcggcttcagcttcagcgacttttggatgagctgggtccgacaggcccctggcaaaggacttgaatgggtcgccacaatcagccaggccggcagcgagaaggactacgtggactctgtgaagggcagattcaccatcagccgggacaacgccaagaagtccctgtacctccagatgaacagcctgagagccgaggacaccgccgtgtactattgtgcctctggcgtgtacagcttcgactacagaggccagggcaccctggtcacagtctcttctggtaccggcggaggcggatctggcggcggaggtagcggtggcggaggatctgaattcgacatccagatgacccagagccccagcagcctgtctgccagcgtgggcgacagagtgaccatcacctgtagagccagccagagcatcagcagctacctgaactggtatcagcagaagcccggcaaggcccccaaactgctgatctacgccgtgtccacactccagagcggcgtgcccagcagattttctggcagcggctccggcaccgacttcaccctgacaatcagctccctccagcccgaggacttcgccacctactactgtcagcagagcggcaccttccctcccaccacatttggacagggcaccaaggtggaaatcaagagactcgaggacctgaagaacgtgttcccacctgaggtggccgtgttcgagcctagcgaggccgagatcagccacacccagaaagccaccctcgtgtgcctggctaccggcttctaccccgaccatgtggaactgtcttggtgggtcaacggcaaagaggtgcacagcggcgtgtgtaccgacccccagccactgaaagaacagcccgccctgaacgacagccggtactgcctgagcagcagactgagagtgtccgccaccttctggcagaacccccggaaccacttcagatgccaggtgcagttctacggcctgagcgagaacgacgagtggacccaggacagagccaagcccgtgacccagatcgtgtctgccgaagcctggggcagagccgattgcgacgtgaagctggtggaaaagagcttcgagacagacaccaacctgaacttccagaacctgagcgtgatcggcttcagaatcctgctgctgaaagtggccggctttaacctgctgatgaccctgcggctgtggtccagcagggccaagcgatctggatctggagcaacaaacttctcactactcaaacaagcaggtgacgtggaggagaatcccgggcctactagtatggactggatttggcgcatccttttccttgtcggcgctgctaccggcgcgcattccttcgaacaggtgcaactgctggaatctggcggcggactggtgcagcctggcggatctctgagactgagctgtgccgccagcggcttcaccttcagcagccacggaatgcactgggtgcgccaggcccctggaaagggactggaatgggtgtccgtgatctccggcagcggcagcaataccggctacgccgatagcgtgaagggccggttcaccatcagccgggacaacagcaagaacaccctgtacctccagatgaacagcctgcgggccgaggacaccgccgtgtactattgtgccagacagtggggcagctacgccttcgattcttggggccagggcaccctcgtgaccgtgtcatctacgcgtatccagaaccctgatcctgccgtgtaccagctgcgggatagcaagagcagcgacaagagcgtgtgtctgttcaccgacttcgacagccagaccaacgtgtcccagagcaaggactccgacgtgtacatcaccgataagtgcgtgctggacatgcggagcatggacttcaagagcaactccgccgtggcctggtccaacaagtccgatttcgcctgcgccaacgccttcaacaacagcattatccccgaggacacattcttcccaagccccgagagcagctgcggctttaccagcgagagctaccagcagggcgtgctgagcgccaccatcctgtacgagatcctgctgggcaaggccaccctgtacgccgtgctggtgtctgccctggtgctgatggctatggtcaagcggaaggacagccgggga

SEQ ID NO: 4296 - DNA, 2295 bp, synthetic construct
  source 1..2295: mol_type = other DNA
atggccttaccagtgaccgccttgctcctgccgctggccttgctgctccacgccgccaggccggaagtgcagctggttgaatctggcggaggactggttcagcctggcggatctctgagactgtcttgtgccgccagcggcttcagcttcagcgacttttggatgagctgggtccgacaggcccctggcaaaggacttgaatgggtcgccacaatcagccaggccggcagcgagaaggactacgtggactctgtgaagggcagattcaccatcagccgggacaacgccaagaagtccctgtacctccagatgaacagcctgagagccgaggacaccgccgtgtactattgtgcctctggcgtgtacagcttcgactacagaggccagggcaccctggtcacagtctcttctggtaccggcggaggcggatctggcggcggaggtagcggtggcggaggatctgaattcgacatcgtgatgagccagagccctagcagcctggccgtgtccgtgggcgagaaagtgaccatgagctgcaagagcagccagtccctgctgcacagcagcaaccagaagaactacctggcctggtatcagcagaagcccggccagtcccccaaggtgctgatctactgggccagcaccagagaaagcggcgtgcccgatagattcaccggcagcggctctggcaccgacttcaccctgaccatcaccagcgtgaagtccgaggacctggctgtgtactactgccagcagtattacagctacccctggaccttcggcggaggcacccggctggaaatcaaaagactcgaggacctgaagaacgtgttcccacctgaggtggccgtgttcgagcctagcgaggccgagatcagccacacccagaaagccaccctcgtgtgcctggctaccggcttctaccccgaccatgtggaactgtcttggtgggtcaacggcaaagaggtgcacagcggcgtgtgtaccgacccccagccactgaaagaacagcccgccctgaacgacagccggtactgcctgagcagcagactgagagtgtccgccaccttctggcagaacccccggaaccacttcagatgccaggtgcagttctacggcctgagcgagaacgacgagtggacccaggacagagccaagcccgtgacccagatcgtgtctgccgaagcctggggcagagccgattgcgacgtgaagctggtggaaaagagcttcgagacagacaccaacctgaacttccagaacctgagcgtgatcggcttcagaatcctgctgctgaaagtggccggctttaacctgctgatgaccctgcggctgtggtccagcagggccaagcgatctggatctggagcaacaaacttctcactactcaaacaagcaggtgacgtggaggagaatcccgggcctactagtatggactggatttggcgcatccttttccttgtcggcgctgctaccggcgcgcattccttcgaagaagtgcaactccagcagagcgtggccgagcttgtgaagcctggcgcttccgtgaagatgtcctgcaaggtgtccggctacaccctgacagaccacaccatccactggatgaagcagcggcctgagcagggcctggaatggatcggctacatctaccccagggacggcatcaccggctacaacgagaagttcaagggcaaggccacactgaccgccgacaccagcagcagcacagcctacatgcaactgaacagcctgaccagcgaggacagcgccgtgtacttctgtgccagatggggctacagctacagaaactacgcctactactacgactactggggccagggcacaaccctgaccgtgtctagtacgcgtatccagaaccctgatcctgccgtgtaccagctgcgggatagcaagagcagcgacaagagcgtgtgtctgttcaccgacttcgacagccagaccaacgtgtcccagagcaaggactccgacgtgtacatcaccgataagtgcgtgctggacatgcggagcatggacttcaagagcaactccgccgtggcctggtccaacaagtccgatttcgcctgcgccaacgccttcaacaacagcattatccccgaggacacattcttcccaagccccgagagcagctgcggctttaccagcgagagctaccagcagggcgtgctgagcgccaccatcctgtacgagatcctgctgggcaaggccaccctgtacgccgtgctggtgtctgccctggtgctgatggctatggtcaagcggaaggacagccgggga

SEQ ID NO: 4297 - DNA, 2286 bp, synthetic construct
  source 1..2286: mol_type = other DNA
atggccttaccagtgaccgccttgctcctgccgctggccttgctgctccacgccgccaggccggaagtgcagctggttgaatctggcggaggactggttcagcctggcggatctctgagactgtcttgtgccgccagcggcttcagcttcagcgacttttggatgagctgggtccgacaggcccctggcaaaggacttgaatgggtcgccacaatcagccaggccggcagcgagaaggactacgtggactctgtgaagggcagattcaccatcagccgggacaacgccaagaagtccctgtacctccagatgaacagcctgagagccgaggacaccgccgtgtactattgtgcctctggcgtgtacagcttcgactacagaggccagggcaccctggtcacagtctcttctggtaccggcggaggcggatctggcggcggaggtagcggtggcggaggatctgaattcgagatcgtgctgacacagagccctggcaccctgagcctgtctccaggcgaaagagccacactgagctgtcgggccagccagagcgtgtccagctcttacctggcctggtatcagcagaagcccggccaggctccccggctgctgatctacggaacaagcagcagagccaccggcatccccgacagattttctggcagcggctccggcaccgacttcaccctgacaatcagcagactggaacccgaggacttcgccgtgtactactgccagcagtacggcagcagccccttcacctttggcggaggcaccaaggtggaaatcaagagactcgaggacctgaagaacgtgttcccacctgaggtggccgtgttcgagcctagcgaggccgagatcagccacacccagaaagccaccctcgtgtgcctggctaccggcttctaccccgaccatgtggaactgtcttggtgggtcaacggcaaagaggtgcacagcggcgtgtgtaccgacccccagccactgaaagaacagcccgccctgaacgacagccggtactgcctgagcagcagactgagagtgtccgccaccttctggcagaacccccggaaccacttcagatgccaggtgcagttctacggcctgagcgagaacgacgagtggacccaggacagagccaagcccgtgacccagatcgtgtctgccgaagcctggggcagagccgattgcgacgtgaagctggtggaaaagagcttcgagacagacaccaacctgaacttccagaacctgagcgtgatcggcttcagaatcctgctgctgaaagtggccggctttaacctgctgatgaccctgcggctgtggtccagcagggccaagcgatctggatctggagcaacaaacttctcactactcaaacaagcaggtgacgtggaggagaatcccgggcctactagtatggactggatttggcgcatccttttccttgtcggcgctgctaccggcgcgcattccttcgaacaggtgcaactccaggaatctggccccggactggctaagcccagcgagacactgagcctgacctgtaccgtgtccggcgacagcatcaccagctactactggtcctggatcagacagccccctggcaagggcctggaatggatcggctacatctactacagcggcagcaccaactacaaccccagcctgaagtccagagtgaccatcagcgtggacaccagcaagaaccagttctccctgaagctgagcagcgtgacagccgccgacaccgccgtgtattattgcgccagagatcagcggagaatcgccgctgccggcacccacttttacggcatggatgtgtggggccagggcaccaccgtgaccgtgtcatctacgcgtatccagaaccctgatcctgccgtgtaccagctgcgggatagcaagagcagcgacaagagcgtgtgtctgttcaccgacttcgacagccagaccaacgtgtcccagagcaaggactccgacgtgtacatcaccgataagtgcgtgctggacatgcggagcatggacttcaagagcaactccgccgtggcctggtccaacaagtccgatttcgcctgcgccaacgccttcaacaacagcattatccccgaggacacattcttcccaagccccgagagcagctgcggctttaccagcgagagctaccagcagggcgtgctgagcgccaccatcctgtacgagatcctgctgggcaaggccaccctgtacgccgtgctggtgtctgccctggtgctgatggctatggtcaagcggaaggacagccgggga

SEQ ID NO: 4298 - DNA, 2262 bp, synthetic construct
  source 1..2262: mol_type = other DNA
atggccttaccagtgaccgccttgctcctgccgctggccttgctgctccacgccgccaggccggaagtgcagctggttgaatctggcggaggactggttcagcctggcggatctctgagactgtcttgtgccgccagcggcttcagcttcagcgacttttggatgagctgggtccgacaggcccctggcaaaggacttgaatgggtcgccacaatcagccaggccggcagcgagaaggactacgtggactctgtgaagggcagattcaccatcagccgggacaacgccaagaagtccctgtacctccagatgaacagcctgagagccgaggacaccgccgtgtactattgtgcctctggcgtgtacagcttcgactacagaggccagggcaccctggtcacagtctcttctggtaccggcggaggcggatctggcggcggaggtagcggtggcggaggatctgaattcgacatcctgctgacccagagccccgtgatcctgtccgtgtctcctggcgagagagtgtccttcagctgtcgggccagccagagcatcggcaccaacatccactggtatcagcagcggaccaacggcagccccagactgctgattaagtacgccagcgagtccatcagcggcatccccagcagattttccggcagcggctccggcaccgacttcaccctgagcatcaacagcgtggaaagcgaggacattgccgactactactgccagcagaacaacaactggcccaccaccttcggagccggcaccaagctggaactgaagctcgaggacctgaagaacgtgttcccacctgaggtggccgtgttcgagcctagcgaggccgagatcagccacacccagaaagccaccctcgtgtgcctggctaccggcttctaccccgaccatgtggaactgtcttggtgggtcaacggcaaagaggtgcacagcggcgtgtgtaccgacccccagccactgaaagaacagcccgccctgaacgacagccggtactgcctgagcagcagactgagagtgtccgccaccttctggcagaacccccggaaccacttcagatgccaggtgcagttctacggcctgagcgagaacgacgagtggacccaggacagagccaagcccgtgacccagatcgtgtctgccgaagcctggggcagagccgattgcgacgtgaagctggtggaaaagagcttcgagacagacaccaacctgaacttccagaacctgagcgtgatcggcttcagaatcctgctgctgaaagtggccggctttaacctgctgatgaccctgcggctgtggtccagcagggccaagcgatctggatctggagcaacaaacttctcactactcaaacaagcaggtgacgtggaggagaatcccgggcctactagtatggactggatttggcgcatccttttccttgtcggcgctgctaccggcgcgcattccttcgaacaggtgcagctgaagcagagcggacctggcctggtgcagcctagccagagcctgtccatcacctgtaccgtgtccggcttcagcctgaccaactacggcgtgcactgggtgcgccagagccctggaaaaggactggaatggctgggagtgatttggagcggcggcaacaccgactacaacacccccttcaccagcagactgtctatcaacaaggacaacagcaagagccaggtgttcttcaagatgaacagcctccagagcaacgacaccgccatctactactgtgctagagccctgacctactatgactacgagttcgcctactggggccagggcacactcgtgacagtgtctgctacgcgtatccagaaccctgatcctgccgtgtaccagctgcgggatagcaagagcagcgacaagagcgtgtgtctgttcaccgacttcgacagccagaccaacgtgtcccagagcaaggactccgacgtgtacatcaccgataagtgcgtgctggacatgcggagcatggacttcaagagcaactccgccgtggcctggtccaacaagtccgatttcgcctgcgccaacgccttcaacaacagcattatccccgaggacacattcttcccaagccccgagagcagctgcggctttaccagcgagagctaccagcagggcgtgctgagcgccaccatcctgtacgagatcctgctgggcaaggccaccctgtacgccgtgctggtgtctgccctggtgctgatggctatggtcaagcggaaggacagccgggga

SEQ ID NO: 4299 - DNA, 2241 bp, synthetic construct
  source 1..2241: mol_type = other DNA
atggccttaccagtgaccgccttgctcctgccgctggccttgctgctccacgccgccaggccggaagtgcagctggttgaatctggcggaggactggttcagcctggcggatctctgagactgtcttgtgccgccagcggcttcagcttcagcgacttttggatgagctgggtccgacaggcccctggcaaaggacttgaatgggtcgccacaatcagccaggccggcagcgagaaggactacgtggactctgtgaagggcagattcaccatcagccgggacaacgccaagaagtccctgtacctccagatgaacagcctgagagccgaggacaccgccgtgtactattgtgcctctggcgtgtacagcttcgactacagaggccagggcaccctggtcacagtctcttctggtaccggcggaggcggatctggcggcggaggtagcggtggcggaggatctgaattcatgacccagagccccaagttcctgctggtgtctgccggcgacagagtgaccctgacatgcaaggccagccagagcgtgaacaacgacgtgtactggtatcagcaggaacccggccagtcccccaagctgctgatctactgggccagcaccagagaaagcggcgtgcccgatagattcaccggcagcggctctggcaccgacttcaccctgacaatcagcagcgtgcaggccgaggacctggccgtgtactactgcaagcagagctacaacctgtacaccttcggcggaggcaccaagctggaaatcaagagactcgaggacctgaagaacgtgttcccacctgaggtggccgtgttcgagcctagcgaggccgagatcagccacacccagaaagccaccctcgtgtgcctggctaccggcttctaccccgaccatgtggaactgtcttggtgggtcaacggcaaagaggtgcacagcggcgtgtgtaccgacccccagccactgaaagaacagcccgccctgaacgacagccggtactgcctgagcagcagactgagagtgtccgccaccttctggcagaacccccggaaccacttcagatgccaggtgcagttctacggcctgagcgagaacgacgagtggacccaggacagagccaagcccgtgacccagatcgtgtctgccgaagcctggggcagagccgattgcgacgtgaagctggtggaaaagagcttcgagacagacaccaacctgaacttccagaacctgagcgtgatcggcttcagaatcctgctgctgaaagtggccggctttaacctgctgatgaccctgcggctgtggtccagcagggccaagcgatctggatctggagcaacaaacttctcactactcaaacaagcaggtgacgtggaggagaatcccgggcctactagtatggactggatttggcgcatccttttccttgtcggcgctgctaccggcgcgcattccttcgaagaatctggaagaggactggtgcagcctggcggcagcagaaagctgtcttgtgccgccagcggcttcaccttcagcaccagcggaatgcactgggtgcgccaggcccctgagaagggactggaatgggtggcctacatcagctccggcagcaccaccatctaccacgccgataccgtgaagggccggttcaccatcagccgggacaaccccaagaataccctgttcctccagatgaccagcctgcggagcgaggacaccgccatgtactattgctgcgccagaagcggccagttcggcaactacttcgactactggggccagggcaccaccctgaccgtgtcatctacgcgtatccagaaccctgatcctgccgtgtaccagctgcgggatagcaagagcagcgacaagagcgtgtgtctgttcaccgacttcgacagccagaccaacgtgtcccagagcaaggactccgacgtgtacatcaccgataagtgcgtgctggacatgcggagcatggacttcaagagcaactccgccgtggcctggtccaacaagtccgatttcgcctgcgccaacgccttcaacaacagcattatccccgaggacacattcttcccaagccccgagagcagctgcggctttaccagcgagagctaccagcagggcgtgctgagcgccaccatcctgtacgagatcctgctgggcaaggccaccctgtacgccgtgctggtgtctgccctggtgctgatggctatggtcaagcggaaggacagccgggga

SEQ ID NO: 4300 - DNA, 2256 bp, synthetic construct
  source 1..2256: mol_type = other DNA
atggccttaccagtgaccgccttgctcctgccgctggccttgctgctccacgccgccaggccggaagtgcagctggttgaatctggcggaggactggttcagcctggcggatctctgagactgtcttgtgccgccagcggcttcagcttcagcgacttttggatgagctgggtccgacaggcccctggcaaaggacttgaatgggtcgccacaatcagccaggccggcagcgagaaggactacgtggactctgtgaagggcagattcaccatcagccgggacaacgccaagaagtccctgtacctccagatgaacagcctgagagccgaggacaccgccgtgtactattgtgcctctggcgtgtacagcttcgactacagaggccagggcaccctggtcacagtctcttctggtaccggcggaggcggatctggcggcggaggtagcggtggcggaggatctgaattccagagcccatctagcctggctgtgtctgccggcgagaaagtgaccatgagctgcaagagcagccagagcctgctgaacagccggacccggaagaactacctggcctggtatcagcagaagcccggccagagccccaagctgctgatctactgggccagcaccagagaaagcggcgtgcccgatagattcaccggctctggcagcggcaccgacttcaccctgacaatcagcagcgtgcaggccgaggacctggccgtgtactactgcaagcagagcaacctgtacaccttcggcggaggcaccaagctggaaatcaagctcgaggacctgaagaacgtgttcccacctgaggtggccgtgttcgagcctagcgaggccgagatcagccacacccagaaagccaccctcgtgtgcctggctaccggcttctaccccgaccatgtggaactgtcttggtgggtcaacggcaaagaggtgcacagcggcgtgtgtaccgacccccagccactgaaagaacagcccgccctgaacgacagccggtactgcctgagcagcagactgagagtgtccgccaccttctggcagaacccccggaaccacttcagatgccaggtgcagttctacggcctgagcgagaacgacgagtggacccaggacagagccaagcccgtgacccagatcgtgtctgccgaagcctggggcagagccgattgcgacgtgaagctggtggaaaagagcttcgagacagacaccaacctgaacttccagaacctgagcgtgatcggcttcagaatcctgctgctgaaagtggccggctttaacctgctgatgaccctgcggctgtggtccagcagggccaagcgatctggatctggagcaacaaacttctcactactcaaacaagcaggtgacgtggaggagaatcccgggcctactagtatggactggatttggcgcatccttttccttgtcggcgctgctaccggcgcgcattccttcgaacaggtgcagctggaagagtctggacccgagcttgtgaagcctggggccagcgtgaagctgtcctgtaaagccagcggctacaccttcaccgagtacatcatccactgggtcaagcagcggagcggccagggcctggaatggatcggctggttttaccctggctccggcagcatcaagtacaacgagaagttcaaggacaaggccaccctgaccgccgacaagtccagcagcaccgtgtacatggaactgagcggcctgaccagcgaggacagcgccgtgtatttctgcgccagacacgacggctacagctacttcgactattggggccagggcaccacactgaccgtgtcctctacgcgtatccagaaccctgatcctgccgtgtaccagctgcgggatagcaagagcagcgacaagagcgtgtgtctgttcaccgacttcgacagccagaccaacgtgtcccagagcaaggactccgacgtgtacatcaccgataagtgcgtgctggacatgcggagcatggacttcaagagcaactccgccgtggcctggtccaacaagtccgatttcgcctgcgccaacgccttcaacaacagcattatccccgaggacacattcttcccaagccccgagagcagctgcggctttaccagcgagagctaccagcagggcgtgctgagcgccaccatcctgtacgagatcctgctgggcaaggccaccctgtacgccgtgctggtgtctgccctggtgctgatggctatggtcaagcggaaggacagccgggga

SEQ ID NO: 4301 - DNA, 2265 bp, synthetic construct
  source 1..2265: mol_type = other DNA
atggccttaccagtgaccgccttgctcctgccgctggccttgctgctccacgccgccaggccggaagtgcagctggttgaatctggcggaggactggttcagcctggcggatctctgagactgtcttgtgccgccagcggcttcagcttcagcgacttttggatgagctgggtccgacaggcccctggcaaaggacttgaatgggtcgccacaatcagccaggccggcagcgagaaggactacgtggactctgtgaagggcagattcaccatcagccgggacaacgccaagaagtccctgtacctccagatgaacagcctgagagccgaggacaccgccgtgtactattgtgcctctggcgtgtacagcttcgactacagaggccagggcaccctggtcacagtctcttctggtaccggcggaggcggatctggcggcggaggtagcggtggcggaggatctgaattcgacatccagatgacccagagccccagcagcctgtctgcctctctgggcgagagagtgtccctgacctgtcgggccacacaggaactgagcggctacctgtcttggctgcagcagaagcccgacggcaccatcaagcggctgatctacgccgccagcaccctggatagcggcgtgcccaagagattcagcggcaacagaagcggcagcgactacagcctgaccatcagctccctggaaagcgaggacttcgccgactactactgcctgcagtacgccatctacccctacaccttcggcggaggcaccaagctggaaatcaagctcgaggacctgaagaacgtgttcccacctgaggtggccgtgttcgagcctagcgaggccgagatcagccacacccagaaagccaccctcgtgtgcctggctaccggcttctaccccgaccatgtggaactgtcttggtgggtcaacggcaaagaggtgcacagcggcgtgtgtaccgacccccagccactgaaagaacagcccgccctgaacgacagccggtactgcctgagcagcagactgagagtgtccgccaccttctggcagaacccccggaaccacttcagatgccaggtgcagttctacggcctgagcgagaacgacgagtggacccaggacagagccaagcccgtgacccagatcgtgtctgccgaagcctggggcagagccgattgcgacgtgaagctggtggaaaagagcttcgagacagacaccaacctgaacttccagaacctgagcgtgatcggcttcagaatcctgctgctgaaagtggccggctttaacctgctgatgaccctgcggctgtggtccagcagggccaagcgatctggatctggagcaacaaacttctcactactcaaacaagcaggtgacgtggaggagaatcccgggcctactagtatggactggatttggcgcatccttttccttgtcggcgctgctaccggcgcgcattccttcgaagaggtgcaactgcagcagtctggccccgagcttgtgaagcctggcgcctccgtgaagatgagctgcaaggccagcggctacacctttaccagctacttcatccactgggtcaagcagaaacccggccagggcctggaatggatcggcttcatcaacccttacaacgacggcagcaagtacaacgagaagttcaagggcaaggccaccctgaccagcgacaagagcagcagcaccgcctacatggaactgtccagcctgacatccgaggacagcgccgtgtactactgcaccagggacgacggctactacggctacgccatggactactggggccagggaacaagcgtcaccgtgtcctctacgcgtatccagaaccctgatcctgccgtgtaccagctgcgggatagcaagagcagcgacaagagcgtgtgtctgttcaccgacttcgacagccagaccaacgtgtcccagagcaaggactccgacgtgtacatcaccgataagtgcgtgctggacatgcggagcatggacttcaagagcaactccgccgtggcctggtccaacaagtccgatttcgcctgcgccaacgccttcaacaacagcattatccccgaggacacattcttcccaagccccgagagcagctgcggctttaccagcgagagctaccagcagggcgtgctgagcgccaccatcctgtacgagatcctgctgggcaaggccaccctgtacgccgtgctggtgtctgccctggtgctgatggctatggtcaagcggaaggacagccgggga

SEQ ID NO: 4302 - DNA, 2280 bp, synthetic construct
  source 1..2280: mol_type = other DNA
atggccttaccagtgaccgccttgctcctgccgctggccttgctgctccacgccgccaggccggaagtgcagctggttgaatctggcggaggactggttcagcctggcggatctctgagactgtcttgtgccgccagcggcttcagcttcagcgacttttggatgagctgggtccgacaggcccctggcaaaggacttgaatgggtcgccacaatcagccaggccggcagcgagaaggactacgtggactctgtgaagggcagattcaccatcagccgggacaacgccaagaagtccctgtacctccagatgaacagcctgagagccgaggacaccgccgtgtactattgtgcctctggcgtgtacagcttcgactacagaggccagggcaccctggtcacagtctcttctggtaccggcggaggcggatctggcggcggaggtagcggtggcggaggatctgaattcgacaccatcgtgctgacacagagccctgcttccctggccgtgtccctgggacagagagccaccatctcttgcagagccagcgagagcgtggacagctacggcaacagcttcatgcactggtatcagcagaagcccggccagccccccaagctgctgatctacctggcctccaacctggaaagcggcgtgcccgccagattttctggcagcggcagcagaaccgacttcaccctgaccatcgaccccgtggaagccgatgatgccgccacctactactgccagcagaacaactacgacccctggaccttcggcggaggcaccaagctggaaatcaagctcgaggacctgaagaacgtgttcccacctgaggtggccgtgttcgagcctagcgaggccgagatcagccacacccagaaagccaccctcgtgtgcctggctaccggcttctaccccgaccatgtggaactgtcttggtgggtcaacggcaaagaggtgcacagcggcgtgtgtaccgacccccagccactgaaagaacagcccgccctgaacgacagccggtactgcctgagcagcagactgagagtgtccgccaccttctggcagaacccccggaaccacttcagatgccaggtgcagttctacggcctgagcgagaacgacgagtggacccaggacagagccaagcccgtgacccagatcgtgtctgccgaagcctggggcagagccgattgcgacgtgaagctggtggaaaagagcttcgagacagacaccaacctgaacttccagaacctgagcgtgatcggcttcagaatcctgctgctgaaagtggccggctttaacctgctgatgaccctgcggctgtggtccagcagggccaagcgatctggatctggagcaacaaacttctcactactcaaacaagcaggtgacgtggaggagaatcccgggcctactagtatggactggatttggcgcatccttttccttgtcggcgctgctaccggcgcgcattccttcgaagaagtgcaactccagcagagcggccctgagcttgtgaagcctggcgcttccgtgaagatgagctgcaaggccagcggctacaccttcaccagctacgtgatgcactgggtcaagcagaaacctggacagggcctggaatggatcggctacatcaacccctacaacgacggcaccaagtacaacgagaagttcaagggcaaggccaccctgacaagcgacaccagcagcagcaccgcctacatggaactgaacagcctgaccagcgaggacagcgccgtgtacttctgcgccagacccatctacttcgacaacgactacttcgattactggggccagggcaccaccctgaaggtgtcctctacgcgtatccagaaccctgatcctgccgtgtaccagctgcgggatagcaagagcagcgacaagagcgtgtgtctgttcaccgacttcgacagccagaccaacgtgtcccagagcaaggactccgacgtgtacatcaccgataagtgcgtgctggacatgcggagcatggacttcaagagcaactccgccgtggcctggtccaacaagtccgatttcgcctgcgccaacgccttcaacaacagcattatccccgaggacacattcttcccaagccccgagagcagctgcggctttaccagcgagagctaccagcagggcgtgctgagcgccaccatcctgtacgagatcctgctgggcaaggccaccctgtacgccgtgctggtgtctgccctggtgctgatggctatggtcaagcggaaggacagccgggga

SEQ ID NO: 4303 - DNA, 2265 bp, synthetic construct
  source 1..2265: mol_type = other DNA
atggccttaccagtgaccgccttgctcctgccgctggccttgctgctccacgccgccaggccggaagtgcagctggttgaatctggcggaggactggttcagcctggcggatctctgagactgtcttgtgccgccagcggcttcagcttcagcgacttttggatgagctgggtccgacaggcccctggcaaaggacttgaatgggtcgccacaatcagccaggccggcagcgagaaggactacgtggactctgtgaagggcagattcaccatcagccgggacaacgccaagaagtccctgtacctccagatgaacagcctgagagccgaggacaccgccgtgtactattgtgcctctggcgtgtacagcttcgactacagaggccagggcaccctggtcacagtctcttctggtaccggcggaggcggatctggcggcggaggtagcggtggcggaggatctgaattcgacatccagatgacccagagccccagcagcctgtctgccagcgtgggcgacagagtgaccatcacatgcaaggccagccaggacgtgggaatcgccgtggcctggtatcagcagaaacccggcaaggtgcccaagctgctgatctactgggccagcaccagacacaccggcgtgcccgatagattttccggcagcggctccggcaccgacttcaccctgacaatcagctccctccagcccgaggacgtggcaacctactactgccagcagtacagcagctacccctacaccttcggccagggcaccaaggtggaaatcaagagactcgaggacctgaagaacgtgttcccacctgaggtggccgtgttcgagcctagcgaggccgagatcagccacacccagaaagccaccctcgtgtgcctggctaccggcttctaccccgaccatgtggaactgtcttggtgggtcaacggcaaagaggtgcacagcggcgtgtgtaccgacccccagccactgaaagaacagcccgccctgaacgacagccggtactgcctgagcagcagactgagagtgtccgccaccttctggcagaacccccggaaccacttcagatgccaggtgcagttctacggcctgagcgagaacgacgagtggacccaggacagagccaagcccgtgacccagatcgtgtctgccgaagcctggggcagagccgattgcgacgtgaagctggtggaaaagagcttcgagacagacaccaacctgaacttccagaacctgagcgtgatcggcttcagaatcctgctgctgaaagtggccggctttaacctgctgatgaccctgcggctgtggtccagcagggccaagcgatctggatctggagcaacaaacttctcactactcaaacaagcaggtgacgtggaggagaatcccgggcctactagtatggactggatttggcgcatccttttccttgtcggcgctgctaccggcgcgcattccttcgaagaagtgcaactggtggaatcaggcggcggactggtgcagcctggcggatctctgagactgagctgtgccgccagcggcttcgacttcagccggtactggatgagctgggtgcgccaggcccctggcaaaggactggaatggatcggcgagatcaaccccgacagcagcaccatcaactacgcccccagcctgaaggacaagttcatcatcagccgggacaacgccaagaacagcctgtacctccagatgaactccctgcgggccgaggacaccgccgtgtactattgcgccagacccgacggcaactactggtacttcgacgtgtggggccagggaaccctcgtgaccgtgtcatctacgcgtatccagaaccctgatcctgccgtgtaccagctgcgggatagcaagagcagcgacaagagcgtgtgtctgttcaccgacttcgacagccagaccaacgtgtcccagagcaaggactccgacgtgtacatcaccgataagtgcgtgctggacatgcggagcatggacttcaagagcaactccgccgtggcctggtccaacaagtccgatttcgcctgcgccaacgccttcaacaacagcattatccccgaggacacattcttcccaagccccgagagcagctgcggctttaccagcgagagctaccagcagggcgtgctgagcgccaccatcctgtacgagatcctgctgggcaaggccaccctgtacgccgtgctggtgtctgccctggtgctgatggctatggtcaagcggaaggacagccgggga

SEQ ID NO: 4304 - DNA, 2265 bp, synthetic construct
  source 1..2265: mol_type = other DNA
atggccttaccagtgaccgccttgctcctgccgctggccttgctgctccacgccgccaggccggaagtgcagctggttgaatctggcggaggactggttcagcctggcggatctctgagactgtcttgtgccgccagcggcttcagcttcagcgacttttggatgagctgggtccgacaggcccctggcaaaggacttgaatgggtcgccacaatcagccaggccggcagcgagaaggactacgtggactctgtgaagggcagattcaccatcagccgggacaacgccaagaagtccctgtacctccagatgaacagcctgagagccgaggacaccgccgtgtactattgtgcctctggcgtgtacagcttcgactacagaggccagggcaccctggtcacagtctcttctggtaccggcggaggcggatctggcggcggaggtagcggtggcggaggatctgaattcgacatcgtgatgacccagagccagaagagcatgagcaccagcgtgggcgacagagtgagcatcacctgcaaggccagccaggacgtgatcaccggcgtggcctggtaccagcagaagcccggccagagccccaagctgctgatctacagcgccagctacagatacaccggcgtgcccgacagattcaccggcagcggcagcggcaccgacttcaccttcaccatcagcaacgtgcaggccgaggacctggccgtgtactactgccagcagcactacagcacccccctgaccttcggcgccggcaccaagctggagctgaagctcgaggacctgaagaacgtgttcccacctgaggtggccgtgttcgagcctagcgaggccgagatcagccacacccagaaagccaccctcgtgtgcctggctaccggcttctaccccgaccatgtggaactgtcttggtgggtcaacggcaaagaggtgcacagcggcgtgtgtaccgacccccagccactgaaagaacagcccgccctgaacgacagccggtactgcctgagcagcagactgagagtgtccgccaccttctggcagaacccccggaaccacttcagatgccaggtgcagttctacggcctgagcgagaacgacgagtggacccaggacagagccaagcccgtgacccagatcgtgtctgccgaagcctggggcagagccgattgcgacgtgaagctggtggaaaagagcttcgagacagacaccaacctgaacttccagaacctgagcgtgatcggcttcagaatcctgctgctgaaagtggccggctttaacctgctgatgaccctgcggctgtggtccagcagggccaagcgatctggatctggagcaacaaacttctcactactcaaacaagcaggtgacgtggaggagaatcccgggcctactagtatggactggatttggcgcatccttttccttgtcggcgctgctaccggcgcgcattccttcgaacaggtgcagctgcagcagcccggcgccgagctggtgagacccggcgccagcgtgaagctgagctgcaaggccagcggctacagcttcaccacctactggatgaactgggtgaagcagagacccggccagggcctggagtggatcggcatgatccaccccagcgacagcgagaccagactgaaccagaagttcaaggacaaggccaccctgaccgtggacaagagcagcagcaccgcctacatgcagctgagcagccccaccagcgaggacagcgccgtgtactactgcgccagaagcaccatgatcgccaccagagccatggactactggggccagggcaccagcgtgaccgtgagcagcacgcgtatccagaaccctgatcctgccgtgtaccagctgcgggatagcaagagcagcgacaagagcgtgtgtctgttcaccgacttcgacagccagaccaacgtgtcccagagcaaggactccgacgtgtacatcaccgataagtgcgtgctggacatgcggagcatggacttcaagagcaactccgccgtggcctggtccaacaagtccgatttcgcctgcgccaacgccttcaacaacagcattatccccgaggacacattcttcccaagccccgagagcagctgcggctttaccagcgagagctaccagcagggcgtgctgagcgccaccatcctgtacgagatcctgctgggcaaggccaccctgtacgccgtgctggtgtctgccctggtgctgatggctatggtcaagcggaaggacagccgggga

SEQ ID NO: 4305 - DNA, 2283 bp, synthetic construct
  source 1..2283: mol_type = other DNA
atggccttaccagtgaccgccttgctcctgccgctggccttgctgctccacgccgccaggccggaagtgcagctggttgaatctggcggaggactggttcagcctggcggatctctgagactgtcttgtgccgccagcggcttcagcttcagcgacttttggatgagctgggtccgacaggcccctggcaaaggacttgaatgggtcgccacaatcagccaggccggcagcgagaaggactacgtggactctgtgaagggcagattcaccatcagccgggacaacgccaagaagtccctgtacctccagatgaacagcctgagagccgaggacaccgccgtgtactattgtgcctctggcgtgtacagcttcgactacagaggccagggcaccctggtcacagtctcttctggtaccggcggaggcggatctggcggcggaggtagcggtggcggaggatctgaattccagagcgtgctgacacagcctccatccgtgtctggcgctccaggccagagagtgaccatctcctgtaccggcagcggcagcaacatcggagccccctacgacgtgtcctggtatcagcaactgcctggcaccgcccccaagctgctgatctaccacaacaacaagcggcccagcggcgtgcccgatagattcagcggctctaagagcggcaccagcgccagcctggctatcactggactccaggccgaggacgaggccgactactactgtgccacagtggaagccggcctgagcggctctgtgtttggcggcggaacaaagctgaccgtgctgggagctctcgaggacctgaagaacgtgttcccacctgaggtggccgtgttcgagcctagcgaggccgagatcagccacacccagaaagccaccctcgtgtgcctggctaccggcttctaccccgaccatgtggaactgtcttggtgggtcaacggcaaagaggtgcacagcggcgtgtgtaccgacccccagccactgaaagaacagcccgccctgaacgacagccggtactgcctgagcagcagactgagagtgtccgccaccttctggcagaacccccggaaccacttcagatgccaggtgcagttctacggcctgagcgagaacgacgagtggacccaggacagagccaagcccgtgacccagatcgtgtctgccgaagcctggggcagagccgattgcgacgtgaagctggtggaaaagagcttcgagacagacaccaacctgaacttccagaacctgagcgtgatcggcttcagaatcctgctgctgaaagtggccggctttaacctgctgatgaccctgcggctgtggtccagcagggccaagcgatctggatctggagcaacaaacttctcactactcaaacaagcaggtgacgtggaggagaatcccgggcctactagtatggactggatttggcgcatccttttccttgtcggcgctgctaccggcgcgcattccttcgaacaggtgcaactggtgcagagcggagccgaagtgaagaaacctggggccagcgtgaaggtgtcctgcaaggtgtccggctacaccctgaccgagctgagcattcactgggtgcgccaggcccctggcaagggactggaatggatgggcggcttcgaccccgaagagaacgagatcgtgtacgcccagcggttccagggcagagtgacaatgaccgaggacaccagcaccgacaccgcctacatggaactgagcagcctgcggagcgaggataccgccgtgtactactgcgccatcgtgggcagcttcagccctctgacactgggcctgtggggccagggaactatggtcaccgtgtccagcacgcgtatccagaaccctgatcctgccgtgtaccagctgcgggatagcaagagcagcgacaagagcgtgtgtctgttcaccgacttcgacagccagaccaacgtgtcccagagcaaggactccgacgtgtacatcaccgataagtgcgtgctggacatgcggagcatggacttcaagagcaactccgccgtggcctggtccaacaagtccgatttcgcctgcgccaacgccttcaacaacagcattatccccgaggacacattcttcccaagccccgagagcagctgcggctttaccagcgagagctaccagcagggcgtgctgagcgccaccatcctgtacgagatcctgctgggcaaggccaccctgtacgccgtgctggtgtctgccctggtgctgatggctatggtcaagcggaaggacagccgggga

SEQ ID NO: 4306 - DNA, 2283 bp, synthetic construct
  source 1..2283: mol_type = other DNA
atggccttaccagtgaccgccttgctcctgccgctggccttgctgctccacgccgccaggccggaagtgcagctggttgaatctggcggaggactggttcagcctggcggatctctgagactgtcttgtgccgccagcggcttcagcttcagcgacttttggatgagctgggtccgacaggcccctggcaaaggacttgaatgggtcgccacaatcagccaggccggcagcgagaaggactacgtggactctgtgaagggcagattcaccatcagccgggacaacgccaagaagtccctgtacctccagatgaacagcctgagagccgaggacaccgccgtgtactattgtgcctctggcgtgtacagcttcgactacagaggccagggcaccctggtcacagtctcttctggtaccggcggaggcggatctggcggcggaggtagcggtggcggaggatctgaattccagagcgtgctgacacagcctccatccgtgtctggcgctccaggccagagagtgaccatctcctgtaccggcagcggcagcaacatcggagccccctacgacgtgtcctggtatcagcaactgcctggcaccgcccccaagctgctgatctaccacaacaacaagcggcccagcggcgtgcccgatagattcagcggctctaagagcggcaccagcgccagcctggctatcactggactccaggccgaggacgaggccgactactactgccagagctacgacagcagcagcatcagcaccatcttcggcggaggcaccaagctgacagtgctgggagctctcgaggacctgaagaacgtgttcccacctgaggtggccgtgttcgagcctagcgaggccgagatcagccacacccagaaagccaccctcgtgtgcctggctaccggcttctaccccgaccatgtggaactgtcttggtgggtcaacggcaaagaggtgcacagcggcgtgtgtaccgacccccagccactgaaagaacagcccgccctgaacgacagccggtactgcctgagcagcagactgagagtgtccgccaccttctggcagaacccccggaaccacttcagatgccaggtgcagttctacggcctgagcgagaacgacgagtggacccaggacagagccaagcccgtgacccagatcgtgtctgccgaagcctggggcagagccgattgcgacgtgaagctggtggaaaagagcttcgagacagacaccaacctgaacttccagaacctgagcgtgatcggcttcagaatcctgctgctgaaagtggccggctttaacctgctgatgaccctgcggctgtggtccagcagggccaagcgatctggatctggagcaacaaacttctcactactcaaacaagcaggtgacgtggaggagaatcccgggcctactagtatggactggatttggcgcatccttttccttgtcggcgctgctaccggcgcgcattccttcgaacaggtgcaactggtgcagagcggagccgaagtgaagaaacctggggccagcgtgaaggtgtcctgcaaggtgtccggctacaccctgaccgagctgagcattcactgggtgcgccaggcccctggcaagggactggaatggatgggcggcttcgaccccgaagagaacgagatcgtgtacgcccagcggttccagggcagagtgacaatgaccgaggacaccagcaccgacaccgcctacatggaactgagcagcctgcggagcgaggataccgccgtgtactactgtgccatcgtgggcagcttcagcggaatcgcctacagaccttggggccagggcacaatggtcaccgtgtctagcacgcgtatccagaaccctgatcctgccgtgtaccagctgcgggatagcaagagcagcgacaagagcgtgtgtctgttcaccgacttcgacagccagaccaacgtgtcccagagcaaggactccgacgtgtacatcaccgataagtgcgtgctggacatgcggagcatggacttcaagagcaactccgccgtggcctggtccaacaagtccgatttcgcctgcgccaacgccttcaacaacagcattatccccgaggacacattcttcccaagccccgagagcagctgcggctttaccagcgagagctaccagcagggcgtgctgagcgccaccatcctgtacgagatcctgctgggcaaggccaccctgtacgccgtgctggtgtctgccctggtgctgatggctatggtcaagcggaaggacagccgggga

SEQ ID NO: 4307 - DNA, 2247 bp, synthetic construct
  source 1..2247: mol_type = other DNA
atggccttaccagtgaccgccttgctcctgccgctggccttgctgctccacgccgccaggccggaagtgcagctggttgaatctggcggaggactggttcagcctggcggatctctgagactgtcttgtgccgccagcggcttcagcttcagcgacttttggatgagctgggtccgacaggcccctggcaaaggacttgaatgggtcgccacaatcagccaggccggcagcgagaaggactacgtggactctgtgaagggcagattcaccatcagccgggacaacgccaagaagtccctgtacctccagatgaacagcctgagagccgaggacaccgccgtgtactattgtgcctctggcgtgtacagcttcgactacagaggccagggcaccctggtcacagtctcttctggtaccggcggaggcggatctggcggcggaggtagcggtggcggaggatctgaattcgacatccagatgacccagagccccagcagcctgtctgccagcgtgggcgacagagtgaccatcacctgtagagccagccagggcatcagaaacaacctggcctggtatcagcagaagcccggcaaggcccccaagcggctgatctacgccgccagcaatctccagagcggcgtgcccagcagattcacaggctctggcagcggcaccgagttcaccctgatcgtgtctagcctccagcccgaggacttcgccacctactactgcctccagcaccacagctaccccctgacatctggcggaggcaccaaggtggaactcgaggacctgaagaacgtgttcccacctgaggtggccgtgttcgagcctagcgaggccgagatcagccacacccagaaagccaccctcgtgtgcctggctaccggcttctaccccgaccatgtggaactgtcttggtgggtcaacggcaaagaggtgcacagcggcgtgtgtaccgacccccagccactgaaagaacagcccgccctgaacgacagccggtactgcctgagcagcagactgagagtgtccgccaccttctggcagaacccccggaaccacttcagatgccaggtgcagttctacggcctgagcgagaacgacgagtggacccaggacagagccaagcccgtgacccagatcgtgtctgccgaagcctggggcagagccgattgcgacgtgaagctggtggaaaagagcttcgagacagacaccaacctgaacttccagaacctgagcgtgatcggcttcagaatcctgctgctgaaagtggccggctttaacctgctgatgaccctgcggctgtggtccagcagggccaagcgatctggatctggagcaacaaacttctcactactcaaacaagcaggtgacgtggaggagaatcccgggcctactagtatggactggatttggcgcatccttttccttgtcggcgctgctaccggcgcgcattccttcgaagaggtgcaggtgctggaaagtggcggaggactggtgcagcctggcggctctctgagactgtcttgtgccgccagcggcttcaccttcagcagctacgccatgagctgggtgcgccaggcccctggaaaaggactggaatgggtgtccgccatcagcggctctggcgggtctaccaactacgccgatagcgtgaagggccggttcaccatcagccgggacaacagcaagaacaccctgtacctccagatgaacagcctgcgggccgaggacaccgccgtgtattattgtgccggcagcagcgggtggagcgagtattggggacagggcaccctcgtgaccgtgtcctctacgcgtatccagaaccctgatcctgccgtgtaccagctgcgggatagcaagagcagcgacaagagcgtgtgtctgttcaccgacttcgacagccagaccaacgtgtcccagagcaaggactccgacgtgtacatcaccgataagtgcgtgctggacatgcggagcatggacttcaagagcaactccgccgtggcctggtccaacaagtccgatttcgcctgcgccaacgccttcaacaacagcattatccccgaggacacattcttcccaagccccgagagcagctgcggctttaccagcgagagctaccagcagggcgtgctgagcgccaccatcctgtacgagatcctgctgggcaaggccaccctgtacgccgtgctggtgtctgccctggtgctgatggctatggtcaagcggaaggacagccgggga

SEQ ID NO: 4308 - DNA, 2265 bp, synthetic construct
  source 1..2265: mol_type = other DNA
atggccttaccagtgaccgccttgctcctgccgctggccttgctgctccacgccgccaggccggaagtgcagctggttgaatctggcggaggactggttcagcctggcggatctctgagactgtcttgtgccgccagcggcttcagcttcagcgacttttggatgagctgggtccgacaggcccctggcaaaggacttgaatgggtcgccacaatcagccaggccggcagcgagaaggactacgtggactctgtgaagggcagattcaccatcagccgggacaacgccaagaagtccctgtacctccagatgaacagcctgagagccgaggacaccgccgtgtactattgtgcctctggcgtgtacagcttcgactacagaggccagggcaccctggtcacagtctcttctggtaccggcggaggcggatctggcggcggaggtagcggtggcggaggatctgaattcgacgagatccagctggtgcagagcggagccgaagtgaagaagcctggcgagagcctgcggatcagctgcaagggcagcggcttcaacatcgaggactactacatccactgggtgcgccagatgcccggcaagggcctggaatggatgggcagaatcgaccccgagaacgacgagactaagtacggccccatcttccagggccacgtgaccatcagcgccgacaccagcatcaacaccgtgtacctccagtggtccagcctgaaggccagcgacaccgccatgtactactgcgcctttagaggcggcgtgtactggggccagggcaccacagtgacagtgtctagcctcgaggacctgaagaacgtgttcccacctgaggtggccgtgttcgagcctagcgaggccgagatcagccacacccagaaagccaccctcgtgtgcctggctaccggcttctaccccgaccatgtggaactgtcttggtgggtcaacggcaaagaggtgcacagcggcgtgtgtaccgacccccagccactgaaagaacagcccgccctgaacgacagccggtactgcctgagcagcagactgagagtgtccgccaccttctggcagaacccccggaaccacttcagatgccaggtgcagttctacggcctgagcgagaacgacgagtggacccaggacagagccaagcccgtgacccagatcgtgtctgccgaagcctggggcagagccgattgcgacgtgaagctggtggaaaagagcttcgagacagacaccaacctgaacttccagaacctgagcgtgatcggcttcagaatcctgctgctgaaagtggccggctttaacctgctgatgaccctgcggctgtggtccagcagggccaagcgatctggatctggagcaacaaacttctcactactcaaacaagcaggtgacgtggaggagaatcccgggcctactagtatggactggatttggcgcatccttttccttgtcggcgctgctaccggcgcgcattccttcgaagatgtcgtgatgacccagagccccgacagcctggctgtgtctctgggagagagagccaccatcaactgcaagtccagccagtccctgctggacagcgacggcaagacctacctgaactggctccagcagaagcccggccagccccccaagagactgatctccctggtgtccaagctggactccggcgtgcccgatagattttccggctctggcagcggcaccgacttcaccctgacaatcagctcccttcaggccgaggacgtggccgtgtactattgctggcagggcacacacttccccggcacctttggcggaggcaccaaggtggaaatcaagacgcgtatccagaaccctgatcctgccgtgtaccagctgcgggatagcaagagcagcgacaagagcgtgtgtctgttcaccgacttcgacagccagaccaacgtgtcccagagcaaggactccgacgtgtacatcaccgataagtgcgtgctggacatgcggagcatggacttcaagagcaactccgccgtggcctggtccaacaagtccgatttcgcctgcgccaacgccttcaacaacagcattatccccgaggacacattcttcccaagccccgagagcagctgcggctttaccagcgagagctaccagcagggcgtgctgagcgccaccatcctgtacgagatcctgctgggcaaggccaccctgtacgccgtgctggtgtctgccctggtgctgatggctatggtcaagcggaaggacagccgggga

SEQ ID NO: 4309 - DNA, 2286 bp, synthetic construct
  source 1..2286: mol_type = other DNA
atggccttaccagtgaccgccttgctcctgccgctggccttgctgctccacgccgccaggccggaagtgcagctggttgaatctggcggaggactggttcagcctggcggatctctgagactgtcttgtgccgccagcggcttcagcttcagcgacttttggatgagctgggtccgacaggcccctggcaaaggacttgaatgggtcgccacaatcagccaggccggcagcgagaaggactacgtggactctgtgaagggcagattcaccatcagccgggacaacgccaagaagtccctgtacctccagatgaacagcctgagagccgaggacaccgccgtgtactattgtgcctctggcgtgtacagcttcgactacagaggccagggcaccctggtcacagtctcttctggtaccggcggaggcggatctggcggcggaggtagcggtggcggaggatctgaattcgacgagcttgtgatgacccagagccccagcagcctgacagtgacagccggcgagaaagtgaccatgagctgcaagagcagccagagcctgctgaacagcggcaaccagaagaactacctgacctggtatcagcagaagcccggccagccccccaagctgctgatctactgggccagcaccagagaaagcggcgtgcccgatagattcaccggctctggcagcggcaccgacttcaccctgacaatcagcagcgtgcaggccgaggacctggccgtgtactactgccagaacgactacagctaccccctgaccttcggagccggcaccaagctggaaatcaagctcgaggacctgaagaacgtgttcccacctgaggtggccgtgttcgagcctagcgaggccgagatcagccacacccagaaagccaccctcgtgtgcctggctaccggcttctaccccgaccatgtggaactgtcttggtgggtcaacggcaaagaggtgcacagcggcgtgtgtaccgacccccagccactgaaagaacagcccgccctgaacgacagccggtactgcctgagcagcagactgagagtgtccgccaccttctggcagaacccccggaaccacttcagatgccaggtgcagttctacggcctgagcgagaacgacgagtggacccaggacagagccaagcccgtgacccagatcgtgtctgccgaagcctggggcagagccgattgcgacgtgaagctggtggaaaagagcttcgagacagacaccaacctgaacttccagaacctgagcgtgatcggcttcagaatcctgctgctgaaagtggccggctttaacctgctgatgaccctgcggctgtggtccagcagggccaagcgatctggatctggagcaacaaacttctcactactcaaacaagcaggtgacgtggaggagaatcccgggcctactagtatggactggatttggcgcatccttttccttgtcggcgctgctaccggcgcgcattccttcgaagaagtgcagctgctggaacagtctggcgccgaacttgtgcggcctggcaccagcgtgaagatcagctgtaaagccagcggctacgccttcaccaactactggctgggctgggtcaagcagaggcctggacacggcctggaatggatcggcgacatctttcccggctccggcaacatccactacaacgagaagttcaagggcaaggccaccctgaccgccgacaagtctagcagcaccgcctacatgcagctgtccagcctgacctttgaggacagcgccgtgtatttctgtgcccggctgcggaactgggacgagcccatggattattggggccagggcaccaccgtgaccgtgtctagtacgcgtatccagaaccctgatcctgccgtgtaccagctgcgggatagcaagagcagcgacaagagcgtgtgtctgttcaccgacttcgacagccagaccaacgtgtcccagagcaaggactccgacgtgtacatcaccgataagtgcgtgctggacatgcggagcatggacttcaagagcaactccgccgtggcctggtccaacaagtccgatttcgcctgcgccaacgccttcaacaacagcattatccccgaggacacattcttcccaagccccgagagcagctgcggctttaccagcgagagctaccagcagggcgtgctgagcgccaccatcctgtacgagatcctgctgggcaaggccaccctgtacgccgtgctggtgtctgccctggtgctgatggctatggtcaagcggaaggacagccgggga

SEQ ID NO: 4310 - DNA, 2289 bp, synthetic construct
  source 1..2289: mol_type = other DNA
atggccttaccagtgaccgccttgctcctgccgctggccttgctgctccacgccgccaggccggaagtgcagctggttgaatctggcggaggactggttcagcctggcggatctctgagactgtcttgtgccgccagcggcttcagcttcagcgacttttggatgagctgggtccgacaggcccctggcaaaggacttgaatgggtcgccacaatcagccaggccggcagcgagaaggactacgtggactctgtgaagggcagattcaccatcagccgggacaacgccaagaagtccctgtacctccagatgaacagcctgagagccgaggacaccgccgtgtactattgtgcctctggcgtgtacagcttcgactacagaggccagggcaccctggtcacagtctcttctggtaccggcggaggcggatctggcggcggaggtagcggtggcggaggatctgaattcgacgagctgcagatgacccagagccctagcagcctgtctgccagcgtgggcgacagagtgaccatcacctgtagagccagccagagcatcagcagctacctgaactggtatcagcagaagcccggccagccccccaaactgctgatctactgggccagcaccagagaaagcggcgtgcccgatagattcagcggcagcgagagcggcaccaactacaccctgaccatcagctccctgcagcccgaggacttcgccacctacttttgccagcagagcgacagcctgcccatcacctttggacagggcacccggctggacattcagctcgaggacctgaagaacgtgttcccacctgaggtggccgtgttcgagcctagcgaggccgagatcagccacacccagaaagccaccctcgtgtgcctggctaccggcttctaccccgaccatgtggaactgtcttggtgggtcaacggcaaagaggtgcacagcggcgtgtgtaccgacccccagccactgaaagaacagcccgccctgaacgacagccggtactgcctgagcagcagactgagagtgtccgccaccttctggcagaacccccggaaccacttcagatgccaggtgcagttctacggcctgagcgagaacgacgagtggacccaggacagagccaagcccgtgacccagatcgtgtctgccgaagcctggggcagagccgattgcgacgtgaagctggtggaaaagagcttcgagacagacaccaacctgaacttccagaacctgagcgtgatcggcttcagaatcctgctgctgaaagtggccggctttaacctgctgatgaccctgcggctgtggtccagcagggccaagcgatctggatctggagcaacaaacttctcactactcaaacaagcaggtgacgtggaggagaatcccgggcctactagtatggactggatttggcgcatccttttccttgtcggcgctgctaccggcgcgcattccttcgaagaggtgcaactgctggaatctgggggcggagtggtgcagcctggcagaagcctgagactgagctgtgccgccagcggcttcaccttcagctcctacggaatgcactgggtgcgccaggcccctggcaaaggactggaatgggtggccgtgatctcctacgacggcagcaacaagtactacgccgacagcgtgaagggccggttcaccatcagccgggacaacagcaagaacaccctgtacctgcagatgaacagcctgcgggccgaggacaccgccgtgtactactgcgccaaggatatgggctggggcagcggctggcggccttactactactacggcatggacgtgtggggccagggcaccaccgtgacagtgtcatctacgcgtatccagaaccctgatcctgccgtgtaccagctgcgggatagcaagagcagcgacaagagcgtgtgtctgttcaccgacttcgacagccagaccaacgtgtcccagagcaaggactccgacgtgtacatcaccgataagtgcgtgctggacatgcggagcatggacttcaagagcaactccgccgtggcctggtccaacaagtccgatttcgcctgcgccaacgccttcaacaacagcattatccccgaggacacattcttcccaagccccgagagcagctgcggctttaccagcgagagctaccagcagggcgtgctgagcgccaccatcctgtacgagatcctgctgggcaaggccaccctgtacgccgtgctggtgtctgccctggtgctgatggctatggtcaagcggaaggacagccgggga

SEQ ID NO: 4311 - DNA, 2280 bp, synthetic construct
  source 1..2280: mol_type = other DNA
atggccttaccagtgaccgccttgctcctgccgctggccttgctgctccacgccgccaggccggaagtgcagctggttgaatctggcggaggactggttcagcctggcggatctctgagactgtcttgtgccgccagcggcttcagcttcagcgacttttggatgagctgggtccgacaggcccctggcaaaggacttgaatgggtcgccacaatcagccaggccggcagcgagaaggactacgtggactctgtgaagggcagattcaccatcagccgggacaacgccaagaagtccctgtacctccagatgaacagcctgagagccgaggacaccgccgtgtactattgtgcctctggcgtgtacagcttcgactacagaggccagggcaccctggtcacagtctcttctggtaccggcggaggcggatctggcggcggaggtagcggtggcggaggatctgaattcgacgacatccaaatgacacagagtccttctagtttgagtgcgagcgtgggggacagggtgaccattacctgcagggccagccagagcataagctcataccttaattggtaccagcaaaaaccaggtaaggcccctaagctcctgatctacgcggcctcttcacttcaatctggggtcccttcccgcttcagtggctccggcagcggcaccgacttcacgctcactatatcaagtctgcagcctgaggatctcgccacctattactgtcaacaaagttattccacccctttcacctttggaccgggcacgaaagtggatattaagctcgaggacctgaagaacgtgttcccacctgaggtggccgtgttcgagcctagcgaggccgagatcagccacacccagaaagccaccctcgtgtgcctggctaccggcttctaccccgaccatgtggaactgtcttggtgggtcaacggcaaagaggtgcacagcggcgtgtgtaccgacccccagccactgaaagaacagcccgccctgaacgacagccggtactgcctgagcagcagactgagagtgtccgccaccttctggcagaacccccggaaccacttcagatgccaggtgcagttctacggcctgagcgagaacgacgagtggacccaggacagagccaagcccgtgacccagatcgtgtctgccgaagcctggggcagagccgattgcgacgtgaagctggtggaaaagagcttcgagacagacaccaacctgaacttccagaacctgagcgtgatcggcttcagaatcctgctgctgaaagtggccggctttaacctgctgatgaccctgcggctgtggtccagcagggccaagcgatctggatctggagcaacaaacttctcactactcaaacaagcaggtgacgtggaggagaatcccgggcctactagtatggactggatttggcgcatccttttccttgtcggcgctgctaccggcgcgcattccttcgaagtgcacgaggtccagcttgtgcagtccggggcagaggtcaagaagcctggttctagcgtaaaagtgagttgcaaagcctcaggtgggacattttcatcctacgcgatcagttgggttagacaggctcctggtcaagggctggaatggatgggcggaattattccaatcttcggaacagcgaattacgcgcagaagttccagggtagagtaaccatcactgctgacaagtccacctccaccgcatacatggaattgtctagtctccggagcgaggatacggcggtgtattattgtgctacgttcgccctgtttggcttccgcgaacaggctttcgacatctgggggcagggcacgacagtcacggttagtagtacgcgtatccagaaccctgatcctgccgtgtaccagctgcgggatagcaagagcagcgacaagagcgtgtgtctgttcaccgacttcgacagccagaccaacgtgtcccagagcaaggactccgacgtgtacatcaccgataagtgcgtgctggacatgcggagcatggacttcaagagcaactccgccgtggcctggtccaacaagtccgatttcgcctgcgccaacgccttcaacaacagcattatccccgaggacacattcttcccaagccccgagagcagctgcggctttaccagcgagagctaccagcagggcgtgctgagcgccaccatcctgtacgagatcctgctgggcaaggccaccctgtacgccgtgctggtgtctgccctggtgctgatggctatggtcaagcggaaggacagccgggga

SEQ ID NO: 4312 - DNA, 2274 bp, synthetic construct
  source 1..2274: mol_type = other DNA
atggccttaccagtgaccgccttgctcctgccgctggccttgctgctccacgccgccaggccggaagtgcagctggttgaatctggcggaggactggttcagcctggcggatctctgagactgtcttgtgccgccagcggcttcagcttcagcgacttttggatgagctgggtccgacaggcccctggcaaaggacttgaatgggtcgccacaatcagccaggccggcagcgagaaggactacgtggactctgtgaagggcagattcaccatcagccgggacaacgccaagaagtccctgtacctccagatgaacagcctgagagccgaggacaccgccgtgtactattgtgcctctggcgtgtacagcttcgactacagaggccagggcaccctggtcacagtctcttctggtaccggcggaggcggatctggcggcggaggtagcggtggcggaggatctgaattcgacatcgtgctgacccagagccctctgagcctggccgtgtctctgggacagcctgccatcatcagctgcaaggccagccagagcgtgtcctttgccggcacctctctgatgcactggtatcaccagaagcccggccagcagcccagactgctgatctacagagccagcaacctggaagccggcgtgcccgatagattttccggcagcggcagcaagaccgacttcaccctgaccatcagccccgtggaagccgaagatgccgccacctactactgccagcagagcagagagtacccctacaccttcggcggaggcaccaagctggaaatcaagaggctcgaggacctgaagaacgtgttcccacctgaggtggccgtgttcgagcctagcgaggccgagatcagccacacccagaaagccaccctcgtgtgcctggctaccggcttctaccccgaccatgtggaactgtcttggtgggtcaacggcaaagaggtgcacagcggcgtgtgtaccgacccccagccactgaaagaacagcccgccctgaacgacagccggtactgcctgagcagcagactgagagtgtccgccaccttctggcagaacccccggaaccacttcagatgccaggtgcagttctacggcctgagcgagaacgacgagtggacccaggacagagccaagcccgtgacccagatcgtgtctgccgaagcctggggcagagccgattgcgacgtgaagctggtggaaaagagcttcgagacagacaccaacctgaacttccagaacctgagcgtgatcggcttcagaatcctgctgctgaaagtggccggctttaacctgctgatgaccctgcggctgtggtccagcagggccaagcgatctggatctggagcaacaaacttctcactactcaaacaagcaggtgacgtggaggagaatcccgggcctactagtatggactggatttggcgcatccttttccttgtcggcgctgctaccggcgcgcattccttcgaacaggtccaactggtgcagagcggagccgaggtcgtgaagcctggcgcttccgtgaagattagctgcaaagccagcggctacacctttaccggctactttatgaactgggtcaagcagagccctggccagagcctggaatggatcggcagaatccacccctacgacggcgacaccttctacaaccagaagttccagggcaaggccaccctgacagtggacaagagcagcaacaccgcccacatggaactgctgagcctgaccagcgaggacttcgccgtgtactactgcaccagatacgacggcagccgggctatggactattggggccagggcaccaccgtgaccgtgtctagtacgcgtatccagaaccctgatcctgccgtgtaccagctgcgggatagcaagagcagcgacaagagcgtgtgtctgttcaccgacttcgacagccagaccaacgtgtcccagagcaaggactccgacgtgtacatcaccgataagtgcgtgctggacatgcggagcatggacttcaagagcaactccgccgtggcctggtccaacaagtccgatttcgcctgcgccaacgccttcaacaacagcattatccccgaggacacattcttcccaagccccgagagcagctgcggctttaccagcgagagctaccagcagggcgtgctgagcgccaccatcctgtacgagatcctgctgggcaaggccaccctgtacgccgtgctggtgtctgccctggtgctgatggctatggtcaagcggaaggacagccgggga

SEQ ID NO: 4313 - DNA, 2265 bp, synthetic construct
  source 1..2265: mol_type = other DNA
atggccttaccagtgaccgccttgctcctgccgctggccttgctgctccacgccgccaggccggaagtgcagctggttgaatctggcggaggactggttcagcctggcggatctctgagactgtcttgtgccgccagcggcttcagcttcagcgacttttggatgagctgggtccgacaggcccctggcaaaggacttgaatgggtcgccacaatcagccaggccggcagcgagaaggactacgtggactctgtgaagggcagattcaccatcagccgggacaacgccaagaagtccctgtacctccagatgaacagcctgagagccgaggacaccgccgtgtactattgtgcctctggcgtgtacagcttcgactacagaggccagggcaccctggtcacagtctcttctggtaccggcggaggcggatctggcggcggaggtagcggtggcggaggatctgaattcgacgacgttgtgatgacccagacccccctgagcctgcctgtgacacctggcgaacctgccagcatcagctgtcggagcagccagagcctggtgcacagaaacggcaacacctacctgcactggtatctccagaagcccggccagagccccaagctgctgatccacaaggtgtccaacagattcagcggcgtgcccgacagattctccggcagcggctctggcaccgacttcaccctgaagatcagccgggtggaagccgaggacctgggcgtgtacttctgtagccagagcacccatgtgccccccctgacatttggagccggcaccaagctggaactgaagctcgaggacctgaagaacgtgttcccacctgaggtggccgtgttcgagcctagcgaggccgagatcagccacacccagaaagccaccctcgtgtgcctggctaccggcttctaccccgaccatgtggaactgtcttggtgggtcaacggcaaagaggtgcacagcggcgtgtgtaccgacccccagccactgaaagaacagcccgccctgaacgacagccggtactgcctgagcagcagactgagagtgtccgccaccttctggcagaacccccggaaccacttcagatgccaggtgcagttctacggcctgagcgagaacgacgagtggacccaggacagagccaagcccgtgacccagatcgtgtctgccgaagcctggggcagagccgattgcgacgtgaagctggtggaaaagagcttcgagacagacaccaacctgaacttccagaacctgagcgtgatcggcttcagaatcctgctgctgaaagtggccggctttaacctgctgatgaccctgcggctgtggtccagcagggccaagcgatctggatctggagcaacaaacttctcactactcaaacaagcaggtgacgtggaggagaatcccgggcctactagtatggactggatttggcgcatccttttccttgtcggcgctgctaccggcgcgcattccttcgaagaagtgcagctggtgcagtctggcgctgaggtggaaaagcctggggccagcgtgaagattagctgcaaggccagcggcagcagcttcaccggctacaacatgaactgggtgcgccagaacatcggcaagagcctggaatggatcggagccatcgacccctactacggcggcaccagctacaaccagaagttcaagggcagagccaccctgaccgtggacaagagcaccagcaccgcctacatgcacctgaagtccctgcggagcgaggacaccgccgtgtactactgtgtgtccggcatggaatattggggccagggcaccagcgtgaccgtgtctagtacgcgtatccagaaccctgatcctgccgtgtaccagctgcgggatagcaagagcagcgacaagagcgtgtgtctgttcaccgacttcgacagccagaccaacgtgtcccagagcaaggactccgacgtgtacatcaccgataagtgcgtgctggacatgcggagcatggacttcaagagcaactccgccgtggcctggtccaacaagtccgatttcgcctgcgccaacgccttcaacaacagcattatccccgaggacacattcttcccaagccccgagagcagctgcggctttaccagcgagagctaccagcagggcgtgctgagcgccaccatcctgtacgagatcctgctgggcaaggccaccctgtacgccgtgctggtgtctgccctggtgctgatggctatggtcaagcggaaggacagccgggga

SEQ ID NO: 4314 - DNA, 2259 bp, synthetic construct
  source 1..2259: mol_type = other DNA
atggccttaccagtgaccgccttgctcctgccgctggccttgctgctccacgccgccaggccggaagtgcagctggttgaatctggcggaggactggttcagcctggcggatctctgagactgtcttgtgccgccagcggcttcagcttcagcgacttttggatgagctgggtccgacaggcccctggcaaaggacttgaatgggtcgccacaatcagccaggccggcagcgagaaggactacgtggactctgtgaagggcagattcaccatcagccgggacaacgccaagaagtccctgtacctccagatgaacagcctgagagccgaggacaccgccgtgtactattgtgcctctggcgtgtacagcttcgactacagaggccagggcaccctggtcacagtctcttctggtaccggcggaggcggatctggcggcggaggtagcggtggcggaggatctgaattcgacgagatcgtgatgacccagacccctgccaccctgtctgtgtctgccggcgagagagtgaccattacctgcaaggccagccagagcgtgtccaacgacgtgacctggtatcagcagaagcccggccaggcccccagactgctgatctacagcgccagcaacagatacagcggcgtgcccgccagattttccggcagcggctacggcaccgagttcaccttcaccatcagcagcgtgcagagcgaggacttcgccgtgtacttctgtcagcaagactacagcagcttcggccagggcaccaagctggaaatcaagaggctcgaggacctgaagaacgtgttcccacctgaggtggccgtgttcgagcctagcgaggccgagatcagccacacccagaaagccaccctcgtgtgcctggctaccggcttctaccccgaccatgtggaactgtcttggtgggtcaacggcaaagaggtgcacagcggcgtgtgtaccgacccccagccactgaaagaacagcccgccctgaacgacagccggtactgcctgagcagcagactgagagtgtccgccaccttctggcagaacccccggaaccacttcagatgccaggtgcagttctacggcctgagcgagaacgacgagtggacccaggacagagccaagcccgtgacccagatcgtgtctgccgaagcctggggcagagccgattgcgacgtgaagctggtggaaaagagcttcgagacagacaccaacctgaacttccagaacctgagcgtgatcggcttcagaatcctgctgctgaaagtggccggctttaacctgctgatgaccctgcggctgtggtccagcagggccaagcgatctggatctggagcaacaaacttctcactactcaaacaagcaggtgacgtggaggagaatcccgggcctactagtatggactggatttggcgcatccttttccttgtcggcgctgctaccggcgcgcattccttcgaacaggtgcagctggtggaatctggacctggcgtggtgcagcctggcagaagcctgagaatcagctgtgccgtgtccggcttcagcgtgaccaactacggcgtgcactgggtgcgccagccacctggaaaaggactggaatggctgggcgtgatctgggctggcggcatcaccaactacaacagcgccttcatgtcccggctgaccatctccaaggacaacagcaagaacaccgtgtacctccagatgaacagcctgcgggccgaggacaccgccatgtactactgtgcttccagaggcggccactacggctacgccctggattattggggccagggaaccctcgtgaccgtgtcctctacgcgtatccagaaccctgatcctgccgtgtaccagctgcgggatagcaagagcagcgacaagagcgtgtgtctgttcaccgacttcgacagccagaccaacgtgtcccagagcaaggactccgacgtgtacatcaccgataagtgcgtgctggacatgcggagcatggacttcaagagcaactccgccgtggcctggtccaacaagtccgatttcgcctgcgccaacgccttcaacaacagcattatccccgaggacacattcttcccaagccccgagagcagctgcggctttaccagcgagagctaccagcagggcgtgctgagcgccaccatcctgtacgagatcctgctgggcaaggccaccctgtacgccgtgctggtgtctgccctggtgctgatggctatggtcaagcggaaggacagccgggga

SEQ ID NO: 4315 - DNA, 2265 bp, synthetic construct
  source 1..2265: mol_type = other DNA
atggccttaccagtgaccgccttgctcctgccgctggccttgctgctccacgccgccaggccggaagtgcagctggttgaatctggcggaggactggttcagcctggcggatctctgagactgtcttgtgccgccagcggcttcagcttcagcgacttttggatgagctgggtccgacaggcccctggcaaaggacttgaatgggtcgccacaatcagccaggccggcagcgagaaggactacgtggactctgtgaagggcagattcaccatcagccgggacaacgccaagaagtccctgtacctccagatgaacagcctgagagccgaggacaccgccgtgtactattgtgcctctggcgtgtacagcttcgactacagaggccagggcaccctggtcacagtctcttctggtaccggcggaggcggatctggcggcggaggtagcggtggcggaggatctgaattcgacatccagatgacccagaccgccagcagcctgcctgcctctctgggcgacagagtgaccatctcctgtagcgccagccaggacatcagcaactacctgaactggtatcagcagaaacccgacggcaccgtgaagctgctgatcttctacagcagcaacctgcacagcggcgtgcccagcagattttctggcggcggaagcggcaccgactacagcctgaccatcagcaatctggaacccgaggacattgccacctacttttgccaccagtacagcaagctgccctggacctttggcggaggcaccaagctggaaatcaagagactcgaggacctgaagaacgtgttcccacctgaggtggccgtgttcgagcctagcgaggccgagatcagccacacccagaaagccaccctcgtgtgcctggctaccggcttctaccccgaccatgtggaactgtcttggtgggtcaacggcaaagaggtgcacagcggcgtgtgtaccgacccccagccactgaaagaacagcccgccctgaacgacagccggtactgcctgagcagcagactgagagtgtccgccaccttctggcagaacccccggaaccacttcagatgccaggtgcagttctacggcctgagcgagaacgacgagtggacccaggacagagccaagcccgtgacccagatcgtgtctgccgaagcctggggcagagccgattgcgacgtgaagctggtggaaaagagcttcgagacagacaccaacctgaacttccagaacctgagcgtgatcggcttcagaatcctgctgctgaaagtggccggctttaacctgctgatgaccctgcggctgtggtccagcagggccaagcgatctggatctggagcaacaaacttctcactactcaaacaagcaggtgacgtggaggagaatcccgggcctactagtatggactggatttggcgcatccttttccttgtcggcgctgctaccggcgcgcattccttcgaagaagtgaccctggtggaaagcggcggagacttcgtgaagcctggcggctctctgaaggtgtcctgtgccgccagcggcttcgcctttagccactacgccatgagctgggtgcgccagacccctgccaagagactggaatgggtggcctacatcagcagcggcggctccggcacctactactccgatagcgtgaagggccggttcaccatcagccgggacaacgccaagaacaccctgtacctccagatgcggagcctgcggagcgaggacagcgccatgtatttctgcaccagagtgaagctgggcacctattacttcgactcttggggccagggcaccaccctgaccgtgtcatctacgcgtatccagaaccctgatcctgccgtgtaccagctgcgggatagcaagagcagcgacaagagcgtgtgtctgttcaccgacttcgacagccagaccaacgtgtcccagagcaaggactccgacgtgtacatcaccgataagtgcgtgctggacatgcggagcatggacttcaagagcaactccgccgtggcctggtccaacaagtccgatttcgcctgcgccaacgccttcaacaacagcattatccccgaggacacattcttcccaagccccgagagcagctgcggctttaccagcgagagctaccagcagggcgtgctgagcgccaccatcctgtacgagatcctgctgggcaaggccaccctgtacgccgtgctggtgtctgccctggtgctgatggctatggtcaagcggaaggacagccgggga

SEQ ID NO: 4316 - DNA, 2271 bp, synthetic construct
  source 1..2271: mol_type = other DNA
atggccttaccagtgaccgccttgctcctgccgctggccttgctgctccacgccgccaggccggaagtgcagctggttgaatctggcggaggactggttcagcctggcggatctctgagactgtcttgtgccgccagcggcttcagcttcagcgacttttggatgagctgggtccgacaggcccctggcaaaggacttgaatgggtcgccacaatcagccaggccggcagcgagaaggactacgtggactctgtgaagggcagattcaccatcagccgggacaacgccaagaagtccctgtacctccagatgaacagcctgagagccgaggacaccgccgtgtactattgtgcctctggcgtgtacagcttcgactacagaggccagggcaccctggtcacagtctcttctggtaccggcggaggcggatctggcggcggaggtagcggtggcggaggatctgaattccagttcgtgctgacccagagcccttctgcctctgctgccctgggagcctctgccaagctgacctgtacactgagcagcgcccacaagacctacaccatcgactggtatcagcagcagaagggaaaggcccccagatacctgatccaagtgaagtccgacggcacctacacaaaggccaccggcgtgcccgatagattcagcggcagtagcagcggagccgatagatacctgattatccccagcgtgcaggccgacgacgaggccgattactactgcggcaccgattacaccggcggctacgtgttcggcggaggcacacaactgaccgtgacactcgaggacctgaagaacgtgttcccacctgaggtggccgtgttcgagcctagcgaggccgagatcagccacacccagaaagccaccctcgtgtgcctggctaccggcttctaccccgaccatgtggaactgtcttggtgggtcaacggcaaagaggtgcacagcggcgtgtgtaccgacccccagccactgaaagaacagcccgccctgaacgacagccggtactgcctgagcagcagactgagagtgtccgccaccttctggcagaacccccggaaccacttcagatgccaggtgcagttctacggcctgagcgagaacgacgagtggacccaggacagagccaagcccgtgacccagatcgtgtctgccgaagcctggggcagagccgattgcgacgtgaagctggtggaaaagagcttcgagacagacaccaacctgaacttccagaacctgagcgtgatcggcttcagaatcctgctgctgaaagtggccggctttaacctgctgatgaccctgcggctgtggtccagcagggccaagcgatctggatctggagcaacaaacttctcactactcaaacaagcaggtgacgtggaggagaatcccgggcctactagtatggactggatttggcgcatccttttccttgtcggcgctgctaccggcgcgcattccttcgaagagcaactgaaagagtctggcggcggactgttcaagcccaccgataccctgaccctgacctgcaccgtgtccggcttcagcctgagctactacggcgtgaactgggtgcgccaggcccctggcaatggcctggaatggatcggcacaatcggcggcagcggcgacacctactatgcctcttgggccaagtccagaagcaccatcatcagaaacaccaacgagaacaccgtgaccctgaagatgaccagcctgacagccgccgacaccgccacctacttttgcgtcagatacgccaacatcggctacgagtatttcaacgtgtggggacccggcaccctcgtgaccgtgtcatctacgcgtatccagaaccctgatcctgccgtgtaccagctgcgggatagcaagagcagcgacaagagcgtgtgtctgttcaccgacttcgacagccagaccaacgtgtcccagagcaaggactccgacgtgtacatcaccgataagtgcgtgctggacatgcggagcatggacttcaagagcaactccgccgtggcctggtccaacaagtccgatttcgcctgcgccaacgccttcaacaacagcattatccccgaggacacattcttcccaagccccgagagcagctgcggctttaccagcgagagctaccagcagggcgtgctgagcgccaccatcctgtacgagatcctgctgggcaaggccaccctgtacgccgtgctggtgtctgccctggtgctgatggctatggtcaagcggaaggacagccgggga

SEQ ID NO: 4317 - DNA, 2286 bp, synthetic construct
  source 1..2286: mol_type = other DNA
atggccttaccagtgaccgccttgctcctgccgctggccttgctgctccacgccgccaggccggaagtgcagctggttgaatctggcggaggactggttcagcctggcggatctctgagactgtcttgtgccgccagcggcttcagcttcagcgacttttggatgagctgggtccgacaggcccctggcaaaggacttgaatgggtcgccacaatcagccaggccggcagcgagaaggactacgtggactctgtgaagggcagattcaccatcagccgggacaacgccaagaagtccctgtacctccagatgaacagcctgagagccgaggacaccgccgtgtactattgtgcctctggcgtgtacagcttcgactacagaggccagggcaccctggtcacagtctcttctggtaccggcggaggcggatctggcggcggaggtagcggtggcggaggatctgaattccagttcgtgctgacccagagcccttctgtgtctgccgccctgggagcctctgccaagctgacctgtacactgagcagcgcccacaagacctacaccatcgactggtatcagcagcagcagggcgaggcccccagatacctgatgcaagtgaagtccgacggcagctacaccaagggcaccggcgtgcccgatagattcagcggcagtagcagcggagccgatagatacctgattatccccagcgtgcaggccgacgacgaggccggatatgtgtgcggcgctgacgacaatggcggctacgtgttcggcggaggcacccaactgacagtgacactcgaggacctgaagaacgtgttcccacctgaggtggccgtgttcgagcctagcgaggccgagatcagccacacccagaaagccaccctcgtgtgcctggctaccggcttctaccccgaccatgtggaactgtcttggtgggtcaacggcaaagaggtgcacagcggcgtgtgtaccgacccccagccactgaaagaacagcccgccctgaacgacagccggtactgcctgagcagcagactgagagtgtccgccaccttctggcagaacccccggaaccacttcagatgccaggtgcagttctacggcctgagcgagaacgacgagtggacccaggacagagccaagcccgtgacccagatcgtgtctgccgaagcctggggcagagccgattgcgacgtgaagctggtggaaaagagcttcgagacagacaccaacctgaacttccagaacctgagcgtgatcggcttcagaatcctgctgctgaaagtggccggctttaacctgctgatgaccctgcggctgtggtccagcagggccaagcgatctggatctggagcaacaaacttctcactactcaaacaagcaggtgacgtggaggagaatcccgggcctactagtatggactggatttggcgcatccttttccttgtcggcgctgctaccggcgcgcattccttcgaacagagcgtgaaagagtctgagggcggcctgttcaagcccaccgataccctgaccctgacctgcaccgtgtccggcttcagcctgagcagacacgccctgacatgggtgcgccaggcccctggaaatggcctggaatggatcggagccatcgacaacgccggcaccacctactatgcctcttgggccaagtccagaagcaccatcacccggaacaccgacctgcacaccgtgaccctgaagatgaccagcctgaccgccagcgacaccgccacctacttttgcgccagagtgttctacgacatcaacagcggctactacctggacggcatggacctgtggggacctggcacacttgtgaccgtgtccagcacgcgtatccagaaccctgatcctgccgtgtaccagctgcgggatagcaagagcagcgacaagagcgtgtgtctgttcaccgacttcgacagccagaccaacgtgtcccagagcaaggactccgacgtgtacatcaccgataagtgcgtgctggacatgcggagcatggacttcaagagcaactccgccgtggcctggtccaacaagtccgatttcgcctgcgccaacgccttcaacaacagcattatccccgaggacacattcttcccaagccccgagagcagctgcggctttaccagcgagagctaccagcagggcgtgctgagcgccaccatcctgtacgagatcctgctgggcaaggccaccctgtacgccgtgctggtgtctgccctggtgctgatggctatggtcaagcggaaggacagccgggga

SEQ ID NO: 4318 - DNA, 2268 bp, synthetic construct
  source 1..2268: mol_type = other DNA
atggccttaccagtgaccgccttgctcctgccgctggccttgctgctccacgccgccaggccggaagtgcagctggttgaatctggcggaggactggttcagcctggcggatctctgagactgtcttgtgccgccagcggcttcagcttcagcgacttttggatgagctgggtccgacaggcccctggcaaaggacttgaatgggtcgccacaatcagccaggccggcagcgagaaggactacgtggactctgtgaagggcagattcaccatcagccgggacaacgccaagaagtccctgtacctccagatgaacagcctgagagccgaggacaccgccgtgtactattgtgcctctggcgtgtacagcttcgactacagaggccagggcaccctggtcacagtctcttctggtaccggcggaggcggatctggcggcggaggtagcggtggcggaggatctgaattcgacatccagatgacccagagccccagcagcctgtctgccagcgtgggcgacagagtgaccatcacctgtagagccagccagggcatcagctcttggctggcctggtatcagcagaagcccgagaaggcccccaagagcctgatctacgccgcctctagtctccagagcggcgtgcccagcagattttctggcagcggctccggcaccgacttcaccctgacaatcagctccctccagcccgaggacttcgccacctactactgccagcagtacaacagctacccccccacctttggcggaggcaccaaggtggaaatcaagctcgaggacctgaagaacgtgttcccacctgaggtggccgtgttcgagcctagcgaggccgagatcagccacacccagaaagccaccctcgtgtgcctggctaccggcttctaccccgaccatgtggaactgtcttggtgggtcaacggcaaagaggtgcacagcggcgtgtgtaccgacccccagccactgaaagaacagcccgccctgaacgacagccggtactgcctgagcagcagactgagagtgtccgccaccttctggcagaacccccggaaccacttcagatgccaggtgcagttctacggcctgagcgagaacgacgagtggacccaggacagagccaagcccgtgacccagatcgtgtctgccgaagcctggggcagagccgattgcgacgtgaagctggtggaaaagagcttcgagacagacaccaacctgaacttccagaacctgagcgtgatcggcttcagaatcctgctgctgaaagtggccggctttaacctgctgatgaccctgcggctgtggtccagcagggccaagcgatctggatctggagcaacaaacttctcactactcaaacaagcaggtgacgtggaggagaatcccgggcctactagtatggactggatttggcgcatccttttccttgtcggcgctgctaccggcgcgcattccttcgaagaagtgcaactggtggaatcaggcggcggactggtgcagcctggcgagtctctgagactgagctgtgtggcctccggcttcaccttcagccggtacaagatgaactgggtgcgccaggcccctggcaagggactggaatgggtgtcctacatcagccgcagcggcagagacatctactacgccgacagcgtgaagggccggttcaccatcagcagagacaacgccaagaacagcctgtacctccagatgaactccctgcgggacgaggacaccgccgtgtactactgtgccggaaccgtgaccacctattactacttcggcatggacgtgtggggccacggcaccaccgtgacagtgtcatctacgcgtatccagaaccctgatcctgccgtgtaccagctgcgggatagcaagagcagcgacaagagcgtgtgtctgttcaccgacttcgacagccagaccaacgtgtcccagagcaaggactccgacgtgtacatcaccgataagtgcgtgctggacatgcggagcatggacttcaagagcaactccgccgtggcctggtccaacaagtccgatttcgcctgcgccaacgccttcaacaacagcattatccccgaggacacattcttcccaagccccgagagcagctgcggctttaccagcgagagctaccagcagggcgtgctgagcgccaccatcctgtacgagatcctgctgggcaaggccaccctgtacgccgtgctggtgtctgccctggtgctgatggctatggtcaagcggaaggacagccgggga

SEQ ID NO: 4319 - DNA, 2271 bp, synthetic construct
  source 1..2271: mol_type = other DNA
atggccttaccagtgaccgccttgctcctgccgctggccttgctgctccacgccgccaggccggaagtgcagctggttgaatctggcggaggactggttcagcctggcggatctctgagactgtcttgtgccgccagcggcttcagcttcagcgacttttggatgagctgggtccgacaggcccctggcaaaggacttgaatgggtcgccacaatcagccaggccggcagcgagaaggactacgtggactctgtgaagggcagattcaccatcagccgggacaacgccaagaagtccctgtacctccagatgaacagcctgagagccgaggacaccgccgtgtactattgtgcctctggcgtgtacagcttcgactacagaggccagggcaccctggtcacagtctcttctggtaccggcggaggcggatctggcggcggaggtagcggtggcggaggatctgaattcgacatccagatgacccagagccccagcagcctgtctgccagcgtgggcgacagagtgaccatcacctgtagagccagccagggcatcagctcttggctggcctggtatcagcagaagcccgagaaggcccccaagagcctgatctacgccgcctctagtctccagagcggcgtgcccagcagattttctggcagcggctccggcaccgacttcaccctgacaatcagctccctccagcccgaggacttcgccacctactactgccagcagtacaacagctaccctcccacctttggcggaggcaccaaggtggaaatcaagctcgaggacctgaagaacgtgttcccacctgaggtggccgtgttcgagcctagcgaggccgagatcagccacacccagaaagccaccctcgtgtgcctggctaccggcttctaccccgaccatgtggaactgtcttggtgggtcaacggcaaagaggtgcacagcggcgtgtgtaccgacccccagccactgaaagaacagcccgccctgaacgacagccggtactgcctgagcagcagactgagagtgtccgccaccttctggcagaacccccggaaccacttcagatgccaggtgcagttctacggcctgagcgagaacgacgagtggacccaggacagagccaagcccgtgacccagatcgtgtctgccgaagcctggggcagagccgattgcgacgtgaagctggtggaaaagagcttcgagacagacaccaacctgaacttccagaacctgagcgtgatcggcttcagaatcctgctgctgaaagtggccggctttaacctgctgatgaccctgcggctgtggtccagcagggccaagcgatctggatctggagcaacaaacttctcactactcaaacaagcaggtgacgtggaggagaatcccgggcctactagtatggactggatttggcgcatccttttccttgtcggcgctgctaccggcgcgcattccttcgaagaagtgcaactggtggaatccgggggaggctctgtgcagcctggcgagtctctgagactgagctgtgtggcctccggcttcaccttcagccggtacaagatgaactgggtgcgccaggcccctggcaagggactggaatgggtgtcctacatcagccgcagcggcagagacatctactacgccgacagcgtgaagggccggttcaccatcagcagagacaacgccaagaacagcctgtacctccagatgaactccctgcgggacgaggacaccgccgtgtactactgtgccggaaccgtgaccacctattactacgacttcggcatggacgtgtggggccagggcacaaccgtgacagtgtctagcacgcgtatccagaaccctgatcctgccgtgtaccagctgcgggatagcaagagcagcgacaagagcgtgtgtctgttcaccgacttcgacagccagaccaacgtgtcccagagcaaggactccgacgtgtacatcaccgataagtgcgtgctggacatgcggagcatggacttcaagagcaactccgccgtggcctggtccaacaagtccgatttcgcctgcgccaacgccttcaacaacagcattatccccgaggacacattcttcccaagccccgagagcagctgcggctttaccagcgagagctaccagcagggcgtgctgagcgccaccatcctgtacgagatcctgctgggcaaggccaccctgtacgccgtgctggtgtctgccctggtgctgatggctatggtcaagcggaaggacagccgggga

SEQ ID NO: 4320 - DNA, 2265 bp, synthetic construct
  source 1..2265: mol_type = other DNA
atggccttaccagtgaccgccttgctcctgccgctggccttgctgctccacgccgccaggccggaagtgcagctggttgaatctggcggaggactggttcagcctggcggatctctgagactgtcttgtgccgccagcggcttcagcttcagcgacttttggatgagctgggtccgacaggcccctggcaaaggacttgaatgggtcgccacaatcagccaggccggcagcgagaaggactacgtggactctgtgaagggcagattcaccatcagccgggacaacgccaagaagtccctgtacctccagatgaacagcctgagagccgaggacaccgccgtgtactattgtgcctctggcgtgtacagcttcgactacagaggccagggcaccctggtcacagtctcttctggtaccggcggaggcggatctggcggcggaggtagcggtggcggaggatctgaattccagtctgtgctgacacagcctccatctgcctctggcacacctggacagagagtgaccatcagctgtagcggcagcagaagcaacgtcggcggcaactacgtgttctggtatcagcaggtcccaggcgctacccctaagctgctgatctacagaagcaatcagcggcctagcggcgtgcccgatagatttgccggaagcaagagcggcagctctgccagccttgccatctctggactgagaagcgaggacgaggccgactactactgtgccacctgggatgatagcctgagcggcttcgtgtttggcaccggcaccaaagtgacagtgcttggtctcgaggacctgaagaacgtgttcccacctgaggtggccgtgttcgagcctagcgaggccgagatcagccacacccagaaagccaccctcgtgtgcctggctaccggcttctaccccgaccatgtggaactgtcttggtgggtcaacggcaaagaggtgcacagcggcgtgtgtaccgacccccagccactgaaagaacagcccgccctgaacgacagccggtactgcctgagcagcagactgagagtgtccgccaccttctggcagaacccccggaaccacttcagatgccaggtgcagttctacggcctgagcgagaacgacgagtggacccaggacagagccaagcccgtgacccagatcgtgtctgccgaagcctggggcagagccgattgcgacgtgaagctggtggaaaagagcttcgagacagacaccaacctgaacttccagaacctgagcgtgatcggcttcagaatcctgctgctgaaagtggccggctttaacctgctgatgaccctgcggctgtggtccagcagggccaagcgatctggatctggagcaacaaacttctcactactcaaacaagcaggtgacgtggaggagaatcccgggcctactagtatggactggatttggcgcatccttttccttgtcggcgctgctaccggcgcgcattccttcgaagttcagctggttgaatctggcggcggactggttaagcctggcggatctctgagactgtcttgtgccgccagcggcttcaccttcagcgattactacatgagctggatcagacaggcccctggcaaaggactggaatgggtgtcctacatcagcagcagcggctccaccatctactacgccgatagcgtgaagggcagattcaccatcagccgggacaacgccaagaacagcctgtacctccagatgaactccctgagagccgaggacaccgccgtgtactattgcgccagaggctacggcaaagcctacgatcaatggggccagggcacactggtcaccgtttcttctacgcgtatccagaaccctgatcctgccgtgtaccagctgcgggatagcaagagcagcgacaagagcgtgtgtctgttcaccgacttcgacagccagaccaacgtgtcccagagcaaggactccgacgtgtacatcaccgataagtgcgtgctggacatgcggagcatggacttcaagagcaactccgccgtggcctggtccaacaagtccgatttcgcctgcgccaacgccttcaacaacagcattatccccgaggacacattcttcccaagccccgagagcagctgcggctttaccagcgagagctaccagcagggcgtgctgagcgccaccatcctgtacgagatcctgctgggcaaggccaccctgtacgccgtgctggtgtctgccctggtgctgatggctatggtcaagcggaaggacagccgggga

SEQ ID NO: 4321 - DNA, 2262 bp, synthetic construct
  source 1..2262: mol_type = other DNA
atggccttaccagtgaccgccttgctcctgccgctggccttgctgctccacgccgccaggccggaagtgcagctggttgaatctggcggaggactggttcagcctggcggatctctgagactgtcttgtgccgccagcggcttcagcttcagcgacttttggatgagctgggtccgacaggcccctggcaaaggacttgaatgggtcgccacaatcagccaggccggcagcgagaaggactacgtggactctgtgaagggcagattcaccatcagccgggacaacgccaagaagtccctgtacctccagatgaacagcctgagagccgaggacaccgccgtgtactattgtgcctctggcgtgtacagcttcgactacagaggccagggcaccctggtcacagtctcttctggtaccggcggaggcggatctggcggcggaggtagcggtggcggaggatctgaattccagtctgtggtcacacagccacctagcatgtctgccgctccaggccagcaagtgaccatctcttgtagcggcggcaacagcaacatcgagcggaactacgtgtcctggtatctgcaactgcctggcacagcccctaagctggtcatcttcgacaacgacagacggcccagcggcatccccgatagattttctggcagcaagagcggcaccagcgccacactgggaattaccggacttcagacaggcgacgaggccgactactactgtggcacatgggactctagcctgagaggctgggttttcggcggaggcacaaagctgacagtgcttggtctcgaggacctgaagaacgtgttcccacctgaggtggccgtgttcgagcctagcgaggccgagatcagccacacccagaaagccaccctcgtgtgcctggctaccggcttctaccccgaccatgtggaactgtcttggtgggtcaacggcaaagaggtgcacagcggcgtgtgtaccgacccccagccactgaaagaacagcccgccctgaacgacagccggtactgcctgagcagcagactgagagtgtccgccaccttctggcagaacccccggaaccacttcagatgccaggtgcagttctacggcctgagcgagaacgacgagtggacccaggacagagccaagcccgtgacccagatcgtgtctgccgaagcctggggcagagccgattgcgacgtgaagctggtggaaaagagcttcgagacagacaccaacctgaacttccagaacctgagcgtgatcggcttcagaatcctgctgctgaaagtggccggctttaacctgctgatgaccctgcggctgtggtccagcagggccaagcgatctggatctggagcaacaaacttctcactactcaaacaagcaggtgacgtggaggagaatcccgggcctactagtatggactggatttggcgcatccttttccttgtcggcgctgctaccggcgcgcattccttcgaagtgcagctcgttgagtctggcggcggactgattcaacctggcggaagcctgagactgagctgtgccgcttccggcttcaccttcagcaactacgccatgaactgggttcgacaggcccctggcaaaggactggaatgggtgtccaccatcaacggcagaggcagcagcaccatctacgccgattctgtgaagggcagattcaccatcagccgggacaacagcaagaacaccctgtacctccagatgaactccctgagagccgaggacaccgccacctattactgtgcccggtacatcagcagaggactgggcgattcttggggccagggcacactggttacagtgacgcgtatccagaaccctgatcctgccgtgtaccagctgcgggatagcaagagcagcgacaagagcgtgtgtctgttcaccgacttcgacagccagaccaacgtgtcccagagcaaggactccgacgtgtacatcaccgataagtgcgtgctggacatgcggagcatggacttcaagagcaactccgccgtggcctggtccaacaagtccgatttcgcctgcgccaacgccttcaacaacagcattatccccgaggacacattcttcccaagccccgagagcagctgcggctttaccagcgagagctaccagcagggcgtgctgagcgccaccatcctgtacgagatcctgctgggcaaggccaccctgtacgccgtgctggtgtctgccctggtgctgatggctatggtcaagcggaaggacagccgggga

SEQ ID NO: 4322 - DNA, 2265 bp, synthetic construct
  source 1..2265: mol_type = other DNA
atggccttaccagtgaccgccttgctcctgccgctggccttgctgctccacgccgccaggccggaagtgcagctggttgaatctggcggaggactggttcagcctggcggatctctgagactgtcttgtgccgccagcggcttcagcttcagcgacttttggatgagctgggtccgacaggcccctggcaaaggacttgaatgggtcgccacaatcagccaggccggcagcgagaaggactacgtggactctgtgaagggcagattcaccatcagccgggacaacgccaagaagtccctgtacctccagatgaacagcctgagagccgaggacaccgccgtgtactattgtgcctctggcgtgtacagcttcgactacagaggccagggcaccctggtcacagtctcttctggtaccggcggaggcggatctggcggcggaggtagcggtggcggaggatctgaattcgacgtcgtgatgacccagacccctctgagcctgcctgtgtccctgggcgatcaggccagcatcagctgtagaagcagccagagcctggtgcacagcaacggcaacacctacctgcactggtatctccagaagcccggccagagccccaagctgctgatctacaaggtgtccaacagattcagcggcgtgcccgacagattctccggcagcggctctggcaccgacttcaccctgaagatcagccgggtggaagccgaggacctgggcgtgtacttctgtagccagaacacccccgtgccccccaagtttggcagcggcaccaagctggaaatcaagctcgaggacctgaagaacgtgttcccacctgaggtggccgtgttcgagcctagcgaggccgagatcagccacacccagaaagccaccctcgtgtgcctggctaccggcttctaccccgaccatgtggaactgtcttggtgggtcaacggcaaagaggtgcacagcggcgtgtgtaccgacccccagccactgaaagaacagcccgccctgaacgacagccggtactgcctgagcagcagactgagagtgtccgccaccttctggcagaacccccggaaccacttcagatgccaggtgcagttctacggcctgagcgagaacgacgagtggacccaggacagagccaagcccgtgacccagatcgtgtctgccgaagcctggggcagagccgattgcgacgtgaagctggtggaaaagagcttcgagacagacaccaacctgaacttccagaacctgagcgtgatcggcttcagaatcctgctgctgaaagtggccggctttaacctgctgatgaccctgcggctgtggtccagcagggccaagcgatctggatctggagcaacaaacttctcactactcaaacaagcaggtgacgtggaggagaatcccgggcctactagtatggactggatttggcgcatccttttccttgtcggcgctgctaccggcgcgcattccttcgaacaggtgcagctccagcagtctggcgctgaactcgtgcggcctggcgcttctgtgaagctgtcttgcaaggccagcggctacaccttcaacgactacgagatgcactgggtcaagcagacccctgtgcacggcctgaagtggatcggagccctggaacccaagaccggcgataccgcctacagccagaagttcaagggcaaggccaccctgaccgccgacaagagcagcagcacagcctacatggaactgcggagcctgaccagcgaggacagcgccgtgtactactgcaccagctgctactactacacctacagcggccagggcaccctcgtgacagtgtctgctacgcgtatccagaaccctgatcctgccgtgtaccagctgcgggatagcaagagcagcgacaagagcgtgtgtctgttcaccgacttcgacagccagaccaacgtgtcccagagcaaggactccgacgtgtacatcaccgataagtgcgtgctggacatgcggagcatggacttcaagagcaactccgccgtggcctggtccaacaagtccgatttcgcctgcgccaacgccttcaacaacagcattatccccgaggacacattcttcccaagccccgagagcagctgcggctttaccagcgagagctaccagcagggcgtgctgagcgccaccatcctgtacgagatcctgctgggcaaggccaccctgtacgccgtgctggtgtctgccctggtgctgatggctatggtcaagcggaaggacagccgggga

SEQ ID NO: 4323 - DNA, 2262 bp, synthetic construct
  source 1..2262: mol_type = other DNA
atggccttaccagtgaccgccttgctcctgccgctggccttgctgctccacgccgccaggccggaagtgcagctggttgaatctggcggaggactggttcagcctggcggatctctgagactgtcttgtgccgccagcggcttcagcttcagcgacttttggatgagctgggtccgacaggcccctggcaaaggacttgaatgggtcgccacaatcagccaggccggcagcgagaaggactacgtggactctgtgaagggcagattcaccatcagccgggacaacgccaagaagtccctgtacctccagatgaacagcctgagagccgaggacaccgccgtgtactattgtgcctctggcgtgtacagcttcgactacagaggccagggcaccctggtcacagtctcttctggtaccggcggaggcggatctggcggcggaggtagcggtggcggaggatctgaattcgacatccaactgacccagagccccagcagcctgtctgcctctgtgggcgacagagtgaccatcacctgtagagccagccagggcatcagaaacgacctgggctggtatcagcagaagcccggcaaggcccccaagcggctgatctatgctgccagctccctccagaatggcgtgcccagcagattttccggcagcggctctggcaccgagttcaccctgaccatcagctccctccagcccgaggacttcgccacctactactgcctccagcacaacacctaccccgccttcggccagggcaccaaggtggaaatcaagagactcgaggacctgaagaacgtgttcccacctgaggtggccgtgttcgagcctagcgaggccgagatcagccacacccagaaagccaccctcgtgtgcctggctaccggcttctaccccgaccatgtggaactgtcttggtgggtcaacggcaaagaggtgcacagcggcgtgtgtaccgacccccagccactgaaagaacagcccgccctgaacgacagccggtactgcctgagcagcagactgagagtgtccgccaccttctggcagaacccccggaaccacttcagatgccaggtgcagttctacggcctgagcgagaacgacgagtggacccaggacagagccaagcccgtgacccagatcgtgtctgccgaagcctggggcagagccgattgcgacgtgaagctggtggaaaagagcttcgagacagacaccaacctgaacttccagaacctgagcgtgatcggcttcagaatcctgctgctgaaagtggccggctttaacctgctgatgaccctgcggctgtggtccagcagggccaagcgatctggatctggagcaacaaacttctcactactcaaacaagcaggtgacgtggaggagaatcccgggcctactagtatggactggatttggcgcatccttttccttgtcggcgctgctaccggcgcgcattccttcgaacaggtgcaactccaggaatctggccctggcctcgtgaagcctagccagaccctgagcctgacctgtaccgtgtctggcggcagcatcagcagcttcaactactactggtcctggatcagacaccaccctggcaagggcctggaatggatcggctacatctactacagcggcagcacctacagcaaccccagcctgaagtcccgcgtgaccatctccgtggacaccagcaagaaccagtttagcctgaccctgtccagcgtgacagccgccgataccgccgtgtactactgcgccagaggctacaactggaactacttcgactactggggccagggaaccctcgtgaccgtgtctagtacgcgtatccagaaccctgatcctgccgtgtaccagctgcgggatagcaagagcagcgacaagagcgtgtgtctgttcaccgacttcgacagccagaccaacgtgtcccagagcaaggactccgacgtgtacatcaccgataagtgcgtgctggacatgcggagcatggacttcaagagcaactccgccgtggcctggtccaacaagtccgatttcgcctgcgccaacgccttcaacaacagcattatccccgaggacacattcttcccaagccccgagagcagctgcggctttaccagcgagagctaccagcagggcgtgctgagcgccaccatcctgtacgagatcctgctgggcaaggccaccctgtacgccgtgctggtgtctgccctggtgctgatggctatggtcaagcggaaggacagccgggga

SEQ ID NO: 4324 - DNA, 2268 bp, synthetic construct
  source 1..2268: mol_type = other DNA
atggccttaccagtgaccgccttgctcctgccgctggccttgctgctccacgccgccaggccggaagtgcagctggttgaatctggcggaggactggttcagcctggcggatctctgagactgtcttgtgccgccagcggcttcagcttcagcgacttttggatgagctgggtccgacaggcccctggcaaaggacttgaatgggtcgccacaatcagccaggccggcagcgagaaggactacgtggactctgtgaagggcagattcaccatcagccgggacaacgccaagaagtccctgtacctccagatgaacagcctgagagccgaggacaccgccgtgtactattgtgcctctggcgtgtacagcttcgactacagaggccagggcaccctggtcacagtctcttctggtaccggcggaggcggatctggcggcggaggtagcggtggcggaggatctgaattcgacgacatcgtgctgacccagagccccgccagcctggccgtgagcctgggccagagcgtgaccatcagctgcagagccagcgagagcgtggagtactacggcaccagcctgatgcagtggtaccagcagaagcccggccagccccccaagctgctgatctacgccaccagcaacgtggagagcggcgtgcccgccagattcagcggcagcggcagcggcaccgacttcagcctgaacatccaccccgtggaggaggacgacatcgccatgtacttctgccagcagagcagaaagctgcccagcaccttcggcggcggcaccaagctggagatcaagctcgaggacctgaagaacgtgttcccacctgaggtggccgtgttcgagcctagcgaggccgagatcagccacacccagaaagccaccctcgtgtgcctggctaccggcttctaccccgaccatgtggaactgtcttggtgggtcaacggcaaagaggtgcacagcggcgtgtgtaccgacccccagccactgaaagaacagcccgccctgaacgacagccggtactgcctgagcagcagactgagagtgtccgccaccttctggcagaacccccggaaccacttcagatgccaggtgcagttctacggcctgagcgagaacgacgagtggacccaggacagagccaagcccgtgacccagatcgtgtctgccgaagcctggggcagagccgattgcgacgtgaagctggtggaaaagagcttcgagacagacaccaacctgaacttccagaacctgagcgtgatcggcttcagaatcctgctgctgaaagtggccggctttaacctgctgatgaccctgcggctgtggtccagcagggccaagcgatctggatctggagcaacaaacttctcactactcaaacaagcaggtgacgtggaggagaatcccgggcctactagtatggactggatttggcgcatccttttccttgtcggcgctgctaccggcgcgcattccttcgaagacgtgagactgcaggagagcggccccggccaggtgaagcccagccagaccgtgagcctgacctgcagcgtgaccggctacagcatcaccaacggcaaccactggtggaactggatcagacaggtgagcggcagcaagctggagtggatcggctacatcagcagcagcggcagcaccgacagcaaccccagcctgaagagcagaatcagcatcaccagagacaccagcaagaaccagctgttcctgcagctgaacagcgtgaccaccgaggacatcgccacctactactgcgccagaggctactacttcgactactggggccagggcaccaccctgaccgtgagcagcacgcgtatccagaaccctgatcctgccgtgtaccagctgcgggatagcaagagcagcgacaagagcgtgtgtctgttcaccgacttcgacagccagaccaacgtgtcccagagcaaggactccgacgtgtacatcaccgataagtgcgtgctggacatgcggagcatggacttcaagagcaactccgccgtggcctggtccaacaagtccgatttcgcctgcgccaacgccttcaacaacagcattatccccgaggacacattcttcccaagccccgagagcagctgcggctttaccagcgagagctaccagcagggcgtgctgagcgccaccatcctgtacgagatcctgctgggcaaggccaccctgtacgccgtgctggtgtctgccctggtgctgatggctatggtcaagcggaaggacagccgggga

SEQ ID NO: 4325 - DNA, 2265 bp, synthetic construct
  source 1..2265: mol_type = other DNA
atggccttaccagtgaccgccttgctcctgccgctggccttgctgctccacgccgccaggccggaagtgcagctggttgaatctggcggaggactggttcagcctggcggatctctgagactgtcttgtgccgccagcggcttcagcttcagcgacttttggatgagctgggtccgacaggcccctggcaaaggacttgaatgggtcgccacaatcagccaggccggcagcgagaaggactacgtggactctgtgaagggcagattcaccatcagccgggacaacgccaagaagtccctgtacctccagatgaacagcctgagagccgaggacaccgccgtgtactattgtgcctctggcgtgtacagcttcgactacagaggccagggcaccctggtcacagtctcttctggtaccggcggaggcggatctggcggcggaggtagcggtggcggaggatctgaattcgacatccagatgacccagagccccagcagcctgtctgccagcgtgggcgacagagtgaccatcacctgtagagccagccaggacgtgaacaccgccgtggcctggtatcagcagaagcctggcaaggcccccaagctgctgatctacagcgccagcttcctggaaagcggcgtgcccagcagattcagcggaagcagaagcggcaccgacttcaccctgaccatcagctccctccagcccgaggacttcgccacctactactgccagcagcactacaccacccctcccaccttcggccagaccaaggtggaaatcaagagactcgaggacctgaagaacgtgttcccacctgaggtggccgtgttcgagcctagcgaggccgagatcagccacacccagaaagccaccctcgtgtgcctggctaccggcttctaccccgaccatgtggaactgtcttggtgggtcaacggcaaagaggtgcacagcggcgtgtgtaccgacccccagccactgaaagaacagcccgccctgaacgacagccggtactgcctgagcagcagactgagagtgtccgccaccttctggcagaacccccggaaccacttcagatgccaggtgcagttctacggcctgagcgagaacgacgagtggacccaggacagagccaagcccgtgacccagatcgtgtctgccgaagcctggggcagagccgattgcgacgtgaagctggtggaaaagagcttcgagacagacaccaacctgaacttccagaacctgagcgtgatcggcttcagaatcctgctgctgaaagtggccggctttaacctgctgatgaccctgcggctgtggtccagcagggccaagcgatctggatctggagcaacaaacttctcactactcaaacaagcaggtgacgtggaggagaatcccgggcctactagtatggactggatttggcgcatccttttccttgtcggcgctgctaccggcgcgcattccttcgaagaagtgcaactggtggaatctggcggcggactggtgcagcctggcggatctctgagactgagctgtgccgccagcggcttcaacatcaaggacacctacatccactgggtgcgccaggcccctggaaagggactggaatgggtggcccggatctaccccaccaacggctacaccagatacgccgacagcgtgaagggccggttcaccatcagcgccgacaccagcaagaataccgcctacctccagatgaacagcctgcgggccgaggataccgccgtgtactactgctcaagatggggaggcgacggcttctacgctatggacgtgtggggccagggcacccttgtgaccgtgtcatctacgcgtatccagaaccctgatcctgccgtgtaccagctgcgggatagcaagagcagcgacaagagcgtgtgtctgttcaccgacttcgacagccagaccaacgtgtcccagagcaaggactccgacgtgtacatcaccgataagtgcgtgctggacatgcggagcatggacttcaagagcaactccgccgtggcctggtccaacaagtccgatttcgcctgcgccaacgccttcaacaacagcattatccccgaggacacattcttcccaagccccgagagcagctgcggctttaccagcgagagctaccagcagggcgtgctgagcgccaccatcctgtacgagatcctgctgggcaaggccaccctgtacgccgtgctggtgtctgccctggtgctgatggctatggtcaagcggaaggacagccgggga

SEQ ID NO: 4326 - DNA, 2262 bp, synthetic construct
  source 1..2262: mol_type = other DNA
atggccttaccagtgaccgccttgctcctgccgctggccttgctgctccacgccgccaggccggaagtgcagctggttgaatctggcggaggactggttcagcctggcggatctctgagactgtcttgtgccgccagcggcttcagcttcagcgacttttggatgagctgggtccgacaggcccctggcaaaggacttgaatgggtcgccacaatcagccaggccggcagcgagaaggactacgtggactctgtgaagggcagattcaccatcagccgggacaacgccaagaagtccctgtacctccagatgaacagcctgagagccgaggacaccgccgtgtactattgtgcctctggcgtgtacagcttcgactacagaggccagggcaccctggtcacagtctcttctggtaccggcggaggcggatctggcggcggaggtagcggtggcggaggatctgaattcgaccagagcgtgctgacacagcctcctagcgtgtcagtggcccctggcaagaccgccagaatcccctgcgagggcaactacatcggcagcagcaacgtgcactggtatcagcagaagcccggccaggctcccgtgctcgtgatccacttcgacagcgacagacccagcggcatccccgacagattcagcggcagcaacagcggcaacatggctaccctgaccatcagcagagtggaagccggggacgaggccgactactactgtcaagtgtgggagaaccacggctgggtgttcggcggaggcaccaagctgacagtgctgtctctcgaggacctgaagaacgtgttcccacctgaggtggccgtgttcgagcctagcgaggccgagatcagccacacccagaaagccaccctcgtgtgcctggctaccggcttctaccccgaccatgtggaactgtcttggtgggtcaacggcaaagaggtgcacagcggcgtgtgtaccgacccccagccactgaaagaacagcccgccctgaacgacagccggtactgcctgagcagcagactgagagtgtccgccaccttctggcagaacccccggaaccacttcagatgccaggtgcagttctacggcctgagcgagaacgacgagtggacccaggacagagccaagcccgtgacccagatcgtgtctgccgaagcctggggcagagccgattgcgacgtgaagctggtggaaaagagcttcgagacagacaccaacctgaacttccagaacctgagcgtgatcggcttcagaatcctgctgctgaaagtggccggctttaacctgctgatgaccctgcggctgtggtccagcagggccaagcgatctggatctggagcaacaaacttctcactactcaaacaagcaggtgacgtggaggagaatcccgggcctactagtatggactggatttggcgcatccttttccttgtcggcgctgctaccggcgcgcattccttcgaagaggtgcaactggtggaaacaggcggcggactggtgcagcctggcgagtctctgagactgagctgtgccgccagcggcttcaccttcagcgactacgagatgaactgggtgcgccaggcccctggaaagggcctggaatgggtgtcctacatcagcagctccggcagcaccatctactacgccgacagcgtgaagggccggtttaccatctaccgggacaacgccaagaacagcctgtacctccagatgaactccctgcgggccgaggacaccgccctgtactattgtgccagagcctggggcgtgggaccccctgattattggggacagggcaccctcgtgaccgtgtcctctacgcgtatccagaaccctgatcctgccgtgtaccagctgcgggatagcaagagcagcgacaagagcgtgtgtctgttcaccgacttcgacagccagaccaacgtgtcccagagcaaggactccgacgtgtacatcaccgataagtgcgtgctggacatgcggagcatggacttcaagagcaactccgccgtggcctggtccaacaagtccgatttcgcctgcgccaacgccttcaacaacagcattatccccgaggacacattcttcccaagccccgagagcagctgcggctttaccagcgagagctaccagcagggcgtgctgagcgccaccatcctgtacgagatcctgctgggcaaggccaccctgtacgccgtgctggtgtctgccctggtgctgatggctatggtcaagcggaaggacagccgggga

SEQ ID NO: 4327 - DNA, 2286 bp, synthetic construct
  source 1..2286: mol_type = other DNA
atggccttaccagtgaccgccttgctcctgccgctggccttgctgctccacgccgccaggccggaagtgcagctggttgaatctggcggaggactggttcagcctggcggatctctgagactgtcttgtgccgccagcggcttcagcttcagcgacttttggatgagctgggtccgacaggcccctggcaaaggacttgaatgggtcgccacaatcagccaggccggcagcgagaaggactacgtggactctgtgaagggcagattcaccatcagccgggacaacgccaagaagtccctgtacctccagatgaacagcctgagagccgaggacaccgccgtgtactattgtgcctctggcgtgtacagcttcgactacagaggccagggcaccctggtcacagtctcttctggtaccggcggaggcggatctggcggcggaggtagcggtggcggaggatctgaattcgacatccagatgacccagagccccagcagcctgtctgccagcgtgggcgataccgtgaccatcacctgtcaggccaacggctacctgaactggtatcagcagcggagaggcaaggcccccaagctgctgatctacgacggcagcaagctggaaagaggcgtgcccagcagattcagcggcagaagatggggccaggagtacaacctgaccatcaacaacctccagcccgaggatattgccacatacttttgccaggtgtacgagttcgtggtgcccggcacacggctggacctgaagagaacagtggctgctcctctcgaggacctgaagaacgtgttcccacctgaggtggccgtgttcgagcctagcgaggccgagatcagccacacccagaaagccaccctcgtgtgcctggctaccggcttctaccccgaccatgtggaactgtcttggtgggtcaacggcaaagaggtgcacagcggcgtgtgtaccgacccccagccactgaaagaacagcccgccctgaacgacagccggtactgcctgagcagcagactgagagtgtccgccaccttctggcagaacccccggaaccacttcagatgccaggtgcagttctacggcctgagcgagaacgacgagtggacccaggacagagccaagcccgtgacccagatcgtgtctgccgaagcctggggcagagccgattgcgacgtgaagctggtggaaaagagcttcgagacagacaccaacctgaacttccagaacctgagcgtgatcggcttcagaatcctgctgctgaaagtggccggctttaacctgctgatgaccctgcggctgtggtccagcagggccaagcgatctggatctggagcaacaaacttctcactactcaaacaagcaggtgacgtggaggagaatcccgggcctactagtatggactggatttggcgcatccttttccttgtcggcgctgctaccggcgcgcattccttcgaacaggtgcagctgctccagtctggcgctgccgtgacaaagcctggcgcttctgtgcgggtgtcctgtgaagccagcggctacaacatccgggactacttcatccactggtggcggcaggctccaggccagggactccagtgggtgggatggatcaaccccaagaccggccagcccaacaaccccagacagttccagggcagagtgtccctgaccagacacgccagctgggacttcgacaccttcagcttctacatggatctgaaggccctgcggagcgacgataccgccgtgtacttctgcgccagacagagaagcgactactgggatttcgacgtgtggggcagcggcacccaagtgacagtgtctagcgccagcaccaagggacccacgcgtatccagaaccctgatcctgccgtgtaccagctgcgggatagcaagagcagcgacaagagcgtgtgtctgttcaccgacttcgacagccagaccaacgtgtcccagagcaaggactccgacgtgtacatcaccgataagtgcgtgctggacatgcggagcatggacttcaagagcaactccgccgtggcctggtccaacaagtccgatttcgcctgcgccaacgccttcaacaacagcattatccccgaggacacattcttcccaagccccgagagcagctgcggctttaccagcgagagctaccagcagggcgtgctgagcgccaccatcctgtacgagatcctgctgggcaaggccaccctgtacgccgtgctggtgtctgccctggtgctgatggctatggtcaagcggaaggacagccgggga

SEQ ID NO: 4328 - DNA, 2304 bp, synthetic construct
  source 1..2304: mol_type = other DNA
atggccttaccagtgaccgccttgctcctgccgctggccttgctgctccacgccgccaggccggaagtgcagctggttgaatctggcggaggactggttcagcctggcggatctctgagactgtcttgtgccgccagcggcttcagcttcagcgacttttggatgagctgggtccgacaggcccctggcaaaggacttgaatgggtcgccacaatcagccaggccggcagcgagaaggactacgtggactctgtgaagggcagattcaccatcagccgggacaacgccaagaagtccctgtacctccagatgaacagcctgagagccgaggacaccgccgtgtactattgtgcctctggcgtgtacagcttcgactacagaggccagggcaccctggtcacagtctcttctggtaccggcggaggcggatctggcggcggaggtagcggtggcggaggatctgaattccagtctgccctgacacagcctcctagcgcctctggctctcccggccagagcatcaccatcagctgtaccggcaccagcaacaacttcgtgtcctggtatcagcagcacgccggcaaggcccccaagctcgtgatctacgacgtgaacaagcggcccagcggcgtgcccgatagattcagcggcagcaagagcggcaacaccgccagcctgacagtgtctggcctccagaccgatgacgaggccgtgtactactgcggcagcctcgtgggcaactgggacgtgatctttggcggaggcaccaagctgaccgtgctgctcgaggacctgaagaacgtgttcccacctgaggtggccgtgttcgagcctagcgaggccgagatcagccacacccagaaagccaccctcgtgtgcctggctaccggcttctaccccgaccatgtggaactgtcttggtgggtcaacggcaaagaggtgcacagcggcgtgtgtaccgacccccagccactgaaagaacagcccgccctgaacgacagccggtactgcctgagcagcagactgagagtgtccgccaccttctggcagaacccccggaaccacttcagatgccaggtgcagttctacggcctgagcgagaacgacgagtggacccaggacagagccaagcccgtgacccagatcgtgtctgccgaagcctggggcagagccgattgcgacgtgaagctggtggaaaagagcttcgagacagacaccaacctgaacttccagaacctgagcgtgatcggcttcagaatcctgctgctgaaagtggccggctttaacctgctgatgaccctgcggctgtggtccagcagggccaagcgatctggatctggagcaacaaacttctcactactcaaacaagcaggtgacgtggaggagaatcccgggcctactagtatggactggatttggcgcatccttttccttgtcggcgctgctaccggcgcgcattccttcgaacagccccagctccaggaatctggccccacactggtggaagccagcgagacactgagcctgacctgtgccgtgtccggcgattctaccgccgcctgcaatagcttctggggctgggtgcgccagcctcctggaaagggactggaatgggtgggaagcctgagccactgcgccagctattggaaccggggctggacctaccacaaccccagcctgaagtccagactgaccctggccctggacacccccaagaacctggtgttcctgaagctgaacagcgtgacagccgccgacaccgccacctactactgtgccagatttggcggcgaggtgctgcggtacaccgactggcctaaacctgcctgggtggacctgtggggcagaggaacactcgtgaccgtgtccagcacgcgtatccagaaccctgatcctgccgtgtaccagctgcgggatagcaagagcagcgacaagagcgtgtgtctgttcaccgacttcgacagccagaccaacgtgtcccagagcaaggactccgacgtgtacatcaccgataagtgcgtgctggacatgcggagcatggacttcaagagcaactccgccgtggcctggtccaacaagtccgatttcgcctgcgccaacgccttcaacaacagcattatccccgaggacacattcttcccaagccccgagagcagctgcggctttaccagcgagagctaccagcagggcgtgctgagcgccaccatcctgtacgagatcctgctgggcaaggccaccctgtacgccgtgctggtgtctgccctggtgctgatggctatggtcaagcggaaggacagccgggga

SEQ ID NO: 4329 - DNA, 2259 bp, synthetic construct
  source 1..2259: mol_type = other DNA
atggccttaccagtgaccgccttgctcctgccgctggccttgctgctccacgccgccaggccggaagtgcagctggttgaatctggcggaggactggttcagcctggcggatctctgagactgtcttgtgccgccagcggcttcagcttcagcgacttttggatgagctgggtccgacaggcccctggcaaaggacttgaatgggtcgccacaatcagccaggccggcagcgagaaggactacgtggactctgtgaagggcagattcaccatcagccgggacaacgccaagaagtccctgtacctccagatgaacagcctgagagccgaggacaccgccgtgtactattgtgcctctggcgtgtacagcttcgactacagaggccagggcaccctggtcacagtctcttctggtaccggcggaggcggatctggcggcggaggtagcggtggcggaggatctgaattcgagatcgtgctgacacagagccctggcaccctgagcctgtctccaggcgagacagccatcatcagctgccggacaagccagtacggcagcctggcctggtatcagcagaggccaggacaggcccccagactcgtgatctacagcggcagcacaagagccgccggaatccccgatagattcagcggctccagatggggacccgactacaacctgaccatcagcaacctggaaagcggcgacttcggcgtgtactactgccagcagtacgagttcttcggccagggcaccaaggtgcaggtggacatcaaaagactcgaggacctgaagaacgtgttcccacctgaggtggccgtgttcgagcctagcgaggccgagatcagccacacccagaaagccaccctcgtgtgcctggctaccggcttctaccccgaccatgtggaactgtcttggtgggtcaacggcaaagaggtgcacagcggcgtgtgtaccgacccccagccactgaaagaacagcccgccctgaacgacagccggtactgcctgagcagcagactgagagtgtccgccaccttctggcagaacccccggaaccacttcagatgccaggtgcagttctacggcctgagcgagaacgacgagtggacccaggacagagccaagcccgtgacccagatcgtgtctgccgaagcctggggcagagccgattgcgacgtgaagctggtggaaaagagcttcgagacagacaccaacctgaacttccagaacctgagcgtgatcggcttcagaatcctgctgctgaaagtggccggctttaacctgctgatgaccctgcggctgtggtccagcagggccaagcgatctggatctggagcaacaaacttctcactactcaaacaagcaggtgacgtggaggagaatcccgggcctactagtatggactggatttggcgcatccttttccttgtcggcgctgctaccggcgcgcattccttcgaacaggtgcagctggtgcagtctggcggccagatgaagaaacccggcgagagcatgagaatcagctgtcgggcctccggctacgagttcatcgactgcaccctgaactggatcagactggcccctggcaagcggcctgagtggatgggatggctgaagcctagaggcggagccgtgaactacgccagacctctccagggcagagtgaccatgaccagggacgtgtacagcgataccgccttcctggaactgcggagcctgaccgtggatgataccgccgtgtacttctgcaccagaggcaagaactgcgattacaactgggacttcgagcactggggcagaggcacccctgtgatcgtgtctagcacgcgtatccagaaccctgatcctgccgtgtaccagctgcgggatagcaagagcagcgacaagagcgtgtgtctgttcaccgacttcgacagccagaccaacgtgtcccagagcaaggactccgacgtgtacatcaccgataagtgcgtgctggacatgcggagcatggacttcaagagcaactccgccgtggcctggtccaacaagtccgatttcgcctgcgccaacgccttcaacaacagcattatccccgaggacacattcttcccaagccccgagagcagctgcggctttaccagcgagagctaccagcagggcgtgctgagcgccaccatcctgtacgagatcctgctgggcaaggccaccctgtacgccgtgctggtgtctgccctggtgctgatggctatggtcaagcggaaggacagccgggga

SEQ ID NO: 4330 - DNA, 2289 bp, synthetic construct
  source 1..2289: mol_type = other DNA
atggccttaccagtgaccgccttgctcctgccgctggccttgctgctccacgccgccaggccggaagtgcagctggttgaatctggcggaggactggttcagcctggcggatctctgagactgtcttgtgccgccagcggcttcagcttcagcgacttttggatgagctgggtccgacaggcccctggcaaaggacttgaatgggtcgccacaatcagccaggccggcagcgagaaggactacgtggactctgtgaagggcagattcaccatcagccgggacaacgccaagaagtccctgtacctccagatgaacagcctgagagccgaggacaccgccgtgtactattgtgcctctggcgtgtacagcttcgactacagaggccagggcaccctggtcacagtctcttctggtaccggcggaggcggatctggcggcggaggtagcggtggcggaggatctgaattcgagctggtgctgacacagagccctggcaccctgtctctgtctgccggcgaaagagccaccctgagctgtagagccagccagagcgtgtcctctggcagcctggcttggtatcagcagaagccaggccaggcccccagactgctgatctacggcgcttctaccagagccaccggcatccccgatagattcagcggctctggctccggcaccgacttcaccctgacaatcggcagactggaacccgaggacctggccgtgtactactgccagcagtacggcaccagcccctacacattcggccagggcaccaagctggaaatcctcgaggacctgaagaacgtgttcccacctgaggtggccgtgttcgagcctagcgaggccgagatcagccacacccagaaagccaccctcgtgtgcctggctaccggcttctaccccgaccatgtggaactgtcttggtgggtcaacggcaaagaggtgcacagcggcgtgtgtaccgacccccagccactgaaagaacagcccgccctgaacgacagccggtactgcctgagcagcagactgagagtgtccgccaccttctggcagaacccccggaaccacttcagatgccaggtgcagttctacggcctgagcgagaacgacgagtggacccaggacagagccaagcccgtgacccagatcgtgtctgccgaagcctggggcagagccgattgcgacgtgaagctggtggaaaagagcttcgagacagacaccaacctgaacttccagaacctgagcgtgatcggcttcagaatcctgctgctgaaagtggccggctttaacctgctgatgaccctgcggctgtggtccagcagggccaagcgatctggatctggagcaacaaacttctcactactcaaacaagcaggtgacgtggaggagaatcccgggcctactagtatggactggatttggcgcatccttttccttgtcggcgctgctaccggcgcgcattccttcgaactggaacagagcggagccgaagtgaagaaacccggcagcagcgtgcaggtgtcctgcaaagcaagcggcggcaccttctctatgtacggcttcaactgggtgcgccaggctcctggacacggcctggaatggatgggcggcatcatccccatcttcggcacctccaactacgcccagaaattccggggcagagtgaccttcaccgccgaccaggccacaagcaccgcctacatggaactgaccaacctgcggagcgacgacaccgccgtgtattattgcgccagagacttcggccccgactgggaggatggcgacagctacgatggcagcggcagaggcttcttcgacttctggggccagggaacccttgtgaccgtgtcctcaacgcgtatccagaaccctgatcctgccgtgtaccagctgcgggatagcaagagcagcgacaagagcgtgtgtctgttcaccgacttcgacagccagaccaacgtgtcccagagcaaggactccgacgtgtacatcaccgataagtgcgtgctggacatgcggagcatggacttcaagagcaactccgccgtggcctggtccaacaagtccgatttcgcctgcgccaacgccttcaacaacagcattatccccgaggacacattcttcccaagccccgagagcagctgcggctttaccagcgagagctaccagcagggcgtgctgagcgccaccatcctgtacgagatcctgctgggcaaggccaccctgtacgccgtgctggtgtctgccctggtgctgatggctatggtcaagcggaaggacagccgggga

SEQ ID NO: 4331 - DNA, 2229 bp, synthetic construct
  source 1..2229: mol_type = other DNA
atggccttaccagtgaccgccttgctcctgccgctggccttgctgctccacgccgccaggccggaagtgcagctggttgaatctggcggaggactggttcagcctggcggatctctgagactgtcttgtgccgccagcggcttcagcttcagcgacttttggatgagctgggtccgacaggcccctggcaaaggacttgaatgggtcgccacaatcagccaggccggcagcgagaaggactacgtggactctgtgaagggcagattcaccatcagccgggacaacgccaagaagtccctgtacctccagatgaacagcctgagagccgaggacaccgccgtgtactattgtgcctctggcgtgtacagcttcgactacagaggccagggcaccctggtcacagtctcttctggtaccggcggaggcggatctggcggcggaggtagcggtggcggaggatctgaattcgacatccagatgacccagagccccagcagcctgtctgccagcgtgggcgacagagtgaccatcacctgtcaggccagccaggacatcaacaactacctgaactggtatcagcagaagcccggcaaggcccccaagctgctgatctacgacgccagcaatctgcagaccggcgtgcccagcagattttccggctctggcagcggcaccgacttcaccttcaccatcgaggacattgccacctactactgccagcagtacaccttcggccctggcaccaaggtggacatcaaactcgaggacctgaagaacgtgttcccacctgaggtggccgtgttcgagcctagcgaggccgagatcagccacacccagaaagccaccctcgtgtgcctggctaccggcttctaccccgaccatgtggaactgtcttggtgggtcaacggcaaagaggtgcacagcggcgtgtgtaccgacccccagccactgaaagaacagcccgccctgaacgacagccggtactgcctgagcagcagactgagagtgtccgccaccttctggcagaacccccggaaccacttcagatgccaggtgcagttctacggcctgagcgagaacgacgagtggacccaggacagagccaagcccgtgacccagatcgtgtctgccgaagcctggggcagagccgattgcgacgtgaagctggtggaaaagagcttcgagacagacaccaacctgaacttccagaacctgagcgtgatcggcttcagaatcctgctgctgaaagtggccggctttaacctgctgatgaccctgcggctgtggtccagcagggccaagcgatctggatctggagcaacaaacttctcactactcaaacaagcaggtgacgtggaggagaatcccgggcctactagtatggactggatttggcgcatccttttccttgtcggcgctgctaccggcgcgcattccttcgaagaagtgcaactgctggaatctggcggcggactggtgcagcctggcggatctctgagactgagctgtgccgccagcggcttcacctttagctggtacagcatgacctgggtgcgccaggcccctggcaaaggactggaatgggtgtccagcatcgtgccctggggcgatttcacccagtacgccgatagcgtgaagggccggttcaccatcagccgggacaacagcaagaacaccctgtacctgcagatgaacagcctgcgggccgaggacaccgccgtgtactattgtgccaagggacctggctggggcagcttcgatctgtggggcagaggaacccttgtgaccgtgtccagcacgcgtatccagaaccctgatcctgccgtgtaccagctgcgggatagcaagagcagcgacaagagcgtgtgtctgttcaccgacttcgacagccagaccaacgtgtcccagagcaaggactccgacgtgtacatcaccgataagtgcgtgctggacatgcggagcatggacttcaagagcaactccgccgtggcctggtccaacaagtccgatttcgcctgcgccaacgccttcaacaacagcattatccccgaggacacattcttcccaagccccgagagcagctgcggctttaccagcgagagctaccagcagggcgtgctgagcgccaccatcctgtacgagatcctgctgggcaaggccaccctgtacgccgtgctggtgtctgccctggtgctgatggctatggtcaagcggaaggacagccgggga

SEQ ID NO: 4332 - DNA, 2259 bp, synthetic construct
  source 1..2259: mol_type = other DNA
atggccttaccagtgaccgccttgctcctgccgctggccttgctgctccacgccgccaggccggaagtgcagctggttgaatctggcggaggactggttcagcctggcggatctctgagactgtcttgtgccgccagcggcttcagcttcagcgacttttggatgagctgggtccgacaggcccctggcaaaggacttgaatgggtcgccacaatcagccaggccggcagcgagaaggactacgtggactctgtgaagggcagattcaccatcagccgggacaacgccaagaagtccctgtacctccagatgaacagcctgagagccgaggacaccgccgtgtactattgtgcctctggcgtgtacagcttcgactacagaggccagggcaccctggtcacagtctcttctggtaccggcggaggcggatctggcggcggaggtagcggtggcggaggatctgaattcgacatccagatgacccagagccccagcagcctgtctgccagcgtgggcgacagagtgaccatcacctgtaccgccagcctgagcgtgtccagcacctacctgcactggtatcagcagaagcccggcagcagccccaagctgtggatctacagcaccagcaacctggcctccggcgtgcccagcagattttctggcagcggctctggcaccagctacaccctgaccatcagctccctccagcccgaggacttcgccacctactactgccaccagtaccacagaagccccctgacctttggcggaggcaccaaggtggaaatcaagagactcgaggacctgaagaacgtgttcccacctgaggtggccgtgttcgagcctagcgaggccgagatcagccacacccagaaagccaccctcgtgtgcctggctaccggcttctaccccgaccatgtggaactgtcttggtgggtcaacggcaaagaggtgcacagcggcgtgtgtaccgacccccagccactgaaagaacagcccgccctgaacgacagccggtactgcctgagcagcagactgagagtgtccgccaccttctggcagaacccccggaaccacttcagatgccaggtgcagttctacggcctgagcgagaacgacgagtggacccaggacagagccaagcccgtgacccagatcgtgtctgccgaagcctggggcagagccgattgcgacgtgaagctggtggaaaagagcttcgagacagacaccaacctgaacttccagaacctgagcgtgatcggcttcagaatcctgctgctgaaagtggccggctttaacctgctgatgaccctgcggctgtggtccagcagggccaagcgatctggatctggagcaacaaacttctcactactcaaacaagcaggtgacgtggaggagaatcccgggcctactagtatggactggatttggcgcatccttttccttgtcggcgctgctaccggcgcgcattccttcgaagaagtgcaactggtggaatctggcggcggactggtgcagcctggcggatctctgagactgagctgtgccgccagcggcttcagcctgaccaaatacggcgtgcactgggtgcgccaggcccctggaaaaggactggaatgggtgggagtgaagtgggctggcggctccaccgactacaacagcgccctgatgagccggttcaccatcagcaaggacaacgccaagaacagcctgtacctccagatgaactccctgcgggccgaggacaccgccgtgtactactgtgccagagatcaccgggacgctatggactactggggccagggaacactcgtgaccgtgtcctctacgcgtatccagaaccctgatcctgccgtgtaccagctgcgggatagcaagagcagcgacaagagcgtgtgtctgttcaccgacttcgacagccagaccaacgtgtcccagagcaaggactccgacgtgtacatcaccgataagtgcgtgctggacatgcggagcatggacttcaagagcaactccgccgtggcctggtccaacaagtccgatttcgcctgcgccaacgccttcaacaacagcattatccccgaggacacattcttcccaagccccgagagcagctgcggctttaccagcgagagctaccagcagggcgtgctgagcgccaccatcctgtacgagatcctgctgggcaaggccaccctgtacgccgtgctggtgtctgccctggtgctgatggctatggtcaagcggaaggacagccgggga

SEQ ID NO: 4333 - DNA, 2271 bp, synthetic construct
  source 1..2271: mol_type = other DNA
atggccttaccagtgaccgccttgctcctgccgctggccttgctgctccacgccgccaggccggaagtgcagctggttgaatctggcggaggactggttcagcctggcggatctctgagactgtcttgtgccgccagcggcttcagcttcagcgacttttggatgagctgggtccgacaggcccctggcaaaggacttgaatgggtcgccacaatcagccaggccggcagcgagaaggactacgtggactctgtgaagggcagattcaccatcagccgggacaacgccaagaagtccctgtacctccagatgaacagcctgagagccgaggacaccgccgtgtactattgtgcctctggcgtgtacagcttcgactacagaggccagggcaccctggtcacagtctcttctggtaccggcggaggcggatctggcggcggaggtagcggtggcggaggatctgaattcgacatccagatgacccagagccccagcagcctgtctgccagcgtgggcgacagagtgaccatcacatgcaaggccagccaggacgtgggaacagccgtggcctggtatcagcagaagcctggcaaggcccccaagctgctgatctacagcgccagctacagatccaccggcgtgcccagcagattttccggctctggcagcggcaccgacttcaccctgaccatctctagcctccagcccgaggacttcgccacctactactgccagcaccactactccgccccctggacatttggcggaggcaccaaggtggaaatcaagctcgaggacctgaagaacgtgttcccacctgaggtggccgtgttcgagcctagcgaggccgagatcagccacacccagaaagccaccctcgtgtgcctggctaccggcttctaccccgaccatgtggaactgtcttggtgggtcaacggcaaagaggtgcacagcggcgtgtgtaccgacccccagccactgaaagaacagcccgccctgaacgacagccggtactgcctgagcagcagactgagagtgtccgccaccttctggcagaacccccggaaccacttcagatgccaggtgcagttctacggcctgagcgagaacgacgagtggacccaggacagagccaagcccgtgacccagatcgtgtctgccgaagcctggggcagagccgattgcgacgtgaagctggtggaaaagagcttcgagacagacaccaacctgaacttccagaacctgagcgtgatcggcttcagaatcctgctgctgaaagtggccggctttaacctgctgatgaccctgcggctgtggtccagcagggccaagcgatctggatctggagcaacaaacttctcactactcaaacaagcaggtgacgtggaggagaatcccgggcctactagtatggactggatttggcgcatccttttccttgtcggcgctgctaccggcgcgcattccttcgaagaagtgcaactggtggaatcaggcggcggactggtgcagcctggcggatctctgagactgagctgtgccgccagcggcttcaccttcagcagaaacggcatgagctgggtgcgccaggcccctggaaaaggactggaatgggtggcaaccgtgtccagcggcggcagctacatctactacgccgacagcgtgaagggccggttcaccatctccagagacaacgccaagaacagcctgtacctccagatgaactccctgcgggccgaggacaccgccgtgtactattgtgccagacagggcaccaccgccctggctaccagattcttcgatgtgtggggccagggcaccctcgtgaccgtgtcatctacgcgtatccagaaccctgatcctgccgtgtaccagctgcgggatagcaagagcagcgacaagagcgtgtgtctgttcaccgacttcgacagccagaccaacgtgtcccagagcaaggactccgacgtgtacatcaccgataagtgcgtgctggacatgcggagcatggacttcaagagcaactccgccgtggcctggtccaacaagtccgatttcgcctgcgccaacgccttcaacaacagcattatccccgaggacacattcttcccaagccccgagagcagctgcggctttaccagcgagagctaccagcagggcgtgctgagcgccaccatcctgtacgagatcctgctgggcaaggccaccctgtacgccgtgctggtgtctgccctggtgctgatggctatggtcaagcggaaggacagccgggga

SEQ ID NO: 4334 - DNA, 2259 bp, synthetic construct
  source 1..2259: mol_type = other DNA
atggccttaccagtgaccgccttgctcctgccgctggccttgctgctccacgccgccaggccggaagtgcagctggttgaatctggcggaggactggttcagcctggcggatctctgagactgtcttgtgccgccagcggcttcagcttcagcgacttttggatgagctgggtccgacaggcccctggcaaaggacttgaatgggtcgccacaatcagccaggccggcagcgagaaggactacgtggactctgtgaagggcagattcaccatcagccgggacaacgccaagaagtccctgtacctccagatgaacagcctgagagccgaggacaccgccgtgtactattgtgcctctggcgtgtacagcttcgactacagaggccagggcaccctggtcacagtctcttctggtaccggcggaggcggatctggcggcggaggtagcggtggcggaggatctgaattcgacatccagatgacccagagcccccctagcctgtctgcctctgtgggcggcaaagtgaccatcacatgcaaggccagccaggacatcgaccgctacatggcctggtatcaggacaagcccggcaagggacccaagctgctgatccacgataccagcaccctccagcccggcatccccagcagattttctggcagcggctccggcagagactacagcttcagcatcagcaacctggaacccgaggacattgccacctactactgcctccagtacgacaacctgtggaccttcggcggaggcaccaagctggaaatcaagagactcgaggacctgaagaacgtgttcccacctgaggtggccgtgttcgagcctagcgaggccgagatcagccacacccagaaagccaccctcgtgtgcctggctaccggcttctaccccgaccatgtggaactgtcttggtgggtcaacggcaaagaggtgcacagcggcgtgtgtaccgacccccagccactgaaagaacagcccgccctgaacgacagccggtactgcctgagcagcagactgagagtgtccgccaccttctggcagaacccccggaaccacttcagatgccaggtgcagttctacggcctgagcgagaacgacgagtggacccaggacagagccaagcccgtgacccagatcgtgtctgccgaagcctggggcagagccgattgcgacgtgaagctggtggaaaagagcttcgagacagacaccaacctgaacttccagaacctgagcgtgatcggcttcagaatcctgctgctgaaagtggccggctttaacctgctgatgaccctgcggctgtggtccagcagggccaagcgatctggatctggagcaacaaacttctcactactcaaacaagcaggtgacgtggaggagaatcccgggcctactagtatggactggatttggcgcatccttttccttgtcggcgctgctaccggcgcgcattccttcgaacaggtgcaactggtgcagagcggagccgagcttgtgaagcctggcgcttccgtgaagatgagctgcaaagccagcggctacatcttcaccaactacaacatccactgggtcaagaagtccccaggccagggcctggaatggatcggagccatctaccccggaaacggcgacgccccttacagccagaagttccaggacagagccaccctgaccgccgacaccagcagcagcaccacctacatggaactgagcagcctgaccagcgaggacagcgccgtgtactattgcgtgcgggccaactgggatgtggccttcgcctattggggccagggcacactggtgtccgtgtcctctacgcgtatccagaaccctgatcctgccgtgtaccagctgcgggatagcaagagcagcgacaagagcgtgtgtctgttcaccgacttcgacagccagaccaacgtgtcccagagcaaggactccgacgtgtacatcaccgataagtgcgtgctggacatgcggagcatggacttcaagagcaactccgccgtggcctggtccaacaagtccgatttcgcctgcgccaacgccttcaacaacagcattatccccgaggacacattcttcccaagccccgagagcagctgcggctttaccagcgagagctaccagcagggcgtgctgagcgccaccatcctgtacgagatcctgctgggcaaggccaccctgtacgccgtgctggtgtctgccctggtgctgatggctatggtcaagcggaaggacagccgggga

SEQ ID NO: 4335 - DNA, 2262 bp, synthetic construct
  source 1..2262: mol_type = other DNA
atggccttaccagtgaccgccttgctcctgccgctggccttgctgctccacgccgccaggccggaagtgcagctggttgaatctggcggaggactggttcagcctggcggatctctgagactgtcttgtgccgccagcggcttcagcttcagcgacttttggatgagctgggtccgacaggcccctggcaaaggacttgaatgggtcgccacaatcagccaggccggcagcgagaaggactacgtggactctgtgaagggcagattcaccatcagccgggacaacgccaagaagtccctgtacctccagatgaacagcctgagagccgaggacaccgccgtgtactattgtgcctctggcgtgtacagcttcgactacagaggccagggcaccctggtcacagtctcttctggtaccggcggaggcggatctggcggcggaggtagcggtggcggaggatctgaattcgacatccagatgacccagagccctgccagcctgtctgcctctgtgggcgagacagtgaccatcacctgtcgggtgtccggcaacatccacaactacctggcctggtatcagcagaagcagggcaagagcccccaactgctggtgtacaacgccaagaccctggccgatggcgtgcccagcagattttctggctctggcagcggcacccagtacagcctgaagatcaacagcctccagcccgaggacttcggcagctactactgccagcacttctggtccaacccctacaccttcggcggaggcaccaagctggaaatcaagctcgaggacctgaagaacgtgttcccacctgaggtggccgtgttcgagcctagcgaggccgagatcagccacacccagaaagccaccctcgtgtgcctggctaccggcttctaccccgaccatgtggaactgtcttggtgggtcaacggcaaagaggtgcacagcggcgtgtgtaccgacccccagccactgaaagaacagcccgccctgaacgacagccggtactgcctgagcagcagactgagagtgtccgccaccttctggcagaacccccggaaccacttcagatgccaggtgcagttctacggcctgagcgagaacgacgagtggacccaggacagagccaagcccgtgacccagatcgtgtctgccgaagcctggggcagagccgattgcgacgtgaagctggtggaaaagagcttcgagacagacaccaacctgaacttccagaacctgagcgtgatcggcttcagaatcctgctgctgaaagtggccggctttaacctgctgatgaccctgcggctgtggtccagcagggccaagcgatctggatctggagcaacaaacttctcactactcaaacaagcaggtgacgtggaggagaatcccgggcctactagtatggactggatttggcgcatccttttccttgtcggcgctgctaccggcgcgcattccttcgaacaggtgcaactccagcagtctggcgcttccgtgaaggtgtcctgcaaggccagcgaactcgtgcggcctggcacaggctacgccttcaccaattacctgatcgagtgggtcaagcagaggcccggacagggcctggaatggatcggagtgattaacccaggcagcggcggcaccaactacaacgagaagttcaagggcaaggccaccctgaccgccgacaagagcagcagcacagcctacatgcaactgagcagcctgaccagcgacgacagcgccgtgtacttctgcgcccggtacagaagctacgactggtacttcgacgtgtggggagccggcaccaccgtgacagtgtcatctacgcgtatccagaaccctgatcctgccgtgtaccagctgcgggatagcaagagcagcgacaagagcgtgtgtctgttcaccgacttcgacagccagaccaacgtgtcccagagcaaggactccgacgtgtacatcaccgataagtgcgtgctggacatgcggagcatggacttcaagagcaactccgccgtggcctggtccaacaagtccgatttcgcctgcgccaacgccttcaacaacagcattatccccgaggacacattcttcccaagccccgagagcagctgcggctttaccagcgagagctaccagcagggcgtgctgagcgccaccatcctgtacgagatcctgctgggcaaggccaccctgtacgccgtgctggtgtctgccctggtgctgatggctatggtcaagcggaaggacagccgggga

SEQ ID NO: 4336 - DNA, 2259 bp, synthetic construct
  source 1..2259: mol_type = other DNA
atggccttaccagtgaccgccttgctcctgccgctggccttgctgctccacgccgccaggccggaagtgcagctggttgaatctggcggaggactggttcagcctggcggatctctgagactgtcttgtgccgccagcggcttcagcttcagcgacttttggatgagctgggtccgacaggcccctggcaaaggacttgaatgggtcgccacaatcagccaggccggcagcgagaaggactacgtggactctgtgaagggcagattcaccatcagccgggacaacgccaagaagtccctgtacctccagatgaacagcctgagagccgaggacaccgccgtgtactattgtgcctctggcgtgtacagcttcgactacagaggccagggcaccctggtcacagtctcttctggtaccggcggaggcggatctggcggcggaggtagcggtggcggaggatctgaattcgacatccagatgacccagagcttcagcagcctgagcgccagcgtgggcgacagagtgaccatcacctgtagagccagccaggacatcagcaactacctgaactggtatcagcagaagcccggcaaggcccccaagctgctgatctactacaccagcagactgcacagcggcgtgcccagcagattttctggcagcggctccggcaccgactacaccctgacaatcagctccctgcagcccgaggacttcgctacctacttctgtcagcaaggcaacaccctgccctggacctttggcggaggcaccaagctggaaatcaagagactcgaggacctgaagaacgtgttcccacctgaggtggccgtgttcgagcctagcgaggccgagatcagccacacccagaaagccaccctcgtgtgcctggctaccggcttctaccccgaccatgtggaactgtcttggtgggtcaacggcaaagaggtgcacagcggcgtgtgtaccgacccccagccactgaaagaacagcccgccctgaacgacagccggtactgcctgagcagcagactgagagtgtccgccaccttctggcagaacccccggaaccacttcagatgccaggtgcagttctacggcctgagcgagaacgacgagtggacccaggacagagccaagcccgtgacccagatcgtgtctgccgaagcctggggcagagccgattgcgacgtgaagctggtggaaaagagcttcgagacagacaccaacctgaacttccagaacctgagcgtgatcggcttcagaatcctgctgctgaaagtggccggctttaacctgctgatgaccctgcggctgtggtccagcagggccaagcgatctggatctggagcaacaaacttctcactactcaaacaagcaggtgacgtggaggagaatcccgggcctactagtatggactggatttggcgcatccttttccttgtcggcgctgctaccggcgcgcattccttcgaagaagtgcaactggtgcagtccggcggagggctggtgcagagcggaggatctctgagactgagctgcagagccagcggctacaccttcacccggtactggatgctgtgggtgcgccagaggccaggcaagggactggaatgggtggccgagatcaacccccggaacgaccggaccaactacaacgagaagttcaagacccggttcaccatcagcgtggacagaagcaagaacaccctgtacctgcagatggacagcctgcgggccgaggataccgccgtgtacttttgtgctctgggaggcggctacgctatggactactggggccagggaacccttgtgaccgtgtcctctacgcgtatccagaaccctgatcctgccgtgtaccagctgcgggatagcaagagcagcgacaagagcgtgtgtctgttcaccgacttcgacagccagaccaacgtgtcccagagcaaggactccgacgtgtacatcaccgataagtgcgtgctggacatgcggagcatggacttcaagagcaactccgccgtggcctggtccaacaagtccgatttcgcctgcgccaacgccttcaacaacagcattatccccgaggacacattcttcccaagccccgagagcagctgcggctttaccagcgagagctaccagcagggcgtgctgagcgccaccatcctgtacgagatcctgctgggcaaggccaccctgtacgccgtgctggtgtctgccctggtgctgatggctatggtcaagcggaaggacagccgggga

SEQ ID NO: 4337 - DNA, 2262 bp, synthetic construct
  source 1..2262: mol_type = other DNA
atggccttaccagtgaccgccttgctcctgccgctggccttgctgctccacgccgccaggccggaagtgcagctggttgaatctggcggaggactggttcagcctggcggatctctgagactgtcttgtgccgccagcggcttcagcttcagcgacttttggatgagctgggtccgacaggcccctggcaaaggacttgaatgggtcgccacaatcagccaggccggcagcgagaaggactacgtggactctgtgaagggcagattcaccatcagccgggacaacgccaagaagtccctgtacctccagatgaacagcctgagagccgaggacaccgccgtgtactattgtgcctctggcgtgtacagcttcgactacagaggccagggcaccctggtcacagtctcttctggtaccggcggaggcggatctggcggcggaggtagcggtggcggaggatctgaattcgacatccagatgacacagtctccggcgtcactgtccgcctccgtgggggagactgtgactattatttgtagggcatcagttaacatctactcttatttggcctggtaccagcagaagcaaggcaagagtcctcagctgctggtgtataatgcgaagatcctggcagagggcgtgccgagccggttctccggcagcggctcaggtacccaattttccctcaagatcaattcactgcagccagaggactttggcagttactattgtcaacaccactacggcacattcactttcgggtccggtacaaaattggagattaagcgactcgaggacctgaagaacgtgttcccacctgaggtggccgtgttcgagcctagcgaggccgagatcagccacacccagaaagccaccctcgtgtgcctggctaccggcttctaccccgaccatgtggaactgtcttggtgggtcaacggcaaagaggtgcacagcggcgtgtgtaccgacccccagccactgaaagaacagcccgccctgaacgacagccggtactgcctgagcagcagactgagagtgtccgccaccttctggcagaacccccggaaccacttcagatgccaggtgcagttctacggcctgagcgagaacgacgagtggacccaggacagagccaagcccgtgacccagatcgtgtctgccgaagcctggggcagagccgattgcgacgtgaagctggtggaaaagagcttcgagacagacaccaacctgaacttccagaacctgagcgtgatcggcttcagaatcctgctgctgaaagtggccggctttaacctgctgatgaccctgcggctgtggtccagcagggccaagcgatctggatctggagcaacaaacttctcactactcaaacaagcaggtgacgtggaggagaatcccgggcctactagtatggactggatttggcgcatccttttccttgtcggcgctgctaccggcgcgcattccttcgaacaggtacagttgaaagaaagcgggcctggactggtagcgccttcccaatctctctccatcacgtgcaccatctctggcttctccctgacttcctatggagttcactgggtgaggcagccccccggcaagggactggaatggctggtcgtcatctggtccgacgggtccacaacctacaactccgctctgaaaagtcggctctctatttctaaagataatagcaagagccaggtgtttctgaaaatgaactctctgcagaccgatgatacggccatttactactgcgcttcacactatggctcaaccttggcattcgcttcctggggccacggaacactggtgaccgtttccgcagccacgcgtatccagaaccctgatcctgccgtgtaccagctgcgggatagcaagagcagcgacaagagcgtgtgtctgttcaccgacttcgacagccagaccaacgtgtcccagagcaaggactccgacgtgtacatcaccgataagtgcgtgctggacatgcggagcatggacttcaagagcaactccgccgtggcctggtccaacaagtccgatttcgcctgcgccaacgccttcaacaacagcattatccccgaggacacattcttcccaagccccgagagcagctgcggctttaccagcgagagctaccagcagggcgtgctgagcgccaccatcctgtacgagatcctgctgggcaaggccaccctgtacgccgtgctggtgtctgccctggtgctgatggctatggtcaagcggaaggacagccgggga

SEQ ID NO: 4338 - DNA, 2286 bp, synthetic construct
  source 1..2286: mol_type = other DNA
atggccttaccagtgaccgccttgctcctgccgctggccttgctgctccacgccgccaggccggaagtgcagctggttgaatctggcggaggactggttcagcctggcggatctctgagactgtcttgtgccgccagcggcttcagcttcagcgacttttggatgagctgggtccgacaggcccctggcaaaggacttgaatgggtcgccacaatcagccaggccggcagcgagaaggactacgtggactctgtgaagggcagattcaccatcagccgggacaacgccaagaagtccctgtacctccagatgaacagcctgagagccgaggacaccgccgtgtactattgtgcctctggcgtgtacagcttcgactacagaggccagggcaccctggtcacagtctcttctggtaccggcggaggcggatctggcggcggaggtagcggtggcggaggatctgaattcgacattgtgatgacccagtctcacaaattcatgtccacatcagtaggagacagggtcagcgtcacctgcaaggccagtcagaatgtgggtaataatgtagcctggtatcaacagaaaccagggcaatctcctaaagtactgatttactcggcatcctaccggtacagtggagtccctgatcgcttcacaggcagtggatctgggacagatttcactctcaccatcagtaatgtgcagtctgaagacttggcagagtatttctgtcagcaatataacacctatccattcacgttcggctcggggacaaagttggaaataaaactcgaggacctgaagaacgtgttcccacctgaggtggccgtgttcgagcctagcgaggccgagatcagccacacccagaaagccaccctcgtgtgcctggctaccggcttctaccccgaccatgtggaactgtcttggtgggtcaacggcaaagaggtgcacagcggcgtgtgtaccgacccccagccactgaaagaacagcccgccctgaacgacagccggtactgcctgagcagcagactgagagtgtccgccaccttctggcagaacccccggaaccacttcagatgccaggtgcagttctacggcctgagcgagaacgacgagtggacccaggacagagccaagcccgtgacccagatcgtgtctgccgaagcctggggcagagccgattgcgacgtgaagctggtggaaaagagcttcgagacagacaccaacctgaacttccagaacctgagcgtgatcggcttcagaatcctgctgctgaaagtggccggctttaacctgctgatgaccctgcggctgtggtccagcagggccaagcgatctggatctggagcaacaaacttctcactactcaaacaagcaggtgacgtggaggagaatcccgggcctactagtatggactggatttggcgcatccttttccttgtcggcgctgctaccggcgcgcattccttcgaagaggtacagctggaggaaagcggtggaggactggtgcaacctggagggtctatgaagctctcttgcgtagcttctgggttcacgttctccaattactggatgaactgggtgcggcagtcccccgagaaaggcctggaatgggtagcagaaattcggttcaagtcccataactatgctacacactttgccgagtctgtcaaaggccggttcactattagtcgagacgacagcaagtcttcagtctacctgcagatgaataacttgcgggcagaggacacaggtatctactactgcaccaggagaatcggcaactccgactatgactggtggtactttgacgtctggggagcaggcaccagcgtgacggtgagttcagcctcaacgcgtatccagaaccctgatcctgccgtgtaccagctgcgggatagcaagagcagcgacaagagcgtgtgtctgttcaccgacttcgacagccagaccaacgtgtcccagagcaaggactccgacgtgtacatcaccgataagtgcgtgctggacatgcggagcatggacttcaagagcaactccgccgtggcctggtccaacaagtccgatttcgcctgcgccaacgccttcaacaacagcattatccccgaggacacattcttcccaagccccgagagcagctgcggctttaccagcgagagctaccagcagggcgtgctgagcgccaccatcctgtacgagatcctgctgggcaaggccaccctgtacgccgtgctggtgtctgccctggtgctgatggctatggtcaagcggaaggacagccgggga

SEQ ID NO: 4339 - DNA, 2265 bp, synthetic construct
  source 1..2265: mol_type = other DNA
atggccttaccagtgaccgccttgctcctgccgctggccttgctgctccacgccgccaggccggaagtgcagctggttgaatctggcggaggactggttcagcctggcggatctctgagactgtcttgtgccgccagcggcttcagcttcagcgacttttggatgagctgggtccgacaggcccctggcaaaggacttgaatgggtcgccacaatcagccaggccggcagcgagaaggactacgtggactctgtgaagggcagattcaccatcagccgggacaacgccaagaagtccctgtacctccagatgaacagcctgagagccgaggacaccgccgtgtactattgtgcctctggcgtgtacagcttcgactacagaggccagggcaccctggtcacagtctcttctggtaccggcggaggcggatctggcggcggaggtagcggtggcggaggatctgaattcgaccagatcgtgctgacccagtcccccgctattatgtccgcatcaccgggcgaaaaagtgacgatctcctgtagcgcttcatctagcgtctcctacatgtattggtatcaacagaaacctgggtctagcccaaagccgtggatctacagaaccagtaaccttgccagtggggtgccagcccgcttcagcggtagtggcagtggaacttcctatagcctcacaataagcaacatggaggctgaagatgccgctgcctattactgccagcagtaccacagttacccaaccacgttcggcgggggaactaagctcgaagtaaaactcgaggacctgaagaacgtgttcccacctgaggtggccgtgttcgagcctagcgaggccgagatcagccacacccagaaagccaccctcgtgtgcctggctaccggcttctaccccgaccatgtggaactgtcttggtgggtcaacggcaaagaggtgcacagcggcgtgtgtaccgacccccagccactgaaagaacagcccgccctgaacgacagccggtactgcctgagcagcagactgagagtgtccgccaccttctggcagaacccccggaaccacttcagatgccaggtgcagttctacggcctgagcgagaacgacgagtggacccaggacagagccaagcccgtgacccagatcgtgtctgccgaagcctggggcagagccgattgcgacgtgaagctggtggaaaagagcttcgagacagacaccaacctgaacttccagaacctgagcgtgatcggcttcagaatcctgctgctgaaagtggccggctttaacctgctgatgaccctgcggctgtggtccagcagggccaagcgatctggatctggagcaacaaacttctcactactcaaacaagcaggtgacgtggaggagaatcccgggcctactagtatggactggatttggcgcatccttttccttgtcggcgctgctaccggcgcgcattccttcgaagaggtgcagctggtggaatctgggggcggcctggtccaacctaagggatcactcaagctctcttgtgcggccagcggattctctttcaatacctatgctatgaattgggtgagacaggcgcccggaaagggcctcgaatggatagcccatatccggtcaaaatcaaacaatttcgcaacctactatgcggactccgtgaaggaccgattttccatctcccgagatgcctccgagaatattctgttcctgcagatgaataacctcaagacagaggacaccgccatgtactactgtgtgcgccagggcggtgactttcccatggattactgggggcaggggaccagcgtgaccgtgagctctacgcgtatccagaaccctgatcctgccgtgtaccagctgcgggatagcaagagcagcgacaagagcgtgtgtctgttcaccgacttcgacagccagaccaacgtgtcccagagcaaggactccgacgtgtacatcaccgataagtgcgtgctggacatgcggagcatggacttcaagagcaactccgccgtggcctggtccaacaagtccgatttcgcctgcgccaacgccttcaacaacagcattatccccgaggacacattcttcccaagccccgagagcagctgcggctttaccagcgagagctaccagcagggcgtgctgagcgccaccatcctgtacgagatcctgctgggcaaggccaccctgtacgccgtgctggtgtctgccctggtgctgatggctatggtcaagcggaaggacagccgggga

SEQ ID NO: 4340 - DNA, 2262 bp, synthetic construct
  source 1..2262: mol_type = other DNA
atggccttaccagtgaccgccttgctcctgccgctggccttgctgctccacgccgccaggccggaagtgcagctggttgaatctggcggaggactggttcagcctggcggatctctgagactgtcttgtgccgccagcggcttcagcttcagcgacttttggatgagctgggtccgacaggcccctggcaaaggacttgaatgggtcgccacaatcagccaggccggcagcgagaaggactacgtggactctgtgaagggcagattcaccatcagccgggacaacgccaagaagtccctgtacctccagatgaacagcctgagagccgaggacaccgccgtgtactattgtgcctctggcgtgtacagcttcgactacagaggccagggcaccctggtcacagtctcttctggtaccggcggaggcggatctggcggcggaggtagcggtggcggaggatctgaattcgacgacatccagatgacccagagcagcagcagcttcagcgtgagcctgggcgacagagtgaccatcacctgcatggccagcgaggacatctacatcagactggcctggtaccagcagaagcccggcaacgcccccagactgctgatcagcgccgccaccagcctggagaccggcgtgcccagcagattcagcggcagcggcagcggcaaggactacaccctgagcatcaccagcctgcagaccgaggacgtgggcacctactactgccagcagtactggagcagcccctggaccttcggcggcggcaccaagctggagatcaacctcgaggacctgaagaacgtgttcccacctgaggtggccgtgttcgagcctagcgaggccgagatcagccacacccagaaagccaccctcgtgtgcctggctaccggcttctaccccgaccatgtggaactgtcttggtgggtcaacggcaaagaggtgcacagcggcgtgtgtaccgacccccagccactgaaagaacagcccgccctgaacgacagccggtactgcctgagcagcagactgagagtgtccgccaccttctggcagaacccccggaaccacttcagatgccaggtgcagttctacggcctgagcgagaacgacgagtggacccaggacagagccaagcccgtgacccagatcgtgtctgccgaagcctggggcagagccgattgcgacgtgaagctggtggaaaagagcttcgagacagacaccaacctgaacttccagaacctgagcgtgatcggcttcagaatcctgctgctgaaagtggccggctttaacctgctgatgaccctgcggctgtggtccagcagggccaagcgatctggatctggagcaacaaacttctcactactcaaacaagcaggtgacgtggaggagaatcccgggcctactagtatggactggatttggcgcatccttttccttgtcggcgctgctaccggcgcgcattccttcgaagacgtgcagctgcaggagagcggccccggcctggtgaagcccagccagagcctgagcctgacctgcaccgtgaccggctacagcatcaccagcgactacacctggaactggatcagacagttccccggcaacaagctggagtggatgggctacatcacctacagcggcagcaccagctacaaccccagcctgaagagcagaaacagcatcaccagagacaccagcaagaaccagttcttcctgcagctgaacagcgtgaccaccgaggacaccgccacctactactgcgccagactgggcagaagatacacaatggactactggggccagggcaccagcgtgaccgtgagcagcacgcgtatccagaaccctgatcctgccgtgtaccagctgcgggatagcaagagcagcgacaagagcgtgtgtctgttcaccgacttcgacagccagaccaacgtgtcccagagcaaggactccgacgtgtacatcaccgataagtgcgtgctggacatgcggagcatggacttcaagagcaactccgccgtggcctggtccaacaagtccgatttcgcctgcgccaacgccttcaacaacagcattatccccgaggacacattcttcccaagccccgagagcagctgcggctttaccagcgagagctaccagcagggcgtgctgagcgccaccatcctgtacgagatcctgctgggcaaggccaccctgtacgccgtgctggtgtctgccctggtgctgatggctatggtcaagcggaaggacagccgggga

SEQ ID NO: 4341 - DNA, 2271 bp, synthetic construct
  source 1..2271: mol_type = other DNA
atggccttaccagtgaccgccttgctcctgccgctggccttgctgctccacgccgccaggccggaagtgcagctggttgaatctggcggaggactggttcagcctggcggatctctgagactgtcttgtgccgccagcggcttcagcttcagcgacttttggatgagctgggtccgacaggcccctggcaaaggacttgaatgggtcgccacaatcagccaggccggcagcgagaaggactacgtggactctgtgaagggcagattcaccatcagccgggacaacgccaagaagtccctgtacctccagatgaacagcctgagagccgaggacaccgccgtgtactattgtgcctctggcgtgtacagcttcgactacagaggccagggcaccctggtcacagtctcttctggtaccggcggaggcggatctggcggcggaggtagcggtggcggaggatctgaattcgacgacatccagatgacccagagccccagcagcctgtctgccagcgtgggcgacagagtgaccatcacctgtagagccagccagagcatcagcagctacctgaactggtatcagcagaagcccggcaaggcccccaaactgctgatctacgacgccagcaacctggaaaccggcgtgcccagcagattttccggcagcggctctggcaccgacttcaccttcaccatcagctccctccagcccgaggacattgccacctactactgccagcagtacgacaacctgcccctgacctttggcggaggcaccaaggtggacatcaagagactcgaggacctgaagaacgtgttcccacctgaggtggccgtgttcgagcctagcgaggccgagatcagccacacccagaaagccaccctcgtgtgcctggctaccggcttctaccccgaccatgtggaactgtcttggtgggtcaacggcaaagaggtgcacagcggcgtgtgtaccgacccccagccactgaaagaacagcccgccctgaacgacagccggtactgcctgagcagcagactgagagtgtccgccaccttctggcagaacccccggaaccacttcagatgccaggtgcagttctacggcctgagcgagaacgacgagtggacccaggacagagccaagcccgtgacccagatcgtgtctgccgaagcctggggcagagccgattgcgacgtgaagctggtggaaaagagcttcgagacagacaccaacctgaacttccagaacctgagcgtgatcggcttcagaatcctgctgctgaaagtggccggctttaacctgctgatgaccctgcggctgtggtccagcagggccaagcgatctggatctggagcaacaaacttctcactactcaaacaagcaggtgacgtggaggagaatcccgggcctactagtatggactggatttggcgcatccttttccttgtcggcgctgctaccggcgcgcattccttcgaacaggtgcaactggtggaatctggcggcggagtggtgcagcctggcagaagcctgagactgagctgtgccgccagcggcttcacctttagcagctacgccatgcactgggtgcgccaggcccctggaaaaggcctggaatgggtggccgtgatctcctacgacggctccaacaagtattacgccgacagcgtgaagggccggttcaccatctccagagacaacagcaagaacaccctgtacctccagatgaacagcctgcgggccgaggacaccgccgtgtactattgtgccagggctcacaacagcagctcttggagcttcgactactggggccagggcaccctcgtgaccgtgtcatctacgcgtatccagaaccctgatcctgccgtgtaccagctgcgggatagcaagagcagcgacaagagcgtgtgtctgttcaccgacttcgacagccagaccaacgtgtcccagagcaaggactccgacgtgtacatcaccgataagtgcgtgctggacatgcggagcatggacttcaagagcaactccgccgtggcctggtccaacaagtccgatttcgcctgcgccaacgccttcaacaacagcattatccccgaggacacattcttcccaagccccgagagcagctgcggctttaccagcgagagctaccagcagggcgtgctgagcgccaccatcctgtacgagatcctgctgggcaaggccaccctgtacgccgtgctggtgtctgccctggtgctgatggctatggtcaagcggaaggacagccgggga

SEQ ID NO: 4342 - DNA, 2298 bp, synthetic construct
  source 1..2298: mol_type = other DNA
atggccttaccagtgaccgccttgctcctgccgctggccttgctgctccacgccgccaggccggaagtgcagctggttgaatctggcggaggactggttcagcctggcggatctctgagactgtcttgtgccgccagcggcttcagcttcagcgacttttggatgagctgggtccgacaggcccctggcaaaggacttgaatgggtcgccacaatcagccaggccggcagcgagaaggactacgtggactctgtgaagggcagattcaccatcagccgggacaacgccaagaagtccctgtacctccagatgaacagcctgagagccgaggacaccgccgtgtactattgtgcctctggcgtgtacagcttcgactacagaggccagggcaccctggtcacagtctcttctggtaccggcggaggcggatctggcggcggaggtagcggtggcggaggatctgaattcgacgacgtcgtgatgacccagagccctctgagcctgcctgtgtccctgggcgatcaggccagcatctcctgcagatccagccagagactggtgcacagcaacggcaacacctacctgcactggtatctgcagaagcccggccagagccccaagctgctgatctaccgggtgtccaacagattccccggcgtgcccgatagattcagcggctctggcagcggcaccgacttcaccctgaagatcagccgggtggaagccgaggacctgggcatctatttctgcagccagagcacccacgtgccctacacctttggcggaggcaccaagctggaaatcaagcggctcgaggacctgaagaacgtgttcccacctgaggtggccgtgttcgagcctagcgaggccgagatcagccacacccagaaagccaccctcgtgtgcctggctaccggcttctaccccgaccatgtggaactgtcttggtgggtcaacggcaaagaggtgcacagcggcgtgtgtaccgacccccagccactgaaagaacagcccgccctgaacgacagccggtactgcctgagcagcagactgagagtgtccgccaccttctggcagaacccccggaaccacttcagatgccaggtgcagttctacggcctgagcgagaacgacgagtggacccaggacagagccaagcccgtgacccagatcgtgtctgccgaagcctggggcagagccgattgcgacgtgaagctggtggaaaagagcttcgagacagacaccaacctgaacttccagaacctgagcgtgatcggcttcagaatcctgctgctgaaagtggccggctttaacctgctgatgaccctgcggctgtggtccagcagggccaagcgatctggatctggagcaacaaacttctcactactcaaacaagcaggtgacgtggaggagaatcccgggcctactagtatggactggatttggcgcatccttttccttgtcggcgctgctaccggcgcgcattccttcgaagaagtgcggctgcagcagtctggccccgacctgattaagcctggggccagcgtgaagatgagctgcaaggccagcggctacaccttcaccggctacgtgatgcactgggtcaagcagaggccaggccagggcctggaatggatcggcttcatcaacccctacaacgacgacatccagagcaacgagcggttccggggcaaggccaccctgaccagcgataagagcagcaccaccgcctacatggaactgagcagcctgacctccgaggacagcgccgtgtactactgtgctaggggagccggctacaacttcgacggggcctacagattcttcgacttttggggccagggcaccacactgaccgtgtcctctacgcgtatccagaaccctgatcctgccgtgtaccagctgcgggatagcaagagcagcgacaagagcgtgtgtctgttcaccgacttcgacagccagaccaacgtgtcccagagcaaggactccgacgtgtacatcaccgataagtgcgtgctggacatgcggagcatggacttcaagagcaactccgccgtggcctggtccaacaagtccgatttcgcctgcgccaacgccttcaacaacagcattatccccgaggacacattcttcccaagccccgagagcagctgcggctttaccagcgagagctaccagcagggcgtgctgagcgccaccatcctgtacgagatcctgctgggcaaggccaccctgtacgccgtgctggtgtctgccctggtgctgatggctatggtcaagcggaaggacagccgggga

SEQ ID NO: 4343 - DNA, 2271 bp, synthetic construct
  source 1..2271: mol_type = other DNA
atggccttaccagtgaccgccttgctcctgccgctggccttgctgctccacgccgccaggccggaagtgcagctggttgaatctggcggaggactggttcagcctggcggatctctgagactgtcttgtgccgccagcggcttcagcttcagcgacttttggatgagctgggtccgacaggcccctggcaaaggacttgaatgggtcgccacaatcagccaggccggcagcgagaaggactacgtggactctgtgaagggcagattcaccatcagccgggacaacgccaagaagtccctgtacctccagatgaacagcctgagagccgaggacaccgccgtgtactattgtgcctctggcgtgtacagcttcgactacagaggccagggcaccctggtcacagtctcttctggtaccggcggaggcggatctggcggcggaggtagcggtggcggaggatctgaattcgacagctacgagctgacccagcctcctagcgtgtccgtgtctcctggacagaccgccaccatctcttgcagcggcgatcaactgggcgggaagtacggccactggtatcagaagaagcccggccagagccccgtgctggtgctgtaccaggacagaaaacggcctgccggcatccccgagagattcagcggaagcagcagcggcaacaccatcaccctgaccatcagcggcacccaggccgtggatgaggccgactactactgccaggcttgggacaccaatctgggcggcgtgttcggcggaggcaccaaagtgacagtgctgggacagctcgaggacctgaagaacgtgttcccacctgaggtggccgtgttcgagcctagcgaggccgagatcagccacacccagaaagccaccctcgtgtgcctggctaccggcttctaccccgaccatgtggaactgtcttggtgggtcaacggcaaagaggtgcacagcggcgtgtgtaccgacccccagccactgaaagaacagcccgccctgaacgacagccggtactgcctgagcagcagactgagagtgtccgccaccttctggcagaacccccggaaccacttcagatgccaggtgcagttctacggcctgagcgagaacgacgagtggacccaggacagagccaagcccgtgacccagatcgtgtctgccgaagcctggggcagagccgattgcgacgtgaagctggtggaaaagagcttcgagacagacaccaacctgaacttccagaacctgagcgtgatcggcttcagaatcctgctgctgaaagtggccggctttaacctgctgatgaccctgcggctgtggtccagcagggccaagcgatctggatctggagcaacaaacttctcactactcaaacaagcaggtgacgtggaggagaatcccgggcctactagtatggactggatttggcgcatccttttccttgtcggcgctgctaccggcgcgcattccttcgaacaggtgcaactggtggaaagcggagccgaagtgaagaaacctggggccagcgtgaaggtgtcctgcaaggccagcggctacacctttaccggctactacatgcactgggtgcgccaggctccaggccagggactggaatggatgggccggatcaaccccaatagcggcggcaccaactacgcccagaaattccagggcagagtgaccatgaccagagacaccagcatcagcaccgcctacatggaactgagccggctgagaagcgacgacaccgccgtgtactactgcgccagccctagaggcagaggcagcgccttcgatatttggggccagggcacactcgtgaccgtgtcctctacgcgtatccagaaccctgatcctgccgtgtaccagctgcgggatagcaagagcagcgacaagagcgtgtgtctgttcaccgacttcgacagccagaccaacgtgtcccagagcaaggactccgacgtgtacatcaccgataagtgcgtgctggacatgcggagcatggacttcaagagcaactccgccgtggcctggtccaacaagtccgatttcgcctgcgccaacgccttcaacaacagcattatccccgaggacacattcttcccaagccccgagagcagctgcggctttaccagcgagagctaccagcagggcgtgctgagcgccaccatcctgtacgagatcctgctgggcaaggccaccctgtacgccgtgctggtgtctgccctggtgctgatggctatggtcaagcggaaggacagccgggga

SEQ ID NO: 4344 - DNA, 2280 bp, synthetic construct
  source 1..2280: mol_type = other DNA
atggccttaccagtgaccgccttgctcctgccgctggccttgctgctccacgccgccaggccggaagtgcagctggttgaatctggcggaggactggttcagcctggcggatctctgagactgtcttgtgccgccagcggcttcagcttcagcgacttttggatgagctgggtccgacaggcccctggcaaaggacttgaatgggtcgccacaatcagccaggccggcagcgagaaggactacgtggactctgtgaagggcagattcaccatcagccgggacaacgccaagaagtccctgtacctccagatgaacagcctgagagccgaggacaccgccgtgtactattgtgcctctggcgtgtacagcttcgactacagaggccagggcaccctggtcacagtctcttctggtaccggcggaggcggatctggcggcggaggtagcggtggcggaggatctgaattcgacaacttcatgctgacccagccccacagcgtgtccgagagccctggcaagaccgtgaccatctcctgcaccagaagcagcggctctatcgccagcaaatacgtgcagtggtatcagcagaggcccggcagcagccctaccaccgtgatctacgaggacaaccagaggcctagcggcgtgcccgatagattcagcggcagcatcgacaccagcagcaacagcgccagcctgaccatcagcggcctgagaacagaggacgaggccgactactactgccacagctacgacagcaacaaccactccgtgttcggcggaggcaccaaagtgacagtgctgggacagctcgaggacctgaagaacgtgttcccacctgaggtggccgtgttcgagcctagcgaggccgagatcagccacacccagaaagccaccctcgtgtgcctggctaccggcttctaccccgaccatgtggaactgtcttggtgggtcaacggcaaagaggtgcacagcggcgtgtgtaccgacccccagccactgaaagaacagcccgccctgaacgacagccggtactgcctgagcagcagactgagagtgtccgccaccttctggcagaacccccggaaccacttcagatgccaggtgcagttctacggcctgagcgagaacgacgagtggacccaggacagagccaagcccgtgacccagatcgtgtctgccgaagcctggggcagagccgattgcgacgtgaagctggtggaaaagagcttcgagacagacaccaacctgaacttccagaacctgagcgtgatcggcttcagaatcctgctgctgaaagtggccggctttaacctgctgatgaccctgcggctgtggtccagcagggccaagcgatctggatctggagcaacaaacttctcactactcaaacaagcaggtgacgtggaggagaatcccgggcctactagtatggactggatttggcgcatccttttccttgtcggcgctgctaccggcgcgcattccttcgaagaagtgcaactggtggaaagcgggggaggcgtggtgcagccaggcggatctctgagactgagctgtgccgccagcggcttcaccttcagcagctacgccatgagctgggtgcgccaggcccctggaaaaggcctggaatgggtgtccgccatctctggctctggcggcagcacctactacgccgatagcgtgaagggccggttcagcatcagccgggacaacagcaagaacaccctgtacctccagatgaacagcctgcgggccgaggacaccgccgtgtactactgtgccagaaccagaagctccggggccttcgacatctggggccagggaacactcgtgaccgtgtcctctacgcgtatccagaaccctgatcctgccgtgtaccagctgcgggatagcaagagcagcgacaagagcgtgtgtctgttcaccgacttcgacagccagaccaacgtgtcccagagcaaggactccgacgtgtacatcaccgataagtgcgtgctggacatgcggagcatggacttcaagagcaactccgccgtggcctggtccaacaagtccgatttcgcctgcgccaacgccttcaacaacagcattatccccgaggacacattcttcccaagccccgagagcagctgcggctttaccagcgagagctaccagcagggcgtgctgagcgccaccatcctgtacgagatcctgctgggcaaggccaccctgtacgccgtgctggtgtctgccctggtgctgatggctatggtcaagcggaaggacagccgggga

SEQ ID NO: 4345 - DNA, 2265 bp, synthetic construct
  source 1..2265: mol_type = other DNA
atggccttaccagtgaccgccttgctcctgccgctggccttgctgctccacgccgccaggccggaagtgcagctggttgaatctggcggaggactggttcagcctggcggatctctgagactgtcttgtgccgccagcggcttcagcttcagcgacttttggatgagctgggtccgacaggcccctggcaaaggacttgaatgggtcgccacaatcagccaggccggcagcgagaaggactacgtggactctgtgaagggcagattcaccatcagccgggacaacgccaagaagtccctgtacctccagatgaacagcctgagagccgaggacaccgccgtgtactattgtgcctctggcgtgtacagcttcgactacagaggccagggcaccctggtcacagtctcttctggtaccggcggaggcggatctggcggcggaggtagcggtggcggaggatctgaattcgacatccagatgaaccagagccccagcagcctgagcgccagcctgggcgataccatcaccatcacctgtcacgccagccagaacatcaacgtgtggctgagctggtatcagcagaagcccggcaacatccccaagctgctgatctacaaggccagcaacctgcacaccggcgtgcccagcagattttctggcagcggctctggcaccggcttcaccattaccatcagctccctccagcccgaggacattgccacctactactgccagcagggccagagctacccctggacatttggcggaggcaccaagctggaaatcaagagactcgaggacctgaagaacgtgttcccacctgaggtggccgtgttcgagcctagcgaggccgagatcagccacacccagaaagccaccctcgtgtgcctggctaccggcttctaccccgaccatgtggaactgtcttggtgggtcaacggcaaagaggtgcacagcggcgtgtgtaccgacccccagccactgaaagaacagcccgccctgaacgacagccggtactgcctgagcagcagactgagagtgtccgccaccttctggcagaacccccggaaccacttcagatgccaggtgcagttctacggcctgagcgagaacgacgagtggacccaggacagagccaagcccgtgacccagatcgtgtctgccgaagcctggggcagagccgattgcgacgtgaagctggtggaaaagagcttcgagacagacaccaacctgaacttccagaacctgagcgtgatcggcttcagaatcctgctgctgaaagtggccggctttaacctgctgatgaccctgcggctgtggtccagcagggccaagcgatctggatctggagcaacaaacttctcactactcaaacaagcaggtgacgtggaggagaatcccgggcctactagtatggactggatttggcgcatccttttccttgtcggcgctgctaccggcgcgcattccttcgaagaagtgcaactccagcagagcggcccagagcttgtgaagcctggcgcttccgtgaagattagctgcaaagccagcggctacagcttcaccggctacttcatgaactgggtcaagcagagccacggcaagagcctggagtacatcggcagattcaacccctacaacggcgagacactgtacaaccagaagttcaagggcaaggccaccctgaccgtggacaagagcagcagcaccgtgcacatggaactgctgagcgtgaccagcgaggacagcgccgtgtactactgtggcagaagcggcaacgacgacgctatggactattggggccagggcaccagcgtgaccgtgtctagtgctacgcgtatccagaaccctgatcctgccgtgtaccagctgcgggatagcaagagcagcgacaagagcgtgtgtctgttcaccgacttcgacagccagaccaacgtgtcccagagcaaggactccgacgtgtacatcaccgataagtgcgtgctggacatgcggagcatggacttcaagagcaactccgccgtggcctggtccaacaagtccgatttcgcctgcgccaacgccttcaacaacagcattatccccgaggacacattcttcccaagccccgagagcagctgcggctttaccagcgagagctaccagcagggcgtgctgagcgccaccatcctgtacgagatcctgctgggcaaggccaccctgtacgccgtgctggtgtctgccctggtgctgatggctatggtcaagcggaaggacagccgggga

SEQ ID NO: 4346 - DNA, 2268 bp, synthetic construct
  source 1..2268: mol_type = other DNA
atggccttaccagtgaccgccttgctcctgccgctggccttgctgctccacgccgccaggccggaagtgcagctggttgaatctggcggaggactggttcagcctggcggatctctgagactgtcttgtgccgccagcggcttcagcttcagcgacttttggatgagctgggtccgacaggcccctggcaaaggacttgaatgggtcgccacaatcagccaggccggcagcgagaaggactacgtggactctgtgaagggcagattcaccatcagccgggacaacgccaagaagtccctgtacctccagatgaacagcctgagagccgaggacaccgccgtgtactattgtgcctctggcgtgtacagcttcgactacagaggccagggcaccctggtcacagtctcttctggtaccggcggaggcggatctggcggcggaggtagcggtggcggaggatctgaattcgagatcgtgctgacacagagccctgccaccctgtctctgagccctggcgaaagagccaccctgagctgtagagccagccagagcgtgcggagctacctggcctggtatcagcagaagcctggacaggcccccagactgctgatctacgacgccagcaatcgggccacaggcatccccgccagattttctggctctggcagcggcaccgacttcaccctgacaatcagcagcctggaacccgaggacttcgccgtgtactactgccagcagcggagcaactggccccctacctttggacagggcaccaaggtggaaatcaagctcgaggacctgaagaacgtgttcccacctgaggtggccgtgttcgagcctagcgaggccgagatcagccacacccagaaagccaccctcgtgtgcctggctaccggcttctaccccgaccatgtggaactgtcttggtgggtcaacggcaaagaggtgcacagcggcgtgtgtaccgacccccagccactgaaagaacagcccgccctgaacgacagccggtactgcctgagcagcagactgagagtgtccgccaccttctggcagaacccccggaaccacttcagatgccaggtgcagttctacggcctgagcgagaacgacgagtggacccaggacagagccaagcccgtgacccagatcgtgtctgccgaagcctggggcagagccgattgcgacgtgaagctggtggaaaagagcttcgagacagacaccaacctgaacttccagaacctgagcgtgatcggcttcagaatcctgctgctgaaagtggccggctttaacctgctgatgaccctgcggctgtggtccagcagggccaagcgatctggatctggagcaacaaacttctcactactcaaacaagcaggtgacgtggaggagaatcccgggcctactagtatggactggatttggcgcatccttttccttgtcggcgctgctaccggcgcgcattccttcgaacaactccaggtgcaggaatctggccccggactcgtgaagcccagcgagacactgagcctgacctgtaccgtgtccggcggcagcatcagcaacagctacttctcctggggctggatcagacagccccctggcaagggcctggaatggatcggcagcttctactacggcgagaaaacctactacaaccccagcctgaagtccagagccaccatcagcatcgacaccagcaagagccagttctccctgaagctgagcagcgtgacagccgccgacaccgccgtgtattattgccccagaggccccaccatgatccggggcgtgatcgactcttggggccagggaacactcgtgaccgtgtcctctacgcgtatccagaaccctgatcctgccgtgtaccagctgcgggatagcaagagcagcgacaagagcgtgtgtctgttcaccgacttcgacagccagaccaacgtgtcccagagcaaggactccgacgtgtacatcaccgataagtgcgtgctggacatgcggagcatggacttcaagagcaactccgccgtggcctggtccaacaagtccgatttcgcctgcgccaacgccttcaacaacagcattatccccgaggacacattcttcccaagccccgagagcagctgcggctttaccagcgagagctaccagcagggcgtgctgagcgccaccatcctgtacgagatcctgctgggcaaggccaccctgtacgccgtgctggtgtctgccctggtgctgatggctatggtcaagcggaaggacagccgggga

SEQ ID NO: 4347 - DNA, 2295 bp, synthetic construct
  source 1..2295: mol_type = other DNA
atggccttaccagtgaccgccttgctcctgccgctggccttgctgctccacgccgccaggccggaagtgcagctggttgaatctggcggaggactggttcagcctggcggatctctgagactgtcttgtgccgccagcggcttcagcttcagcgacttttggatgagctgggtccgacaggcccctggcaaaggacttgaatgggtcgccacaatcagccaggccggcagcgagaaggactacgtggactctgtgaagggcagattcaccatcagccgggacaacgccaagaagtccctgtacctccagatgaacagcctgagagccgaggacaccgccgtgtactattgtgcctctggcgtgtacagcttcgactacagaggccagggcaccctggtcacagtctcttctggtaccggcggaggcggatctggcggcggaggtagcggtggcggaggatctgaattcgacatcgtgatgacccagacccccctgagcctgcctgtgacacctggcgagcctgccagcatctcctgcagaagcagcagaagcctgctggacagcgacgacggcaacacctacctggactggtatctgcagaaacccggccagagcccccaactgctgatctacaccctgagctacagagccagcggcgtgcccgatagattttccggctctggcagcggcaccgacttcaccctgaagatcagccgggtggaagccgaggacgtgggcgtgtactactgtatgcagcgggtggaatttcccatcaccttcggccagggcaccagactggaaatcaagagactcgaggacctgaagaacgtgttcccacctgaggtggccgtgttcgagcctagcgaggccgagatcagccacacccagaaagccaccctcgtgtgcctggctaccggcttctaccccgaccatgtggaactgtcttggtgggtcaacggcaaagaggtgcacagcggcgtgtgtaccgacccccagccactgaaagaacagcccgccctgaacgacagccggtactgcctgagcagcagactgagagtgtccgccaccttctggcagaacccccggaaccacttcagatgccaggtgcagttctacggcctgagcgagaacgacgagtggacccaggacagagccaagcccgtgacccagatcgtgtctgccgaagcctggggcagagccgattgcgacgtgaagctggtggaaaagagcttcgagacagacaccaacctgaacttccagaacctgagcgtgatcggcttcagaatcctgctgctgaaagtggccggctttaacctgctgatgaccctgcggctgtggtccagcagggccaagcgatctggatctggagcaacaaacttctcactactcaaacaagcaggtgacgtggaggagaatcccgggcctactagtatggactggatttggcgcatccttttccttgtcggcgctgctaccggcgcgcattccttcgaacaggtgcaactggtggaatctggcgggggagtggtgcagcctggcagatccctgagactgagctgtgccgccagcggcttcatcttcagcagatacggaatgcactgggtgcgccaggcccctggcaagggactgaaatgggtggccgtgatttggtacgacggcagcaacaagctgtacgccgacagcgtgaagggccggttcaccatcagcagagacaacagcaagaacaccctgtacctgcagatgaacagcctgcgggccgaggacaccgccgtgtactattgcgccagagactactacgacaacagccggcaccactggggcttcgactattggggccagggaacccttgtgaccgtgtcctctacgcgtatccagaaccctgatcctgccgtgtaccagctgcgggatagcaagagcagcgacaagagcgtgtgtctgttcaccgacttcgacagccagaccaacgtgtcccagagcaaggactccgacgtgtacatcaccgataagtgcgtgctggacatgcggagcatggacttcaagagcaactccgccgtggcctggtccaacaagtccgatttcgcctgcgccaacgccttcaacaacagcattatccccgaggacacattcttcccaagccccgagagcagctgcggctttaccagcgagagctaccagcagggcgtgctgagcgccaccatcctgtacgagatcctgctgggcaaggccaccctgtacgccgtgctggtgtctgccctggtgctgatggctatggtcaagcggaaggacagccgggga

SEQ ID NO: 4348 - DNA, 2265 bp, synthetic construct
  source 1..2265: mol_type = other DNA
atggccttaccagtgaccgccttgctcctgccgctggccttgctgctccacgccgccaggccggaagtgcagctggttgaatctggcggaggactggttcagcctggcggatctctgagactgtcttgtgccgccagcggcttcagcttcagcgacttttggatgagctgggtccgacaggcccctggcaaaggacttgaatgggtcgccacaatcagccaggccggcagcgagaaggactacgtggactctgtgaagggcagattcaccatcagccgggacaacgccaagaagtccctgtacctccagatgaacagcctgagagccgaggacaccgccgtgtactattgtgcctctggcgtgtacagcttcgactacagaggccagggcaccctggtcacagtctcttctggtaccggcggaggcggatctggcggcggaggtagcggtggcggaggatctgaattcgagatccagatgacccagagccccagcagcatgtctgccagcctgggcgacaccatcaccatcacatgccaggccacccaggacatcttcaagaacctgaactggtatcagcagaagcccggcaagccccccagcctgctgatctactatgccaccgaactggccgagggcgtgcccagcagattttctggcagcggcagcggctccgactacagcctgaccatcagcaacctggaaagcgaggacttcgccgcctactactgcctccagttcttcgagttcccattcaccttcggctccggcaccaagctggaaatgaagctcgaggacctgaagaacgtgttcccacctgaggtggccgtgttcgagcctagcgaggccgagatcagccacacccagaaagccaccctcgtgtgcctggctaccggcttctaccccgaccatgtggaactgtcttggtgggtcaacggcaaagaggtgcacagcggcgtgtgtaccgacccccagccactgaaagaacagcccgccctgaacgacagccggtactgcctgagcagcagactgagagtgtccgccaccttctggcagaacccccggaaccacttcagatgccaggtgcagttctacggcctgagcgagaacgacgagtggacccaggacagagccaagcccgtgacccagatcgtgtctgccgaagcctggggcagagccgattgcgacgtgaagctggtggaaaagagcttcgagacagacaccaacctgaacttccagaacctgagcgtgatcggcttcagaatcctgctgctgaaagtggccggctttaacctgctgatgaccctgcggctgtggtccagcagggccaagcgatctggatctggagcaacaaacttctcactactcaaacaagcaggtgacgtggaggagaatcccgggcctactagtatggactggatttggcgcatccttttccttgtcggcgctgctaccggcgcgcattccttcgaacaggtgcaactccagcagtctggcgctgagcttgtgcggcctggcacctctgtgaaggtgtcctgtaaagccagcggctacgtgttcaccaactactggatcgagtggatcaagcagcggccaggccagggcctggaatggatcggcgtgatgaatccaggcagcggcgagacaacctacaacgagaagttcaagggcaaggccaccctgaccgccgacaagagcagcagcacagcctacatgcaactgtcctccctgaccagcgtggacagcgccgtgtacttctgcgccagggaccacgaccgggactactacgctatggactactggggccagggcaccagcgtgaccgtgtcatctacgcgtatccagaaccctgatcctgccgtgtaccagctgcgggatagcaagagcagcgacaagagcgtgtgtctgttcaccgacttcgacagccagaccaacgtgtcccagagcaaggactccgacgtgtacatcaccgataagtgcgtgctggacatgcggagcatggacttcaagagcaactccgccgtggcctggtccaacaagtccgatttcgcctgcgccaacgccttcaacaacagcattatccccgaggacacattcttcccaagccccgagagcagctgcggctttaccagcgagagctaccagcagggcgtgctgagcgccaccatcctgtacgagatcctgctgggcaaggccaccctgtacgccgtgctggtgtctgccctggtgctgatggctatggtcaagcggaaggacagccgggga

SEQ ID NO: 4349 - DNA, 2256 bp, synthetic construct
  source 1..2256: mol_type = other DNA
atggccttaccagtgaccgccttgctcctgccgctggccttgctgctccacgccgccaggccggaagtgcagctggttgaatctggcggaggactggttcagcctggcggatctctgagactgtcttgtgccgccagcggcttcagcttcagcgacttttggatgagctgggtccgacaggcccctggcaaaggacttgaatgggtcgccacaatcagccaggccggcagcgagaaggactacgtggactctgtgaagggcagattcaccatcagccgggacaacgccaagaagtccctgtacctccagatgaacagcctgagagccgaggacaccgccgtgtactattgtgcctctggcgtgtacagcttcgactacagaggccagggcaccctggtcacagtctcttctggtaccggcggaggcggatctggcggcggaggtagcggtggcggaggatctgaattcgacatcctgctgacacagagccccgccatcctgtccgtgtctccaggcgagagagtgtcctttagctgccgggccagccagaacatcggcaccagcatccactggtatcagcagcggaccaacggcagccccagactgctgattaagtacgccagcgagtccgtgtccggcatccccagcagattttctggcagcggctccggcaccgacttcaccctgagcatcaacagcgtggaaagcgaggacattgccgactactactgccagcacaccaatagctggcccaccacctttggcggaggcaccaagctggaaatcaagagactcgaggacctgaagaacgtgttcccacctgaggtggccgtgttcgagcctagcgaggccgagatcagccacacccagaaagccaccctcgtgtgcctggctaccggcttctaccccgaccatgtggaactgtcttggtgggtcaacggcaaagaggtgcacagcggcgtgtgtaccgacccccagccactgaaagaacagcccgccctgaacgacagccggtactgcctgagcagcagactgagagtgtccgccaccttctggcagaacccccggaaccacttcagatgccaggtgcagttctacggcctgagcgagaacgacgagtggacccaggacagagccaagcccgtgacccagatcgtgtctgccgaagcctggggcagagccgattgcgacgtgaagctggtggaaaagagcttcgagacagacaccaacctgaacttccagaacctgagcgtgatcggcttcagaatcctgctgctgaaagtggccggctttaacctgctgatgaccctgcggctgtggtccagcagggccaagcgatctggatctggagcaacaaacttctcactactcaaacaagcaggtgacgtggaggagaatcccgggcctactagtatggactggatttggcgcatccttttccttgtcggcgctgctaccggcgcgcattccttcgaacaggtgcaactccagcagtccgacgccgagcttgtgaagcctggcgcttccgtgaagattagctgcaaggccagcggctacaccttcaccgaccacgccattcactgggtcaagcagaagcccgagcagggcctggaatggatcggctacttcagccccggcaacggcgacatcaagtacaacgagaagttcaagggcaaggccaccctgaccgccgacaagagcagcagcacagcctacatgcaactgaacagcctgaccagcgaggactccgccgtgtacttctgcaagcggagctacggcaactacgactactggggccagggcaccacactgaccgtgtctagtacgcgtatccagaaccctgatcctgccgtgtaccagctgcgggatagcaagagcagcgacaagagcgtgtgtctgttcaccgacttcgacagccagaccaacgtgtcccagagcaaggactccgacgtgtacatcaccgataagtgcgtgctggacatgcggagcatggacttcaagagcaactccgccgtggcctggtccaacaagtccgatttcgcctgcgccaacgccttcaacaacagcattatccccgaggacacattcttcccaagccccgagagcagctgcggctttaccagcgagagctaccagcagggcgtgctgagcgccaccatcctgtacgagatcctgctgggcaaggccaccctgtacgccgtgctggtgtctgccctggtgctgatggctatggtcaagcggaaggacagccgggga

SEQ ID NO: 4350 - DNA, 2271 bp, synthetic construct
  source 1..2271: mol_type = other DNA
atggccttaccagtgaccgccttgctcctgccgctggccttgctgctccacgccgccaggccggaagtgcagctggttgaatctggcggaggactggttcagcctggcggatctctgagactgtcttgtgccgccagcggcttcagcttcagcgacttttggatgagctgggtccgacaggcccctggcaaaggacttgaatgggtcgccacaatcagccaggccggcagcgagaaggactacgtggactctgtgaagggcagattcaccatcagccgggacaacgccaagaagtccctgtacctccagatgaacagcctgagagccgaggacaccgccgtgtactattgtgcctctggcgtgtacagcttcgactacagaggccagggcaccctggtcacagtctcttctggtaccggcggaggcggatctggcggcggaggtagcggtggcggaggatctgaattcgacatcgtgatgacccagagccccgatagcctggccgtgtctctgggagagagagccaccatcaactgcaagagcagccagagcctgctgaacagcggcgaccagaagaactacctgacctggtatcagcagaagcccggccagccccccaagctgctgatctactgggccagcaccagagaaagcggcgtgcccgatagattcagcggcagcggaagtggcaccgacttcaccctgaccatcagttctcttcaggccgaggacgtggccgtgtactactgccagaacgactacagctaccccctgaccttcggccagggcaccaaggtggaaatcaagctcgaggacctgaagaacgtgttcccacctgaggtggccgtgttcgagcctagcgaggccgagatcagccacacccagaaagccaccctcgtgtgcctggctaccggcttctaccccgaccatgtggaactgtcttggtgggtcaacggcaaagaggtgcacagcggcgtgtgtaccgacccccagccactgaaagaacagcccgccctgaacgacagccggtactgcctgagcagcagactgagagtgtccgccaccttctggcagaacccccggaaccacttcagatgccaggtgcagttctacggcctgagcgagaacgacgagtggacccaggacagagccaagcccgtgacccagatcgtgtctgccgaagcctggggcagagccgattgcgacgtgaagctggtggaaaagagcttcgagacagacaccaacctgaacttccagaacctgagcgtgatcggcttcagaatcctgctgctgaaagtggccggctttaacctgctgatgaccctgcggctgtggtccagcagggccaagcgatctggatctggagcaacaaacttctcactactcaaacaagcaggtgacgtggaggagaatcccgggcctactagtatggactggatttggcgcatccttttccttgtcggcgctgctaccggcgcgcattccttcgaacaggtgcagctggtgcagtctggggccgaagtgaagaaaaccggcagcagcgtgaaggtgtcctgcaaggccagcggctacacctttaccgaccacgccattcacgtgtggcggcaggctccaggacaggccctggaatggatgggccacttcagccccggcaacaccgacatcaagtacaacgacaagttcaagggcagagtgaccctgaccgtggaccgcagcatgagcaccgcctacatggaactgagcagcctgcggagcgaggacaccgccatgtactattgcaagaccagcaccttctttttcgactactggggccagggaacaatggtcaccgtgtccagcacgcgtatccagaaccctgatcctgccgtgtaccagctgcgggatagcaagagcagcgacaagagcgtgtgtctgttcaccgacttcgacagccagaccaacgtgtcccagagcaaggactccgacgtgtacatcaccgataagtgcgtgctggacatgcggagcatggacttcaagagcaactccgccgtggcctggtccaacaagtccgatttcgcctgcgccaacgccttcaacaacagcattatccccgaggacacattcttcccaagccccgagagcagctgcggctttaccagcgagagctaccagcagggcgtgctgagcgccaccatcctgtacgagatcctgctgggcaaggccaccctgtacgccgtgctggtgtctgccctggtgctgatggctatggtcaagcggaaggacagccgggga

SEQ ID NO: 4351 - DNA, 2268 bp, synthetic construct
  source 1..2268: mol_type = other DNA
atggccttaccagtgaccgccttgctcctgccgctggccttgctgctccacgccgccaggccggaagtgcagctggttgaatctggcggaggactggttcagcctggcggatctctgagactgtcttgtgccgccagcggcttcagcttcagcgacttttggatgagctgggtccgacaggcccctggcaaaggacttgaatgggtcgccacaatcagccaggccggcagcgagaaggactacgtggactctgtgaagggcagattcaccatcagccgggacaacgccaagaagtccctgtacctccagatgaacagcctgagagccgaggacaccgccgtgtactattgtgcctctggcgtgtacagcttcgactacagaggccagggcaccctggtcacagtctcttctggtaccggcggaggcggatctggcggcggaggtagcggtggcggaggatctgaattcgacatccagatgacccagagccccagcagcctgtctgccagcgtgggcgacagagtgaccatcacatgcaaggccagccaggacgtgtccattgccgtggcctggtatcagcagaagcccggcaaggcccccaaggtgctgatctacagcgccagctacagatacaccggcgtgcccgacagattcagcggctctggcagcggcaccgacttcaccttcaccatcagctccctccagcccgaggatattgccgtgtactactgccagcagcactacatcacccccctgacctttggcggaggcaccaaggtggaaatcaagctcgaggacctgaagaacgtgttcccacctgaggtggccgtgttcgagcctagcgaggccgagatcagccacacccagaaagccaccctcgtgtgcctggctaccggcttctaccccgaccatgtggaactgtcttggtgggtcaacggcaaagaggtgcacagcggcgtgtgtaccgacccccagccactgaaagaacagcccgccctgaacgacagccggtactgcctgagcagcagactgagagtgtccgccaccttctggcagaacccccggaaccacttcagatgccaggtgcagttctacggcctgagcgagaacgacgagtggacccaggacagagccaagcccgtgacccagatcgtgtctgccgaagcctggggcagagccgattgcgacgtgaagctggtggaaaagagcttcgagacagacaccaacctgaacttccagaacctgagcgtgatcggcttcagaatcctgctgctgaaagtggccggctttaacctgctgatgaccctgcggctgtggtccagcagggccaagcgatctggatctggagcaacaaacttctcactactcaaacaagcaggtgacgtggaggagaatcccgggcctactagtatggactggatttggcgcatccttttccttgtcggcgctgctaccggcgcgcattccttcgaacagatccaactggtgcagagcggccacgaagtgaagaaacctggggccagcgtgaaggtgtcctgcaaagccagcggctacacctttaccaactacggcatgaactgggtgcgccaggcccctggacagggcctggaatggatgggctggatcaacaccaagaccggcgagcccacctacgccgaagagttcaagggcagattcgtgttcagcctggaaaccagcgcctccaccgcctacctccagatcagctctctgaaggccgaggacaccgccatgtacttttgcggcagaggcggctacggcagcagctactggtacttcgatgtgtggggccagggcaccaccgtgaccgtgtcatctacgcgtatccagaaccctgatcctgccgtgtaccagctgcgggatagcaagagcagcgacaagagcgtgtgtctgttcaccgacttcgacagccagaccaacgtgtcccagagcaaggactccgacgtgtacatcaccgataagtgcgtgctggacatgcggagcatggacttcaagagcaactccgccgtggcctggtccaacaagtccgatttcgcctgcgccaacgccttcaacaacagcattatccccgaggacacattcttcccaagccccgagagcagctgcggctttaccagcgagagctaccagcagggcgtgctgagcgccaccatcctgtacgagatcctgctgggcaaggccaccctgtacgccgtgctggtgtctgccctggtgctgatggctatggtcaagcggaaggacagccgggga

SEQ ID NO: 4352 - DNA, 2274 bp, synthetic construct
  source 1..2274: mol_type = other DNA
atggccttaccagtgaccgccttgctcctgccgctggccttgctgctccacgccgccaggccggaagtgcagctggttgaatctggcggaggactggttcagcctggcggatctctgagactgtcttgtgccgccagcggcttcagcttcagcgacttttggatgagctgggtccgacaggcccctggcaaaggacttgaatgggtcgccacaatcagccaggccggcagcgagaaggactacgtggactctgtgaagggcagattcaccatcagccgggacaacgccaagaagtccctgtacctccagatgaacagcctgagagccgaggacaccgccgtgtactattgtgcctctggcgtgtacagcttcgactacagaggccagggcaccctggtcacagtctcttctggtaccggcggaggcggatctggcggcggaggtagcggtggcggaggatctgaattcgacatcgtgatgacccagagccccgatagcctggccgtgtctctgggagagagagccaccatcaactgccgggccagcaagagcgtgtccaccagcggctacagctacatgcactggtatcagcagaagcccggccagccccccaagctgctgatctacctggcctccaacctggaaagcggcgtgcccgatagattcagcggcagcggctctggcaccgacttcaccctgaccatcagttctcttcaggccgaggacgtggccgtgtactactgccagcacagcagagagctgccctacaccttcggccagggcaccaagctggaaatcaagctcgaggacctgaagaacgtgttcccacctgaggtggccgtgttcgagcctagcgaggccgagatcagccacacccagaaagccaccctcgtgtgcctggctaccggcttctaccccgaccatgtggaactgtcttggtgggtcaacggcaaagaggtgcacagcggcgtgtgtaccgacccccagccactgaaagaacagcccgccctgaacgacagccggtactgcctgagcagcagactgagagtgtccgccaccttctggcagaacccccggaaccacttcagatgccaggtgcagttctacggcctgagcgagaacgacgagtggacccaggacagagccaagcccgtgacccagatcgtgtctgccgaagcctggggcagagccgattgcgacgtgaagctggtggaaaagagcttcgagacagacaccaacctgaacttccagaacctgagcgtgatcggcttcagaatcctgctgctgaaagtggccggctttaacctgctgatgaccctgcggctgtggtccagcagggccaagcgatctggatctggagcaacaaacttctcactactcaaacaagcaggtgacgtggaggagaatcccgggcctactagtatggactggatttggcgcatccttttccttgtcggcgctgctaccggcgcgcattccttcgaacaggtgcaactccaggaatctggccctggccttgtgaagcccagcgagacactgagcctgacctgtaccgtgtccggcggcagcatcagctcttacggcgtgcactggattcggcagcctccaggcaagggcctggaatggatcggcgtgatctggacctccggcgtgaccgactacaacagcgccctgatgggcagagtgaccatctccgtggacaccagcaagaaccagttcagcctgaagctgagcagcgtgacagccgccgataccgccgtgtattattgcgccagagatggcgactacgaccgctacacaatggactactggggccagggaacccttgtgaccgtgtcctctacgcgtatccagaaccctgatcctgccgtgtaccagctgcgggatagcaagagcagcgacaagagcgtgtgtctgttcaccgacttcgacagccagaccaacgtgtcccagagcaaggactccgacgtgtacatcaccgataagtgcgtgctggacatgcggagcatggacttcaagagcaactccgccgtggcctggtccaacaagtccgatttcgcctgcgccaacgccttcaacaacagcattatccccgaggacacattcttcccaagccccgagagcagctgcggctttaccagcgagagctaccagcagggcgtgctgagcgccaccatcctgtacgagatcctgctgggcaaggccaccctgtacgccgtgctggtgtctgccctggtgctgatggctatggtcaagcggaaggacagccgggga

SEQ ID NO: 4353 - DNA, 2274 bp, synthetic construct
  source 1..2274: mol_type = other DNA
atggccttaccagtgaccgccttgctcctgccgctggccttgctgctccacgccgccaggccggaagtgcagctggttgaatctggcggaggactggttcagcctggcggatctctgagactgtcttgtgccgccagcggcttcagcttcagcgacttttggatgagctgggtccgacaggcccctggcaaaggacttgaatgggtcgccacaatcagccaggccggcagcgagaaggactacgtggactctgtgaagggcagattcaccatcagccgggacaacgccaagaagtccctgtacctccagatgaacagcctgagagccgaggacaccgccgtgtactattgtgcctctggcgtgtacagcttcgactacagaggccagggcaccctggtcacagtctcttctggtaccggcggaggcggatctggcggcggaggtagcggtggcggaggatctgaattcgacatccagatgacccagagccccagcagcctgtctgccagcgtgggcgacagagtgaccatcacctgtagagccagccagagcatcggcaccagcctgcactggtatcagcagaagcctggcaaggcccccaagctgctgattaagttcgccagcagactgcagagcggcgtgcccagcagattttctggcagcggctccggcaccgacttcaccctgacaatcagctccctgcagcccgaggacttcgccacctactactgccagcagagccccggcttccctccaacctttggacagggcaccaagctggaaatcaagcggctcgaggacctgaagaacgtgttcccacctgaggtggccgtgttcgagcctagcgaggccgagatcagccacacccagaaagccaccctcgtgtgcctggctaccggcttctaccccgaccatgtggaactgtcttggtgggtcaacggcaaagaggtgcacagcggcgtgtgtaccgacccccagccactgaaagaacagcccgccctgaacgacagccggtactgcctgagcagcagactgagagtgtccgccaccttctggcagaacccccggaaccacttcagatgccaggtgcagttctacggcctgagcgagaacgacgagtggacccaggacagagccaagcccgtgacccagatcgtgtctgccgaagcctggggcagagccgattgcgacgtgaagctggtggaaaagagcttcgagacagacaccaacctgaacttccagaacctgagcgtgatcggcttcagaatcctgctgctgaaagtggccggctttaacctgctgatgaccctgcggctgtggtccagcagggccaagcgatctggatctggagcaacaaacttctcactactcaaacaagcaggtgacgtggaggagaatcccgggcctactagtatggactggatttggcgcatccttttccttgtcggcgctgctaccggcgcgcattccttcgaacaggtgcaactggtggaatctggcggcggacttgtgaagccaggcggcagcctgagactgagctgtgccgccagcggcttcagcatcaccaccagcggctactactggacctggatcagacagttccccggcaagggcctggaatggatgggctacatcggctacaacagcaagacctactacaaccccgccctgaagtcccggatcaccatcagcagagacaacgccaagaacagcctgtacctgcagatgaactccctgagagccgaggataccgccgtgtactactgcgccagatccctgtacggcggctacaaggacgccttcgatagctggggccagggaacccttgtgaccgtgtctagcacgcgtatccagaaccctgatcctgccgtgtaccagctgcgggatagcaagagcagcgacaagagcgtgtgtctgttcaccgacttcgacagccagaccaacgtgtcccagagcaaggactccgacgtgtacatcaccgataagtgcgtgctggacatgcggagcatggacttcaagagcaactccgccgtggcctggtccaacaagtccgatttcgcctgcgccaacgccttcaacaacagcattatccccgaggacacattcttcccaagccccgagagcagctgcggctttaccagcgagagctaccagcagggcgtgctgagcgccaccatcctgtacgagatcctgctgggcaaggccaccctgtacgccgtgctggtgtctgccctggtgctgatggctatggtcaagcggaaggacagccgggga

SEQ ID NO: 4354 - DNA, 2289 bp, synthetic construct
  source 1..2289: mol_type = other DNA
atggccttaccagtgaccgccttgctcctgccgctggccttgctgctccacgccgccaggccggaagtgcagctggttgaatctggcggaggactggttcagcctggcggatctctgagactgtcttgtgccgccagcggcttcagcttcagcgacttttggatgagctgggtccgacaggcccctggcaaaggacttgaatgggtcgccacaatcagccaggccggcagcgagaaggactacgtggactctgtgaagggcagattcaccatcagccgggacaacgccaagaagtccctgtacctccagatgaacagcctgagagccgaggacaccgccgtgtactattgtgcctctggcgtgtacagcttcgactacagaggccagggcaccctggtcacagtctcttctggtaccggcggaggcggatctggcggcggaggtagcggtggcggaggatctgaattcgacgagatcgtgctgacccagagccctctgagcctgcctgtgacacctggcgagcctgccagcatctcctgtagaagcagccagagcctgctgcacagcatcggctacaactacctggactggtatctccagaagcccggccagagcccccaactgctgatctacctgggcagcaacagagccagcggcgtgcccgatagattttccggcagcggctccggcaccgacttcaccctgaagatcagccgggtggaagccgaggacgtgggcgtgtactactgtatgcaggccctccagacccccctgacctttggcggaggcaccaaggtggaaatcaagcggctcgaggacctgaagaacgtgttcccacctgaggtggccgtgttcgagcctagcgaggccgagatcagccacacccagaaagccaccctcgtgtgcctggctaccggcttctaccccgaccatgtggaactgtcttggtgggtcaacggcaaagaggtgcacagcggcgtgtgtaccgacccccagccactgaaagaacagcccgccctgaacgacagccggtactgcctgagcagcagactgagagtgtccgccaccttctggcagaacccccggaaccacttcagatgccaggtgcagttctacggcctgagcgagaacgacgagtggacccaggacagagccaagcccgtgacccagatcgtgtctgccgaagcctggggcagagccgattgcgacgtgaagctggtggaaaagagcttcgagacagacaccaacctgaacttccagaacctgagcgtgatcggcttcagaatcctgctgctgaaagtggccggctttaacctgctgatgaccctgcggctgtggtccagcagggccaagcgatctggatctggagcaacaaacttctcactactcaaacaagcaggtgacgtggaggagaatcccgggcctactagtatggactggatttggcgcatccttttccttgtcggcgctgctaccggcgcgcattccttcgaagaagtgcaactggtggaaagcggaggcggcgtggtgcagcctggaagaagcctgagactgagctgtgccgccagcggcttcaccttccggtcctacggaatgcactgggtgcgccaggcccctggcaaaggactggaatgggtggccgtgatctcctacgacggctccaacaagtactacaccgacagcgtgaacggcagattcaccatcagcagagacaacagcaagaacaccctgtacctccagatgaacagcctgcgggccgaggacaccgccgtgtactattgtgctagaggcggaggctactacgagacaagcggccctgattactggggccagggcacactcgtgaccgtgtctagtacgcgtatccagaaccctgatcctgccgtgtaccagctgcgggatagcaagagcagcgacaagagcgtgtgtctgttcaccgacttcgacagccagaccaacgtgtcccagagcaaggactccgacgtgtacatcaccgataagtgcgtgctggacatgcggagcatggacttcaagagcaactccgccgtggcctggtccaacaagtccgatttcgcctgcgccaacgccttcaacaacagcattatccccgaggacacattcttcccaagccccgagagcagctgcggctttaccagcgagagctaccagcagggcgtgctgagcgccaccatcctgtacgagatcctgctgggcaaggccaccctgtacgccgtgctggtgtctgccctggtgctgatggctatggtcaagcggaaggacagccgggga

SEQ ID NO: 4355 - DNA, 2283 bp, synthetic construct
  source 1..2283: mol_type = other DNA
atggccttaccagtgaccgccttgctcctgccgctggccttgctgctccacgccgccaggccggaagtgcagctggttgaatctggcggaggactggttcagcctggcggatctctgagactgtcttgtgccgccagcggcttcagcttcagcgacttttggatgagctgggtccgacaggcccctggcaaaggacttgaatgggtcgccacaatcagccaggccggcagcgagaaggactacgtggactctgtgaagggcagattcaccatcagccgggacaacgccaagaagtccctgtacctccagatgaacagcctgagagccgaggacaccgccgtgtactattgtgcctctggcgtgtacagcttcgactacagaggccagggcaccctggtcacagtctcttctggtaccggcggaggcggatctggcggcggaggtagcggtggcggaggatctgaattcgacgacgtcgtgatgacccagagccctctgagcctgcctgtgacacctggcgagcctgccagcatctcctgtagaagcagccagagcctgctgcacagcatcggctacaactacctgcactggtttctccagaagcccggccagagcccccaactgctgatctacctgggcagcaacagagccagcggcgtgcccgatagattttccggcagcggctccggcaccgacttcaccctgaagatcagccgggtggaagccgaggacgtgggcgtgtactactgtatgcaggccctccagacccctcccacctttggacagggcaccagactggaaatcaagcggctcgaggacctgaagaacgtgttcccacctgaggtggccgtgttcgagcctagcgaggccgagatcagccacacccagaaagccaccctcgtgtgcctggctaccggcttctaccccgaccatgtggaactgtcttggtgggtcaacggcaaagaggtgcacagcggcgtgtgtaccgacccccagccactgaaagaacagcccgccctgaacgacagccggtactgcctgagcagcagactgagagtgtccgccaccttctggcagaacccccggaaccacttcagatgccaggtgcagttctacggcctgagcgagaacgacgagtggacccaggacagagccaagcccgtgacccagatcgtgtctgccgaagcctggggcagagccgattgcgacgtgaagctggtggaaaagagcttcgagacagacaccaacctgaacttccagaacctgagcgtgatcggcttcagaatcctgctgctgaaagtggccggctttaacctgctgatgaccctgcggctgtggtccagcagggccaagcgatctggatctggagcaacaaacttctcactactcaaacaagcaggtgacgtggaggagaatcccgggcctactagtatggactggatttggcgcatccttttccttgtcggcgctgctaccggcgcgcattccttcgaacaactccaactccaggaaagcggccctggcctcgtgaagcctagcggcacactgagcctgacatgtgccgtgtctggcggcagcatcagcagcagcaactggtggtcttgggtgcgccagcctcctggcaagggcctggaatggatcggcgaaatctaccacagcggcagcaccaactacaaccccagcctgaagtccagagtgaccatcagcgtggacaagagcaagaaccagttctccctgaagctgagcagcgtgacagccgccgataccgccgtgtactattgcgtgggcagcccctacggcgactacgtgctggattattggggccagggcaccctcgtgaccgtgtctagtacgcgtatccagaaccctgatcctgccgtgtaccagctgcgggatagcaagagcagcgacaagagcgtgtgtctgttcaccgacttcgacagccagaccaacgtgtcccagagcaaggactccgacgtgtacatcaccgataagtgcgtgctggacatgcggagcatggacttcaagagcaactccgccgtggcctggtccaacaagtccgatttcgcctgcgccaacgccttcaacaacagcattatccccgaggacacattcttcccaagccccgagagcagctgcggctttaccagcgagagctaccagcagggcgtgctgagcgccaccatcctgtacgagatcctgctgggcaaggccaccctgtacgccgtgctggtgtctgccctggtgctgatggctatggtcaagcggaaggacagccgggga

SEQ ID NO: 4356 - DNA, 2277 bp, synthetic construct
  source 1..2277: mol_type = other DNA
atggccttaccagtgaccgccttgctcctgccgctggccttgctgctccacgccgccaggccggaagtgcagctggttgaatctggcggaggactggttcagcctggcggatctctgagactgtcttgtgccgccagcggcttcagcttcagcgacttttggatgagctgggtccgacaggcccctggcaaaggacttgaatgggtcgccacaatcagccaggccggcagcgagaaggactacgtggactctgtgaagggcagattcaccatcagccgggacaacgccaagaagtccctgtacctccagatgaacagcctgagagccgaggacaccgccgtgtactattgtgcctctggcgtgtacagcttcgactacagaggccagggcaccctggtcacagtctcttctggtaccggcggaggcggatctggcggcggaggtagcggtggcggaggatctgaattcgacgagatcgtgctgacacagagccctggcaccctgagcctgtctctgggagagagagccacactgagctgtcgggccagccagtctatcagcagcagcttcctggcctggtatcagcagaagcccggccaggcccctaagctgctgatctacgccgccagcacaagagccaccggcatccccgatagattcagcggctctggcagcggcaccgacttcaccctgaccatcagcagactggaacccgaggacttcgccgtgtactactgccagcagtacggcagaagcctgagcttcggcggaggcaccaaggtggaagtgaagctcgaggacctgaagaacgtgttcccacctgaggtggccgtgttcgagcctagcgaggccgagatcagccacacccagaaagccaccctcgtgtgcctggctaccggcttctaccccgaccatgtggaactgtcttggtgggtcaacggcaaagaggtgcacagcggcgtgtgtaccgacccccagccactgaaagaacagcccgccctgaacgacagccggtactgcctgagcagcagactgagagtgtccgccaccttctggcagaacccccggaaccacttcagatgccaggtgcagttctacggcctgagcgagaacgacgagtggacccaggacagagccaagcccgtgacccagatcgtgtctgccgaagcctggggcagagccgattgcgacgtgaagctggtggaaaagagcttcgagacagacaccaacctgaacttccagaacctgagcgtgatcggcttcagaatcctgctgctgaaagtggccggctttaacctgctgatgaccctgcggctgtggtccagcagggccaagcgatctggatctggagcaacaaacttctcactactcaaacaagcaggtgacgtggaggagaatcccgggcctactagtatggactggatttggcgcatccttttccttgtcggcgctgctaccggcgcgcattccttcgaacaggtgcaactccagcagtctggccccggactcgtgaagcctagccagacactgagcctgacctgcgccatcagcggcgatagcgtgtccggcaatagcgccacctggaactggatcagacagagcccatctcggggcctggaatggctgggccggacctactaccgcagcaagtggaaccacgactacgccgagagcgtgaagtcccggatcaccatcaaccccgacaccagcaagaaccagttctccttgcaactgaacagcgtgacccccgaggacacagccgtgtattattgcgccagaggcgacagcagctcttggtacgccttcgactattggggccagggcaccctcgtgaccgtgtctagtacgcgtatccagaaccctgatcctgccgtgtaccagctgcgggatagcaagagcagcgacaagagcgtgtgtctgttcaccgacttcgacagccagaccaacgtgtcccagagcaaggactccgacgtgtacatcaccgataagtgcgtgctggacatgcggagcatggacttcaagagcaactccgccgtggcctggtccaacaagtccgatttcgcctgcgccaacgccttcaacaacagcattatccccgaggacacattcttcccaagccccgagagcagctgcggctttaccagcgagagctaccagcagggcgtgctgagcgccaccatcctgtacgagatcctgctgggcaaggccaccctgtacgccgtgctggtgtctgccctggtgctgatggctatggtcaagcggaaggacagccgggga

SEQ ID NO: 4357 - DNA, 2274 bp, synthetic construct
  source 1..2274: mol_type = other DNA
atggccttaccagtgaccgccttgctcctgccgctggccttgctgctccacgccgccaggccggaagtgcagctggttgaatctggcggaggactggttcagcctggcggatctctgagactgtcttgtgccgccagcggcttcagcttcagcgacttttggatgagctgggtccgacaggcccctggcaaaggacttgaatgggtcgccacaatcagccaggccggcagcgagaaggactacgtggactctgtgaagggcagattcaccatcagccgggacaacgccaagaagtccctgtacctccagatgaacagcctgagagccgaggacaccgccgtgtactattgtgcctctggcgtgtacagcttcgactacagaggccagggcaccctggtcacagtctcttctggtaccggcggaggcggatctggcggcggaggtagcggtggcggaggatctgaattcgaccagagcgtcgtgacacagcctcctagcgtgtcagtggcccctggcaagaccgccagaatcacctgtggccggaacaacatcggcagcaagagcgtgcactggtatcagcagaagcccggccaggctcctgtgctggtggtgtacgacgacagcgacagacccagcggcatccccgagagattcagcggcagcaactccggcaataccgccaccctgaccatcagcagagtggaagccggcgacgaggccgactactactgccaagtgtgggacagcagcagcgatcacgtggtgtttggcggaggcaccaagctgacagtgctgggtctcgaggacctgaagaacgtgttcccacctgaggtggccgtgttcgagcctagcgaggccgagatcagccacacccagaaagccaccctcgtgtgcctggctaccggcttctaccccgaccatgtggaactgtcttggtgggtcaacggcaaagaggtgcacagcggcgtgtgtaccgacccccagccactgaaagaacagcccgccctgaacgacagccggtactgcctgagcagcagactgagagtgtccgccaccttctggcagaacccccggaaccacttcagatgccaggtgcagttctacggcctgagcgagaacgacgagtggacccaggacagagccaagcccgtgacccagatcgtgtctgccgaagcctggggcagagccgattgcgacgtgaagctggtggaaaagagcttcgagacagacaccaacctgaacttccagaacctgagcgtgatcggcttcagaatcctgctgctgaaagtggccggctttaacctgctgatgaccctgcggctgtggtccagcagggccaagcgatctggatctggagcaacaaacttctcactactcaaacaagcaggtgacgtggaggagaatcccgggcctactagtatggactggatttggcgcatccttttccttgtcggcgctgctaccggcgcgcattccttcgaagtgcaactggtgcagtctggcggaggggtcatgcggcctggcggatctctgagactgtcttgtgccgccagcggcttcaccttcgacgactacggcatgagctgggtgcgccaggcccctggaaaaggcctggaatgggtgtccggcatcaactggaatggcggcagcaccggctacgccgattctgtgcggggcagattcaccatcagccgggacaacgccaagaacagcctgtacctgcagatgaactccctgcgggccgaggacaccgccctgtactattgcgccagagagcggggctacggctaccacgaccctcacgattattggggccagggcacccttgttaccgtgtcctctacgcgtatccagaaccctgatcctgccgtgtaccagctgcgggatagcaagagcagcgacaagagcgtgtgtctgttcaccgacttcgacagccagaccaacgtgtcccagagcaaggactccgacgtgtacatcaccgataagtgcgtgctggacatgcggagcatggacttcaagagcaactccgccgtggcctggtccaacaagtccgatttcgcctgcgccaacgccttcaacaacagcattatccccgaggacacattcttcccaagccccgagagcagctgcggctttaccagcgagagctaccagcagggcgtgctgagcgccaccatcctgtacgagatcctgctgggcaaggccaccctgtacgccgtgctggtgtctgccctggtgctgatggctatggtcaagcggaaggacagccgggga

SEQ ID NO: 4358 - DNA, 2313 bp, synthetic construct
  source 1..2313: mol_type = other DNA
atggccttaccagtgaccgccttgctcctgccgctggccttgctgctccacgccgccaggccggaagtgcagctggttgaatctggcggaggactggttcagcctggcggatctctgagactgtcttgtgccgccagcggcttcagcttcagcgacttttggatgagctgggtccgacaggcccctggcaaaggacttgaatgggtcgccacaatcagccaggccggcagcgagaaggactacgtggactctgtgaagggcagattcaccatcagccgggacaacgccaagaagtccctgtacctccagatgaacagcctgagagccgaggacaccgccgtgtactattgtgcctctggcgtgtacagcttcgactacagaggccagggcaccctggtcacagtctcttctggtaccggcggaggcggatctggcggcggaggtagcggtggcggaggatctgaattcgaacagaaactcatcagtgaagaagacctggaattccaggctgtcgtgacacagcctcctagcgcctctggcacaccaggccagagagtgaccatctcctgtagcggcagcagcagcaacatcggcagcaacaccgtgaactggtatcagcaggtgcccggcaccgctcccaagctgctgatctacagcaacaaccagcggcccagcggcgtgcccgatagattttctggcagcaagagcggcaccagcgccagcctggctatctctggactccagtccgaggacgaggccgactactattgcgccgcctgggacgatagcctgaacggctgggtgttcggcggaggcaccaagctgacagtgctgctcgaggacctgaagaacgtgttcccacctgaggtggccgtgttcgagcctagcgaggccgagatcagccacacccagaaagccaccctcgtgtgcctggctaccggcttctaccccgaccatgtggaactgtcttggtgggtcaacggcaaagaggtgcacagcggcgtgtgtaccgacccccagccactgaaagaacagcccgccctgaacgacagccggtactgcctgagcagcagactgagagtgtccgccaccttctggcagaacccccggaaccacttcagatgccaggtgcagttctacggcctgagcgagaacgacgagtggacccaggacagagccaagcccgtgacccagatcgtgtctgccgaagcctggggcagagccgattgcgacgtgaagctggtggaaaagagcttcgagacagacaccaacctgaacttccagaacctgagcgtgatcggcttcagaatcctgctgctgaaagtggccggctttaacctgctgatgaccctgcggctgtggtccagcagggccaagcgatctggatctggagcaacaaacttctcactactcaaacaagcaggtgacgtggaggagaatcccgggcctactagtatggactggatttggcgcatccttttccttgtcggcgctgctaccggcgcgcattccttcgaacagatgcaactggtgcagagcggagccgaagtgaaagagcctggcgagagcctgcggatctcctgcaagggcagcggctacagcttcaccaatttctggatctcttgggtgcgccagatgcccggcaagggcctggaatggatgggcagagtggaccccggctactcctacagcacctacagccctagcttccagggccacgtgaccatcagcgccgacaagagcaccagcaccgcctacctccagtggaacagcctgaaggccagcgacaccgccatgtactactgcgccagagtgcagtacagcggctattacgattggttcgacccctggggccagggcacactcgtgacagtgtcaagcacgcgtatccagaaccctgatcctgccgtgtaccagctgcgggatagcaagagcagcgacaagagcgtgtgtctgttcaccgacttcgacagccagaccaacgtgtcccagagcaaggactccgacgtgtacatcaccgataagtgcgtgctggacatgcggagcatggacttcaagagcaactccgccgtggcctggtccaacaagtccgatttcgcctgcgccaacgccttcaacaacagcattatccccgaggacacattcttcccaagccccgagagcagctgcggctttaccagcgagagctaccagcagggcgtgctgagcgccaccatcctgtacgagatcctgctgggcaaggccaccctgtacgccgtgctggtgtctgccctggtgctgatggctatggtcaagcggaaggacagccgggga

SEQ ID NO: 4359 - DNA, 2295 bp, synthetic construct
  source 1..2295: mol_type = other DNA
atggccttaccagtgaccgccttgctcctgccgctggccttgctgctccacgccgccaggccggaagtgcagctggttgaatctggcggaggactggttcagcctggcggatctctgagactgtcttgtgccgccagcggcttcagcttcagcgacttttggatgagctgggtccgacaggcccctggcaaaggacttgaatgggtcgccacaatcagccaggccggcagcgagaaggactacgtggactctgtgaagggcagattcaccatcagccgggacaacgccaagaagtccctgtacctccagatgaacagcctgagagccgaggacaccgccgtgtactattgtgcctctggcgtgtacagcttcgactacagaggccagggcaccctggtcacagtctcttctggtaccggcggaggcggatctggcggcggaggtagcggtggcggaggatctgaattcgaacagaaactcatcagtgaagaagacctggaattcgacatccagatgacccagagccccagcacactgagcgccagcgtgggcgacagagtgaccatcacctgtcgggccagccagaacatcaacaagtggctggcctggtatcagcagaggcccggaaaagccccccagctgctgatctacaaggccagcagcctggaaagcggcgtgcccagcagattttctggcagcggctctggcaccgagtacaccctgaccatcagctccctccagcccgacgacttcgccacctactactgccagcagtacaacagctacgccaccttcggccagggcaccaaggtggaaatcaagagactcgaggacctgaagaacgtgttcccacctgaggtggccgtgttcgagcctagcgaggccgagatcagccacacccagaaagccaccctcgtgtgcctggctaccggcttctaccccgaccatgtggaactgtcttggtgggtcaacggcaaagaggtgcacagcggcgtgtgtaccgacccccagccactgaaagaacagcccgccctgaacgacagccggtactgcctgagcagcagactgagagtgtccgccaccttctggcagaacccccggaaccacttcagatgccaggtgcagttctacggcctgagcgagaacgacgagtggacccaggacagagccaagcccgtgacccagatcgtgtctgccgaagcctggggcagagccgattgcgacgtgaagctggtggaaaagagcttcgagacagacaccaacctgaacttccagaacctgagcgtgatcggcttcagaatcctgctgctgaaagtggccggctttaacctgctgatgaccctgcggctgtggtccagcagggccaagcgatctggatctggagcaacaaacttctcactactcaaacaagcaggtgacgtggaggagaatcccgggcctactagtatggactggatttggcgcatccttttccttgtcggcgctgctaccggcgcgcattccttcgaacaggtgcagctggtgcagtctggggccgaagtgaagaagcctggcgagagcctgaagatcagctgcaagggctccggctacaacttctctaacaagtggatcggctgggtgcgccagctgcctggcagaggactggaatggatcgccatcatctaccccggctacagcgacatcacctacagccccagcttccagggccgcgtgacaatcagcgccgacaccagcatcaacaccgcctacctgcactggcacagcctgaaggccagcgacaccgccatgtactactgcgtgcggcatacagccctggctggcttcgattattggggcctgggcaccctcgtgaccgtgtctagtacgcgtatccagaaccctgatcctgccgtgtaccagctgcgggatagcaagagcagcgacaagagcgtgtgtctgttcaccgacttcgacagccagaccaacgtgtcccagagcaaggactccgacgtgtacatcaccgataagtgcgtgctggacatgcggagcatggacttcaagagcaactccgccgtggcctggtccaacaagtccgatttcgcctgcgccaacgccttcaacaacagcattatccccgaggacacattcttcccaagccccgagagcagctgcggctttaccagcgagagctaccagcagggcgtgctgagcgccaccatcctgtacgagatcctgctgggcaaggccaccctgtacgccgtgctggtgtctgccctggtgctgatggctatggtcaagcggaaggacagccgggga

SEQ ID NO: 4360 - DNA, 2268 bp, synthetic construct
  source 1..2268: mol_type = other DNA
atggccttaccagtgaccgccttgctcctgccgctggccttgctgctccacgccgccaggccggaagtgcagctggttgaatctggcggaggactggttcagcctggcggatctctgagactgtcttgtgccgccagcggcttcagcttcagcgacttttggatgagctgggtccgacaggcccctggcaaaggacttgaatgggtcgccacaatcagccaggccggcagcgagaaggactacgtggactctgtgaagggcagattcaccatcagccgggacaacgccaagaagtccctgtacctccagatgaacagcctgagagccgaggacaccgccgtgtactattgtgcctctggcgtgtacagcttcgactacagaggccagggcaccctggtcacagtctcttctggtaccggcggaggcggatctggcggcggaggtagcggtggcggaggatctgaattcatcgtgctgacacagagccctgcttctctggccgtgtctctgggacagagagccaccatcagctgtagagccagcgagagcgtggacaactacggcaacaccttcatgcactggtatcagcagaagcccggccagcctcctaagctgctgatctacagagccagcaacctggaaagcggcatccccgccagattttctggcagcggcagcagaaccgacttcaccctgaccatcaatcccgtggaagccgacgacgtggcaacctactactgccagcagagcaacgaggaccctcctacatttggagccggcaccaagctggaactgaaactcgaggacctgaagaacgtgttcccacctgaggtggccgtgttcgagcctagcgaggccgagatcagccacacccagaaagccaccctcgtgtgcctggctaccggcttctaccccgaccatgtggaactgtcttggtgggtcaacggcaaagaggtgcacagcggcgtgtgtaccgacccccagccactgaaagaacagcccgccctgaacgacagccggtactgcctgagcagcagactgagagtgtccgccaccttctggcagaacccccggaaccacttcagatgccaggtgcagttctacggcctgagcgagaacgacgagtggacccaggacagagccaagcccgtgacccagatcgtgtctgccgaagcctggggcagagccgattgcgacgtgaagctggtggaaaagagcttcgagacagacaccaacctgaacttccagaacctgagcgtgatcggcttcagaatcctgctgctgaaagtggccggctttaacctgctgatgaccctgcggctgtggtccagcagggccaagcgatctggatctggagcaacaaacttctcactactcaaacaagcaggtgacgtggaggagaatcccgggcctactagtatggactggatttggcgcatccttttccttgtcggcgctgctaccggcgcgcattccttcgaacagattcagctggtgcagtctggccccgagctgaagaaacctggcgagacagtgaagatcagctgcaaggccagcggctacatcttcaccaattacggcatgaactgggtcaagcaggcccctggcaagagcttcaagtggatgggctggatcaacacctacaccggcgagagcacatacagcgccgacttcaagggcagattcgccttcagcctggaaaccagcgccagcacagcctacctgcacatcaacgacctgaagaacgaggacaccgccacctacttttgcgccagaagcggcggctacgaccctatggattattggggccagggcaccagcgtgaccgtttcttctacgcgtatccagaaccctgatcctgccgtgtaccagctgcgggatagcaagagcagcgacaagagcgtgtgtctgttcaccgacttcgacagccagaccaacgtgtcccagagcaaggactccgacgtgtacatcaccgataagtgcgtgctggacatgcggagcatggacttcaagagcaactccgccgtggcctggtccaacaagtccgatttcgcctgcgccaacgccttcaacaacagcattatccccgaggacacattcttcccaagccccgagagcagctgcggctttaccagcgagagctaccagcagggcgtgctgagcgccaccatcctgtacgagatcctgctgggcaaggccaccctgtacgccgtgctggtgtctgccctggtgctgatggctatggtcaagcggaaggacagccgggga

SEQ ID NO: 4361 - DNA, 2265 bp, synthetic construct
  source 1..2265: mol_type = other DNA
atggccttaccagtgaccgccttgctcctgccgctggccttgctgctccacgccgccaggccggaagtgcagctggttgaatctggcggaggactggttcagcctggcggatctctgagactgtcttgtgccgccagcggcttcagcttcagcgacttttggatgagctgggtccgacaggcccctggcaaaggacttgaatgggtcgccacaatcagccaggccggcagcgagaaggactacgtggactctgtgaagggcagattcaccatcagccgggacaacgccaagaagtccctgtacctccagatgaacagcctgagagccgaggacaccgccgtgtactattgtgcctctggcgtgtacagcttcgactacagaggccagggcaccctggtcacagtctcttctggtaccggcggaggcggatctggcggcggaggtagcggtggcggaggatctgaattcgagatcgtgctgacacagagccctggcaccctgagcctgtctccaggcgaaagagccacactgagctgtcgggccagccagagcgtgtccaatacctacctggcctggtatcaccagaggcccggacaggctccccggctgctgatctatggcgcttctagcagagccaccggcatccccgatagattcagcggctctggcagcggcaccgacttcgccctgacaatcagctccctggaacccgaggacttcgccgtgtactactgccagcagtacagcaactcctggaccttcggccagggcaccaaggtggaaatcaagagactcgaggacctgaagaacgtgttcccacctgaggtggccgtgttcgagcctagcgaggccgagatcagccacacccagaaagccaccctcgtgtgcctggctaccggcttctaccccgaccatgtggaactgtcttggtgggtcaacggcaaagaggtgcacagcggcgtgtgtaccgacccccagccactgaaagaacagcccgccctgaacgacagccggtactgcctgagcagcagactgagagtgtccgccaccttctggcagaacccccggaaccacttcagatgccaggtgcagttctacggcctgagcgagaacgacgagtggacccaggacagagccaagcccgtgacccagatcgtgtctgccgaagcctggggcagagccgattgcgacgtgaagctggtggaaaagagcttcgagacagacaccaacctgaacttccagaacctgagcgtgatcggcttcagaatcctgctgctgaaagtggccggctttaacctgctgatgaccctgcggctgtggtccagcagggccaagcgatctggatctggagcaacaaacttctcactactcaaacaagcaggtgacgtggaggagaatcccgggcctactagtatggactggatttggcgcatccttttccttgtcggcgctgctaccggcgcgcattccttcgaacaggtgcaactggtggaatctggcgggggagtggtgcagcctggcagaagcctgagactgtcttgtgccgccagcggcttcaccttcagcagctacgacatgcactgggtgcgccaggcccctggcaaaggactggaatgggtggccgtgatctcctacgacggcaccaacgagtattacgccgacagcgtgaagggccggttcaccatctccagagacaccagcaagaacaccctgtacctccagatgaacagcctgcgggccgaggacacagccgtgtattattgcgccagagagcggtacttcgactggtccttcgactactggggccagggaaccctggtgtccgtgtctagtacgcgtatccagaaccctgatcctgccgtgtaccagctgcgggatagcaagagcagcgacaagagcgtgtgtctgttcaccgacttcgacagccagaccaacgtgtcccagagcaaggactccgacgtgtacatcaccgataagtgcgtgctggacatgcggagcatggacttcaagagcaactccgccgtggcctggtccaacaagtccgatttcgcctgcgccaacgccttcaacaacagcattatccccgaggacacattcttcccaagccccgagagcagctgcggctttaccagcgagagctaccagcagggcgtgctgagcgccaccatcctgtacgagatcctgctgggcaaggccaccctgtacgccgtgctggtgtctgccctggtgctgatggctatggtcaagcggaaggacagccgggga

SEQ ID NO: 4362 - DNA, 2262 bp, synthetic construct
  source 1..2262: mol_type = other DNA
atggccttaccagtgaccgccttgctcctgccgctggccttgctgctccacgccgccaggccggaagtgcagctggttgaatctggcggaggactggttcagcctggcggatctctgagactgtcttgtgccgccagcggcttcagcttcagcgacttttggatgagctgggtccgacaggcccctggcaaaggacttgaatgggtcgccacaatcagccaggccggcagcgagaaggactacgtggactctgtgaagggcagattcaccatcagccgggacaacgccaagaagtccctgtacctccagatgaacagcctgagagccgaggacaccgccgtgtactattgtgcctctggcgtgtacagcttcgactacagaggccagggcaccctggtcacagtctcttctggtaccggcggaggcggatctggcggcggaggtagcggtggcggaggatctgaattcgagctgacacaggaccctgctgtgtctgttgccctgggccagacagtgcggattacctgtcaaggcgacagcctgagaagcaactacgccaactggtatcagcagaagcccggacaggctcccgtgctggttatctacggccagaacaacagacccagcggcatccccgatagattcagcggctctagctctggcaataccgccagcctgacaatcactggcgctcaggctgccgatgaggccgactactactgcgatagcagagtgtccaccggcaatcacgtggtgtttggcggcggaacaaagctgacagtgctcggacaactcgaggacctgaagaacgtgttcccacctgaggtggccgtgttcgagcctagcgaggccgagatcagccacacccagaaagccaccctcgtgtgcctggctaccggcttctaccccgaccatgtggaactgtcttggtgggtcaacggcaaagaggtgcacagcggcgtgtgtaccgacccccagccactgaaagaacagcccgccctgaacgacagccggtactgcctgagcagcagactgagagtgtccgccaccttctggcagaacccccggaaccacttcagatgccaggtgcagttctacggcctgagcgagaacgacgagtggacccaggacagagccaagcccgtgacccagatcgtgtctgccgaagcctggggcagagccgattgcgacgtgaagctggtggaaaagagcttcgagacagacaccaacctgaacttccagaacctgagcgtgatcggcttcagaatcctgctgctgaaagtggccggctttaacctgctgatgaccctgcggctgtggtccagcagggccaagcgatctggatctggagcaacaaacttctcactactcaaacaagcaggtgacgtggaggagaatcccgggcctactagtatggactggatttggcgcatccttttccttgtcggcgctgctaccggcgcgcattccttcgaagaagttcagctggtgcagagcggagccgaagtgaagaaacctggggcctctgtgaaggtgtcctgcaaggcttccggctacacctttaccagctacgccatgcactgggtccgacaggcacctggacaacggcttgaatggatgggctggatcaacgccggcaacggcaacaccaagtacagccagaaattccagggccgcgtgaccatcaccagagatacaagcgccagcaccgcctacatggaactgtctagcctgagatccgaggacaccgccgtgtactactgtgccagagacatcagctacggcagcttcgactattggggccagggcacactggtcaccgttagctctacgcgtatccagaaccctgatcctgccgtgtaccagctgcgggatagcaagagcagcgacaagagcgtgtgtctgttcaccgacttcgacagccagaccaacgtgtcccagagcaaggactccgacgtgtacatcaccgataagtgcgtgctggacatgcggagcatggacttcaagagcaactccgccgtggcctggtccaacaagtccgatttcgcctgcgccaacgccttcaacaacagcattatccccgaggacacattcttcccaagccccgagagcagctgcggctttaccagcgagagctaccagcagggcgtgctgagcgccaccatcctgtacgagatcctgctgggcaaggccaccctgtacgccgtgctggtgtctgccctggtgctgatggctatggtcaagcggaaggacagccgggga

SEQ ID NO: 4363 - DNA, 2268 bp, synthetic construct
  source 1..2268: mol_type = other DNA
atggccttaccagtgaccgccttgctcctgccgctggccttgctgctccacgccgccaggccggaagtgcagctggttgaatctggcggaggactggttcagcctggcggatctctgagactgtcttgtgccgccagcggcttcagcttcagcgacttttggatgagctgggtccgacaggcccctggcaaaggacttgaatgggtcgccacaatcagccaggccggcagcgagaaggactacgtggactctgtgaagggcagattcaccatcagccgggacaacgccaagaagtccctgtacctccagatgaacagcctgagagccgaggacaccgccgtgtactattgtgcctctggcgtgtacagcttcgactacagaggccagggcaccctggtcacagtctcttctggtaccggcggaggcggatctggcggcggaggtagcggtggcggaggatctgaattcgacatcgtgctgacacagacaccagccacactgagcgtgacacctggcgattctgtgtccctgagctgtagagccagccagagcatcagcaacaacctgcactggtatcagcagaagtcccacgagagccccagactgctgattaagaacgccagccagtctatcagcggcatccccagcaagtttagcggctctggcagcggcaccgacttcaccctgagaatcaacagcgtggaaaccgaggacttcgggatgtacttctgccagcagagcaatagctggccctacacatttggctccggcaccaagctggaaatcaaactcgaggacctgaagaacgtgttcccacctgaggtggccgtgttcgagcctagcgaggccgagatcagccacacccagaaagccaccctcgtgtgcctggctaccggcttctaccccgaccatgtggaactgtcttggtgggtcaacggcaaagaggtgcacagcggcgtgtgtaccgacccccagccactgaaagaacagcccgccctgaacgacagccggtactgcctgagcagcagactgagagtgtccgccaccttctggcagaacccccggaaccacttcagatgccaggtgcagttctacggcctgagcgagaacgacgagtggacccaggacagagccaagcccgtgacccagatcgtgtctgccgaagcctggggcagagccgattgcgacgtgaagctggtggaaaagagcttcgagacagacaccaacctgaacttccagaacctgagcgtgatcggcttcagaatcctgctgctgaaagtggccggctttaacctgctgatgaccctgcggctgtggtccagcagggccaagcgatctggatctggagcaacaaacttctcactactcaaacaagcaggtgacgtggaggagaatcccgggcctactagtatggactggatttggcgcatccttttccttgtcggcgctgctaccggcgcgcattccttcgaacaagtgaagctgcaacagagcggacccgagctggttaagccaggcgcttccgtgaagattagctgcaaggccagcggctacagcttcaccggctactacatgcactgggtcaagcagagccacggcaacatcctggactggatcggctacatctacccctacaacggcgtgtccagctacaaccagaagttcaagggcaaagccactctgaccgtggacaagagcagcagcaccgcctacatggaactgagaagcctgaccagcgaggacagcgccgtgtactattgtgccagagagcggggcctgtaccagctcagagcaatggattattggggccagggcaccagcgtgaccgtttcttctacgcgtatccagaaccctgatcctgccgtgtaccagctgcgggatagcaagagcagcgacaagagcgtgtgtctgttcaccgacttcgacagccagaccaacgtgtcccagagcaaggactccgacgtgtacatcaccgataagtgcgtgctggacatgcggagcatggacttcaagagcaactccgccgtggcctggtccaacaagtccgatttcgcctgcgccaacgccttcaacaacagcattatccccgaggacacattcttcccaagccccgagagcagctgcggctttaccagcgagagctaccagcagggcgtgctgagcgccaccatcctgtacgagatcctgctgggcaaggccaccctgtacgccgtgctggtgtctgccctggtgctgatggctatggtcaagcggaaggacagccgggga

SEQ ID NO: 4364 - DNA, 2241 bp, synthetic construct
  source 1..2241: mol_type = other DNA
atggccttaccagtgaccgccttgctcctgccgctggccttgctgctccacgccgccaggccggaagtgcagctggttgaatctggcggaggactggttcagcctggcggatctctgagactgtcttgtgccgccagcggcttcagcttcagcgacttttggatgagctgggtccgacaggcccctggcaaaggacttgaatgggtcgccacaatcagccaggccggcagcgagaaggactacgtggactctgtgaagggcagattcaccatcagccgggacaacgccaagaagtccctgtacctccagatgaacagcctgagagccgaggacaccgccgtgtactattgtgcctctggcgtgtacagcttcgactacagaggccagggcaccctggtcacagtctcttctggtaccggcggaggcggatctggcggcggaggtagcggtggcggaggatctgaattcgacatcgtgatgacacagacccctgccatcatgagcgcctctccaggccagaaagtgaccatcacatgtagcgccagcagcagcgtgaactacatgcactggtatcagcagaagctgggcagcagccccaagctgtggatctacgataccagcaaactggcccctggcgtgccagccagattttctggttctggcagcggcaccagctacagcctgacaatcagcagcatggaagccgaggatgccgccagctacttctgccatcagtggtctagctacccctacacctttggctccggcaccaagctggaaatcaaactcgaggacctgaagaacgtgttcccacctgaggtggccgtgttcgagcctagcgaggccgagatcagccacacccagaaagccaccctcgtgtgcctggctaccggcttctaccccgaccatgtggaactgtcttggtgggtcaacggcaaagaggtgcacagcggcgtgtgtaccgacccccagccactgaaagaacagcccgccctgaacgacagccggtactgcctgagcagcagactgagagtgtccgccaccttctggcagaacccccggaaccacttcagatgccaggtgcagttctacggcctgagcgagaacgacgagtggacccaggacagagccaagcccgtgacccagatcgtgtctgccgaagcctggggcagagccgattgcgacgtgaagctggtggaaaagagcttcgagacagacaccaacctgaacttccagaacctgagcgtgatcggcttcagaatcctgctgctgaaagtggccggctttaacctgctgatgaccctgcggctgtggtccagcagggccaagcgatctggatctggagcaacaaacttctcactactcaaacaagcaggtgacgtggaggagaatcccgggcctactagtatggactggatttggcgcatccttttccttgtcggcgctgctaccggcgcgcattccttcgaagaagttcagctccaagagtctggccccgacctggtcaagcctagccaaagcctgagcctgacctgtaccgtgaccggctacagcatcacaagcggctatggatggcactggatcagacagttccccggcaacaaactggaatggatgggctacatccactacagcggcagcaccacctacaatcccagcctgaagtcccggatcagcatcagcagagacaccagcaagaaccagttcttcctgcaactgaacagcgtgaccaccgaggacaccgccacctactattgtgctcggagcctgagatattggggccagggcacaaccctgaccgtgtcatctacgcgtatccagaaccctgatcctgccgtgtaccagctgcgggatagcaagagcagcgacaagagcgtgtgtctgttcaccgacttcgacagccagaccaacgtgtcccagagcaaggactccgacgtgtacatcaccgataagtgcgtgctggacatgcggagcatggacttcaagagcaactccgccgtggcctggtccaacaagtccgatttcgcctgcgccaacgccttcaacaacagcattatccccgaggacacattcttcccaagccccgagagcagctgcggctttaccagcgagagctaccagcagggcgtgctgagcgccaccatcctgtacgagatcctgctgggcaaggccaccctgtacgccgtgctggtgtctgccctggtgctgatggctatggtcaagcggaaggacagccgggga

SEQ ID NO: 4365 - DNA, 2250 bp, synthetic construct
  source 1..2250: mol_type = other DNA
atggccttaccagtgaccgccttgctcctgccgctggccttgctgctccacgccgccaggccggaagtgcagctggttgaatctggcggaggactggttcagcctggcggatctctgagactgtcttgtgccgccagcggcttcagcttcagcgacttttggatgagctgggtccgacaggcccctggcaaaggacttgaatgggtcgccacaatcagccaggccggcagcgagaaggactacgtggactctgtgaagggcagattcaccatcagccgggacaacgccaagaagtccctgtacctccagatgaacagcctgagagccgaggacaccgccgtgtactattgtgcctctggcgtgtacagcttcgactacagaggccagggcaccctggtcacagtctcttctggtaccggcggaggcggatctggcggcggaggtagcggtggcggaggatctgaattcgacatccagatgacacagagccctagcagcctgtctgccagcgtgggagacagagtgaccatcacctgtagcgccaccagcagcatcagctacatgcactggtatcagcagaagcccggcaaggcccctaaaggctggatctacgataccagcaaactggcccacggcgtgcccagcagattttctggttctggcagcggcaccgacttcaccctgacaatatctagcctccagcctgaggacttcgccacctactactgccaccagagaagaagctaccccttcaccttcggccagggcaccaaggtggaaatcaaactcgaggacctgaagaacgtgttcccacctgaggtggccgtgttcgagcctagcgaggccgagatcagccacacccagaaagccaccctcgtgtgcctggctaccggcttctaccccgaccatgtggaactgtcttggtgggtcaacggcaaagaggtgcacagcggcgtgtgtaccgacccccagccactgaaagaacagcccgccctgaacgacagccggtactgcctgagcagcagactgagagtgtccgccaccttctggcagaacccccggaaccacttcagatgccaggtgcagttctacggcctgagcgagaacgacgagtggacccaggacagagccaagcccgtgacccagatcgtgtctgccgaagcctggggcagagccgattgcgacgtgaagctggtggaaaagagcttcgagacagacaccaacctgaacttccagaacctgagcgtgatcggcttcagaatcctgctgctgaaagtggccggctttaacctgctgatgaccctgcggctgtggtccagcagggccaagcgatctggatctggagcaacaaacttctcactactcaaacaagcaggtgacgtggaggagaatcccgggcctactagtatggactggatttggcgcatccttttccttgtcggcgctgctaccggcgcgcattccttcgaagaagtgcaactggttcagagcggagccgaagtgaagaaacctggggcctctgtgaaggtgtcctgcaaggcttccggctacacctttaccaatttctggattcactgggtccgacaggctccaggccaaggactggaatggatcggagagatcgaccccagcgacagctacaccaactacaaccagaaattcaaaggccgggtcaccatcaccagagacaccagcacaagcaccgcctacctggaactgagcagcctgagaagcgaggacaccgccgtgtactactgcgccagggaaatcaccaccgtggattattggggccagggaaccctggtcaccgtgtcatctacgcgtatccagaaccctgatcctgccgtgtaccagctgcgggatagcaagagcagcgacaagagcgtgtgtctgttcaccgacttcgacagccagaccaacgtgtcccagagcaaggactccgacgtgtacatcaccgataagtgcgtgctggacatgcggagcatggacttcaagagcaactccgccgtggcctggtccaacaagtccgatttcgcctgcgccaacgccttcaacaacagcattatccccgaggacacattcttcccaagccccgagagcagctgcggctttaccagcgagagctaccagcagggcgtgctgagcgccaccatcctgtacgagatcctgctgggcaaggccaccctgtacgccgtgctggtgtctgccctggtgctgatggctatggtcaagcggaaggacagccgggga

SEQ ID NO: 4366 - DNA, 2271 bp, synthetic construct
  source 1..2271: mol_type = other DNA
atggccttaccagtgaccgccttgctcctgccgctggccttgctgctccacgccgccaggccggaagtgcagctggttgaatctggcggaggactggttcagcctggcggatctctgagactgtcttgtgccgccagcggcttcagcttcagcgacttttggatgagctgggtccgacaggcccctggcaaaggacttgaatgggtcgccacaatcagccaggccggcagcgagaaggactacgtggactctgtgaagggcagattcaccatcagccgggacaacgccaagaagtccctgtacctccagatgaacagcctgagagccgaggacaccgccgtgtactattgtgcctctggcgtgtacagcttcgactacagaggccagggcaccctggtcacagtctcttctggtaccggcggaggcggatctggcggcggaggtagcggtggcggaggatctgaattcgacatccagatgacacagagccctagcagcctgtctgccagcgtgggagacagagtgaccatcacatgcaaggccagccagggcttcaacaaatacgtggcctggtatcagcagaagcccggcaaggctcctaagctgctgatctactacaccagcacactccagcctggcgtgcccagcagattttctggctctggcagcggcagagactacaccctgacaatatccagcctccagccagaggacttcgccacctactactgtctccagtacggcaacctgctgtacgcctttggacagggcaccaaggtggaaatcaagagactcgaggacctgaagaacgtgttcccacctgaggtggccgtgttcgagcctagcgaggccgagatcagccacacccagaaagccaccctcgtgtgcctggctaccggcttctaccccgaccatgtggaactgtcttggtgggtcaacggcaaagaggtgcacagcggcgtgtgtaccgacccccagccactgaaagaacagcccgccctgaacgacagccggtactgcctgagcagcagactgagagtgtccgccaccttctggcagaacccccggaaccacttcagatgccaggtgcagttctacggcctgagcgagaacgacgagtggacccaggacagagccaagcccgtgacccagatcgtgtctgccgaagcctggggcagagccgattgcgacgtgaagctggtggaaaagagcttcgagacagacaccaacctgaacttccagaacctgagcgtgatcggcttcagaatcctgctgctgaaagtggccggctttaacctgctgatgaccctgcggctgtggtccagcagggccaagcgatctggatctggagcaacaaacttctcactactcaaacaagcaggtgacgtggaggagaatcccgggcctactagtatggactggatttggcgcatccttttccttgtcggcgctgctaccggcgcgcattccttcgaagaagttcagcttgtgcagagcggagccgaagtgaagaaacctggggcctctgtgaaggtgtcctgcaaagccagcggctacacctttaccagctactggatcggctgggtccgacaggctcctggacaaggactggaatggatcggcgacatctatcccggcggaggctacaccaactacaacgagaagttcaagggccgcgtgacaatcaccagagacacctctacaagcaccgcctacctggaactgagcagcctgagaagcgaggacaccgccgtgtactactgcgccagactggatggcagcagctacagaggcgctatggattcttggggccagggcacactggtcaccgtttcttctacgcgtatccagaaccctgatcctgccgtgtaccagctgcgggatagcaagagcagcgacaagagcgtgtgtctgttcaccgacttcgacagccagaccaacgtgtcccagagcaaggactccgacgtgtacatcaccgataagtgcgtgctggacatgcggagcatggacttcaagagcaactccgccgtggcctggtccaacaagtccgatttcgcctgcgccaacgccttcaacaacagcattatccccgaggacacattcttcccaagccccgagagcagctgcggctttaccagcgagagctaccagcagggcgtgctgagcgccaccatcctgtacgagatcctgctgggcaaggccaccctgtacgccgtgctggtgtctgccctggtgctgatggctatggtcaagcggaaggacagccgggga

SEQ ID NO: 4367 - DNA, 2259 bp, synthetic construct
  source 1..2259: mol_type = other DNA
atggccttaccagtgaccgccttgctcctgccgctggccttgctgctccacgccgccaggccggaagtgcagctggttgaatctggcggaggactggttcagcctggcggatctctgagactgtcttgtgccgccagcggcttcagcttcagcgacttttggatgagctgggtccgacaggcccctggcaaaggacttgaatgggtcgccacaatcagccaggccggcagcgagaaggactacgtggactctgtgaagggcagattcaccatcagccgggacaacgccaagaagtccctgtacctccagatgaacagcctgagagccgaggacaccgccgtgtactattgtgcctctggcgtgtacagcttcgactacagaggccagggcaccctggtcacagtctcttctggtaccggcggaggcggatctggcggcggaggtagcggtggcggaggatctgaattcgacatccagatgacacagagccctagcagcctgtctgccagcgtgggagacagagtgaccatcacctgtagagccagccaggacatccggtactacctgaactggtatcagcagaagcccggcaaggcccctaagctgctgatctatgtggcctccagcctccagagcggagtgccttctagattttctggcagcggctccggcaccgagtttaccctgacagtgtctagcttgcagcccgaggacttcgccacctactactgcctgcaagtgtacagcacccctcggacctttggacagggcaccaaggtggaaatcaaactcgaggacctgaagaacgtgttcccacctgaggtggccgtgttcgagcctagcgaggccgagatcagccacacccagaaagccaccctcgtgtgcctggctaccggcttctaccccgaccatgtggaactgtcttggtgggtcaacggcaaagaggtgcacagcggcgtgtgtaccgacccccagccactgaaagaacagcccgccctgaacgacagccggtactgcctgagcagcagactgagagtgtccgccaccttctggcagaacccccggaaccacttcagatgccaggtgcagttctacggcctgagcgagaacgacgagtggacccaggacagagccaagcccgtgacccagatcgtgtctgccgaagcctggggcagagccgattgcgacgtgaagctggtggaaaagagcttcgagacagacaccaacctgaacttccagaacctgagcgtgatcggcttcagaatcctgctgctgaaagtggccggctttaacctgctgatgaccctgcggctgtggtccagcagggccaagcgatctggatctggagcaacaaacttctcactactcaaacaagcaggtgacgtggaggagaatcccgggcctactagtatggactggatttggcgcatccttttccttgtcggcgctgctaccggcgcgcattccttcgaagaagtgcagcttgttgaatctggcggcggactggctaagcctggcggatctctgagactgtcttgtgccgccagcggcttccggttcaccttcaacaactactacatggactgggtccgacaggcccctggacaaggacttgaatgggtgtccagaatcagcagcagcggcgaccctacttggtacgccgattctgtgaagggcagattcaccatcagcagagagaacgccaagaacaccctgttcctccagatgaactccctgagagccgaggacaccgccgtgtactattgtgcctctctgaccaccggcagcgattcttggggacagggcgtgctggttaccgtgtcatctacgcgtatccagaaccctgatcctgccgtgtaccagctgcgggatagcaagagcagcgacaagagcgtgtgtctgttcaccgacttcgacagccagaccaacgtgtcccagagcaaggactccgacgtgtacatcaccgataagtgcgtgctggacatgcggagcatggacttcaagagcaactccgccgtggcctggtccaacaagtccgatttcgcctgcgccaacgccttcaacaacagcattatccccgaggacacattcttcccaagccccgagagcagctgcggctttaccagcgagagctaccagcagggcgtgctgagcgccaccatcctgtacgagatcctgctgggcaaggccaccctgtacgccgtgctggtgtctgccctggtgctgatggctatggtcaagcggaaggacagccgggga

SEQ ID NO: 4368 - DNA, 2262 bp, synthetic construct
  source 1..2262: mol_type = other DNA
atggccttaccagtgaccgccttgctcctgccgctggccttgctgctccacgccgccaggccggaagtgcagctggttgaatctggcggaggactggttcagcctggcggatctctgagactgtcttgtgccgccagcggcttcagcttcagcgacttttggatgagctgggtccgacaggcccctggcaaaggacttgaatgggtcgccacaatcagccaggccggcagcgagaaggactacgtggactctgtgaagggcagattcaccatcagccgggacaacgccaagaagtccctgtacctccagatgaacagcctgagagccgaggacaccgccgtgtactattgtgcctctggcgtgtacagcttcgactacagaggccagggcaccctggtcacagtctcttctggtaccggcggaggcggatctggcggcggaggtagcggtggcggaggatctgaattcgagatcgtgatgacacagagccccgccacactgagtgtgtctccaggcgaaagagccacactgtcctgtagagccagccagagcgtgtccagaaacctggcctggtatcagcagaagcctggacaggctccccggctgttgatctacggcgcttctacaagagccaccggcattcccgccagattttctggctctggcagcggcaccgagttcaccctgacaatcggaagcctccagagcgaggacttcgccgtgtactactgccagcagtacaagacctggcctcggacctttggacagggcaccaacgtggaaatcaaactcgaggacctgaagaacgtgttcccacctgaggtggccgtgttcgagcctagcgaggccgagatcagccacacccagaaagccaccctcgtgtgcctggctaccggcttctaccccgaccatgtggaactgtcttggtgggtcaacggcaaagaggtgcacagcggcgtgtgtaccgacccccagccactgaaagaacagcccgccctgaacgacagccggtactgcctgagcagcagactgagagtgtccgccaccttctggcagaacccccggaaccacttcagatgccaggtgcagttctacggcctgagcgagaacgacgagtggacccaggacagagccaagcccgtgacccagatcgtgtctgccgaagcctggggcagagccgattgcgacgtgaagctggtggaaaagagcttcgagacagacaccaacctgaacttccagaacctgagcgtgatcggcttcagaatcctgctgctgaaagtggccggctttaacctgctgatgaccctgcggctgtggtccagcagggccaagcgatctggatctggagcaacaaacttctcactactcaaacaagcaggtgacgtggaggagaatcccgggcctactagtatggactggatttggcgcatccttttccttgtcggcgctgctaccggcgcgcattccttcgaacaagttcagctgcaacaatggggagccggcctgctgaagcctagcgaaacactgtctctgacctgcgccgtgttcggcggctctttcagcggctactactggtcctggatcagacagcctcctggcaaaggactggaatggatcggcgagatcaaccaccggggcaacaccaacgacaaccccagcctgaaaagcagagtgaccatcagcgtggacaccagcaagaaccagttcgccctgaagctgagcagcgtgacagccgctgataccgccgtgtattattgcgccagagagcggggctacacctacggcaatttcgatcactggggccagggcaccctggtcacagtttcttctacgcgtatccagaaccctgatcctgccgtgtaccagctgcgggatagcaagagcagcgacaagagcgtgtgtctgttcaccgacttcgacagccagaccaacgtgtcccagagcaaggactccgacgtgtacatcaccgataagtgcgtgctggacatgcggagcatggacttcaagagcaactccgccgtggcctggtccaacaagtccgatttcgcctgcgccaacgccttcaacaacagcattatccccgaggacacattcttcccaagccccgagagcagctgcggctttaccagcgagagctaccagcagggcgtgctgagcgccaccatcctgtacgagatcctgctgggcaaggccaccctgtacgccgtgctggtgtctgccctggtgctgatggctatggtcaagcggaaggacagccgggga

SEQ ID NO: 4369 - DNA, 2265 bp, synthetic construct
  source 1..2265: mol_type = other DNA
atggccttaccagtgaccgccttgctcctgccgctggccttgctgctccacgccgccaggccggaagtgcagctggttgaatctggcggaggactggttcagcctggcggatctctgagactgtcttgtgccgccagcggcttcagcttcagcgacttttggatgagctgggtccgacaggcccctggcaaaggacttgaatgggtcgccacaatcagccaggccggcagcgagaaggactacgtggactctgtgaagggcagattcaccatcagccgggacaacgccaagaagtccctgtacctccagatgaacagcctgagagccgaggacaccgccgtgtactattgtgcctctggcgtgtacagcttcgactacagaggccagggcaccctggtcacagtctcttctggtaccggcggaggcggatctggcggcggaggtagcggtggcggaggatctgaattcgagatcgtgatgacccctagcagcgccacactgagtgtgtctccaggcgaaagagccacactgtcctgtagagccagccagagcgtgtccagaaacctggcctggtatcagcagaagcctggacaggctccccggctgttgatctacggcgcttctacaagagccaccggcattcccgccagattttctggctctggcagcggcaccgagttcaccctgacaatctctagcctccagagcgaggacttcgccgtgtactactgccaccagtacagcaactggatgtgcagcttcggccagggcaccaagctggaaatcaaactcgaggacctgaagaacgtgttcccacctgaggtggccgtgttcgagcctagcgaggccgagatcagccacacccagaaagccaccctcgtgtgcctggctaccggcttctaccccgaccatgtggaactgtcttggtgggtcaacggcaaagaggtgcacagcggcgtgtgtaccgacccccagccactgaaagaacagcccgccctgaacgacagccggtactgcctgagcagcagactgagagtgtccgccaccttctggcagaacccccggaaccacttcagatgccaggtgcagttctacggcctgagcgagaacgacgagtggacccaggacagagccaagcccgtgacccagatcgtgtctgccgaagcctggggcagagccgattgcgacgtgaagctggtggaaaagagcttcgagacagacaccaacctgaacttccagaacctgagcgtgatcggcttcagaatcctgctgctgaaagtggccggctttaacctgctgatgaccctgcggctgtggtccagcagggccaagcgatctggatctggagcaacaaacttctcactactcaaacaagcaggtgacgtggaggagaatcccgggcctactagtatggactggatttggcgcatccttttccttgtcggcgctgctaccggcgcgcattccttcgaagaagttcagctccttgagtcaggtggcggcctggttcaacctggcggatctctgagactgagctgtgccgccagcggcttcacctttagcagatacgccatgaactgggtccgacaggcccctggcaaaggactggaatgggtgtccggcatctctggaagcggcggcagaacctactacgccgattctgtgaagggcagattcaccatcagccgggacaacagcaagaacaccctgtacctccagatgaacagcctgagagccgaggacacagccgtgtattattgcgccaaggaccgggacttttggagcggcccttttgactattggggccagggaaccctggtcaccgttagctctacgcgtatccagaaccctgatcctgccgtgtaccagctgcgggatagcaagagcagcgacaagagcgtgtgtctgttcaccgacttcgacagccagaccaacgtgtcccagagcaaggactccgacgtgtacatcaccgataagtgcgtgctggacatgcggagcatggacttcaagagcaactccgccgtggcctggtccaacaagtccgatttcgcctgcgccaacgccttcaacaacagcattatccccgaggacacattcttcccaagccccgagagcagctgcggctttaccagcgagagctaccagcagggcgtgctgagcgccaccatcctgtacgagatcctgctgggcaaggccaccctgtacgccgtgctggtgtctgccctggtgctgatggctatggtcaagcggaaggacagccgggga

SEQ ID NO: 4370 - DNA, 2280 bp, synthetic construct
  source 1..2280: mol_type = other DNA
atggccttaccagtgaccgccttgctcctgccgctggccttgctgctccacgccgccaggccggaagtgcagctggttgaatctggcggaggactggttcagcctggcggatctctgagactgtcttgtgccgccagcggcttcagcttcagcgacttttggatgagctgggtccgacaggcccctggcaaaggacttgaatgggtcgccacaatcagccaggccggcagcgagaaggactacgtggactctgtgaagggcagattcaccatcagccgggacaacgccaagaagtccctgtacctccagatgaacagcctgagagccgaggacaccgccgtgtactattgtgcctctggcgtgtacagcttcgactacagaggccagggcaccctggtcacagtctcttctggtaccggcggaggcggatctggcggcggaggtagcggtggcggaggatctgaattcgacatccagatgacccagagccccagcagcctgtctgccagcgtgggcgacagagtgaccatcacatgcaaggccagcaagaacatcagaagctacctggcctggtatcagcagaagcccggcaaggcccccaagctgctgatctacagcggcagcacactgcacagcggcgtgcccagcagattttccggctctggcagcggcaccgacttcaccctgaccatctctagcctccagcccgaggacttcgccacctactactgccagcagcaccacgagtaccccctgacattcggccagggcaccaaggtggaaatcaagagactcgaggacctgaagaacgtgttcccacctgaggtggccgtgttcgagcctagcgaggccgagatcagccacacccagaaagccaccctcgtgtgcctggctaccggcttctaccccgaccatgtggaactgtcttggtgggtcaacggcaaagaggtgcacagcggcgtgtgtaccgacccccagccactgaaagaacagcccgccctgaacgacagccggtactgcctgagcagcagactgagagtgtccgccaccttctggcagaacccccggaaccacttcagatgccaggtgcagttctacggcctgagcgagaacgacgagtggacccaggacagagccaagcccgtgacccagatcgtgtctgccgaagcctggggcagagccgattgcgacgtgaagctggtggaaaagagcttcgagacagacaccaacctgaacttccagaacctgagcgtgatcggcttcagaatcctgctgctgaaagtggccggctttaacctgctgatgaccctgcggctgtggtccagcagggccaagcgatctggatctggagcaacaaacttctcactactcaaacaagcaggtgacgtggaggagaatcccgggcctactagtatggactggatttggcgcatccttttccttgtcggcgctgctaccggcgcgcattccttcgaacaggtgcaactccaggaatctggccccggactcgtgaagcccagcgagacactgagcctgacctgtaccgtgtccggctacaccatcaccagcggctacgactggtcctggatcagacagcctcctggcaagggcctggaatggatcggctacatcaactacggcggctccaccaactacaagcccagcctgggaagccgcgtgacaatcagcgtggacacctccaagaaccagttcagcctgaagctgagcagcgtgacagccgccgataccgccgtgtactactgcgcccggtacaacgagtacaagagctacatctacgattggtacttcgacttctggggccagggaaccctcgtgaccgtgtctagtacgcgtatccagaaccctgatcctgccgtgtaccagctgcgggatagcaagagcagcgacaagagcgtgtgtctgttcaccgacttcgacagccagaccaacgtgtcccagagcaaggactccgacgtgtacatcaccgataagtgcgtgctggacatgcggagcatggacttcaagagcaactccgccgtggcctggtccaacaagtccgatttcgcctgcgccaacgccttcaacaacagcattatccccgaggacacattcttcccaagccccgagagcagctgcggctttaccagcgagagctaccagcagggcgtgctgagcgccaccatcctgtacgagatcctgctgggcaaggccaccctgtacgccgtgctggtgtctgccctggtgctgatggctatggtcaagcggaaggacagccgggga

SEQ ID NO: 4371 - DNA, 2286 bp, synthetic construct
  source 1..2286: mol_type = other DNA
atggccttaccagtgaccgccttgctcctgccgctggccttgctgctccacgccgccaggccggaagtgcagctggttgaatctggcggaggactggttcagcctggcggatctctgagactgtcttgtgccgccagcggcttcagcttcagcgacttttggatgagctgggtccgacaggcccctggcaaaggacttgaatgggtcgccacaatcagccaggccggcagcgagaaggactacgtggactctgtgaagggcagattcaccatcagccgggacaacgccaagaagtccctgtacctccagatgaacagcctgagagccgaggacaccgccgtgtactattgtgcctctggcgtgtacagcttcgactacagaggccagggcaccctggtcacagtctcttctggtaccggcggaggcggatctggcggcggaggtagcggtggcggaggatctgaattccagtctgtggtcacacagcctccatccgtgtctgctgcccctggacagaaagtgaccatctcctgtagcggcagcagcagcaacatcggcaacaactacgtgtcctggtatcagcagctccccggcacagctcccaaactgctgatctacgacaacaacaagcggcccagcggcatccccgatagattttctggcagcaagagcggcaccagcgccacactgggaattaccggacttcagacaggcgacgaggccgactactactgtggcacatgggatggcagcctgtacaccatgcttttcggcggaggcaccaagctgacagtgcttctcgaggacctgaagaacgtgttcccacctgaggtggccgtgttcgagcctagcgaggccgagatcagccacacccagaaagccaccctcgtgtgcctggctaccggcttctaccccgaccatgtggaactgtcttggtgggtcaacggcaaagaggtgcacagcggcgtgtgtaccgacccccagccactgaaagaacagcccgccctgaacgacagccggtactgcctgagcagcagactgagagtgtccgccaccttctggcagaacccccggaaccacttcagatgccaggtgcagttctacggcctgagcgagaacgacgagtggacccaggacagagccaagcccgtgacccagatcgtgtctgccgaagcctggggcagagccgattgcgacgtgaagctggtggaaaagagcttcgagacagacaccaacctgaacttccagaacctgagcgtgatcggcttcagaatcctgctgctgaaagtggccggctttaacctgctgatgaccctgcggctgtggtccagcagggccaagcgatctggatctggagcaacaaacttctcactactcaaacaagcaggtgacgtggaggagaatcccgggcctactagtatggactggatttggcgcatccttttccttgtcggcgctgctaccggcgcgcattccttcgaagaagtgcaactggtggaatctggcggcggactggttaagcctggcggatctctgagactgtcttgtgccgccagcggcttcaccttcagcaatgcctggatgagctgggttcgacaggcccctggaaaaggactggaatgggtcggattcatccggtccaaagcctacggcggcaccacagaatatgccgcctctgtgaagggcagattcaccatcagccgggacgacagcaagtctatcgcctacctccagatgaacaacctgaaaaccgaggacaccgccgtgtactactgcgccagagatggcctgtacagcagctcttggtacgacagcgattactggggccagggcacactggtcacagtgtcatctacgcgtatccagaaccctgatcctgccgtgtaccagctgcgggatagcaagagcagcgacaagagcgtgtgtctgttcaccgacttcgacagccagaccaacgtgtcccagagcaaggactccgacgtgtacatcaccgataagtgcgtgctggacatgcggagcatggacttcaagagcaactccgccgtggcctggtccaacaagtccgatttcgcctgcgccaacgccttcaacaacagcattatccccgaggacacattcttcccaagccccgagagcagctgcggctttaccagcgagagctaccagcagggcgtgctgagcgccaccatcctgtacgagatcctgctgggcaaggccaccctgtacgccgtgctggtgtctgccctggtgctgatggctatggtcaagcggaaggacagccgggga

SEQ ID NO: 4372 - DNA, 2301 bp, synthetic construct
  source 1..2301: mol_type = other DNA
atggccttaccagtgaccgccttgctcctgccgctggccttgctgctccacgccgccaggccggaagtgcagctggttgaatctggcggaggactggttcagcctggcggatctctgagactgtcttgtgccgccagcggcttcagcttcagcgacttttggatgagctgggtccgacaggcccctggcaaaggacttgaatgggtcgccacaatcagccaggccggcagcgagaaggactacgtggactctgtgaagggcagattcaccatcagccgggacaacgccaagaagtccctgtacctccagatgaacagcctgagagccgaggacaccgccgtgtactattgtgcctctggcgtgtacagcttcgactacagaggccagggcaccctggtcacagtctcttctggtaccggcggaggcggatctggcggcggaggtagcggtggcggaggatctgaattccagtctgtgctgacacagcctcctagtgtgtctggcgctcctggacagagagtgaccatctcttgtaccggcagcagcagcaatatcggagccggctatgacgtgcactggtatcagcagctccctggcacagcccctaaactgctgatcttcggcaacagcaacagacccagcggcgtgcccgatagattcagcggctttaagagcggcacaagcgccagcctggctatcactggactgcaagccgaggacgaggccgactacttctgccagagctacgatagcagcctgagcggcagcggagtgtttggcacaggcaccaaagtgacagtgcttggcctcgaggacctgaagaacgtgttcccacctgaggtggccgtgttcgagcctagcgaggccgagatcagccacacccagaaagccaccctcgtgtgcctggctaccggcttctaccccgaccatgtggaactgtcttggtgggtcaacggcaaagaggtgcacagcggcgtgtgtaccgacccccagccactgaaagaacagcccgccctgaacgacagccggtactgcctgagcagcagactgagagtgtccgccaccttctggcagaacccccggaaccacttcagatgccaggtgcagttctacggcctgagcgagaacgacgagtggacccaggacagagccaagcccgtgacccagatcgtgtctgccgaagcctggggcagagccgattgcgacgtgaagctggtggaaaagagcttcgagacagacaccaacctgaacttccagaacctgagcgtgatcggcttcagaatcctgctgctgaaagtggccggctttaacctgctgatgaccctgcggctgtggtccagcagggccaagcgatctggatctggagcaacaaacttctcactactcaaacaagcaggtgacgtggaggagaatcccgggcctactagtatggactggatttggcgcatccttttccttgtcggcgctgctaccggcgcgcattccttcgaacaaatgcaactggttcaaagcggcggtggcctggtgcaacctggaagaagtctgagactgagctgtgccgccagcggcttcaccttcgatgattacgccatgcactgggtccgacaggcccctggaaaaggactggaatgggtgtccggcatctcctggaatagcggctctatcggctacgccgacagcgtgaagggcagattcaccatcagccgggacaacgccaagaacagcctgtacctccagatgaactccctgagagccgaggatacagccctgtactactgcgccaaggacatccacagcggcagctactacggcctgctgtactacgctatggacgtgtggggccagggcacaaccgtgacagtttcttctacgcgtatccagaaccctgatcctgccgtgtaccagctgcgggatagcaagagcagcgacaagagcgtgtgtctgttcaccgacttcgacagccagaccaacgtgtcccagagcaaggactccgacgtgtacatcaccgataagtgcgtgctggacatgcggagcatggacttcaagagcaactccgccgtggcctggtccaacaagtccgatttcgcctgcgccaacgccttcaacaacagcattatccccgaggacacattcttcccaagccccgagagcagctgcggctttaccagcgagagctaccagcagggcgtgctgagcgccaccatcctgtacgagatcctgctgggcaaggccaccctgtacgccgtgctggtgtctgccctggtgctgatggctatggtcaagcggaaggacagccgggga

SEQ ID NO: 4373 - DNA, 2301 bp, synthetic construct
  source 1..2301: mol_type = other DNA
atggccttaccagtgaccgccttgctcctgccgctggccttgctgctccacgccgccaggccggaagtgcagctggttgaatctggcggaggactggttcagcctggcggatctctgagactgtcttgtgccgccagcggcttcagcttcagcgacttttggatgagctgggtccgacaggcccctggcaaaggacttgaatgggtcgccacaatcagccaggccggcagcgagaaggactacgtggactctgtgaagggcagattcaccatcagccgggacaacgccaagaagtccctgtacctccagatgaacagcctgagagccgaggacaccgccgtgtactattgtgcctctggcgtgtacagcttcgactacagaggccagggcaccctggtcacagtctcttctggtaccggcggaggcggatctggcggcggaggtagcggtggcggaggatctgaattcctgcctgttctgacacagcctccatctgcctctggcacacctggacagagagtgaccatcagctgtagcggcagaagcagcaacatcggcagcaacagcgtgaactggtacagacagcttcctggcgctgcccctaagctgctgatctacagcaacaaccagcggcctcctggcgtgccagtcagattttctggcagcaagagcggcacaagcgccagcctggctatttctggactccagtctgaggacgaggccacctactactgtgccacctgggacgacaacctgaacgtgcactacgtgttcggcaccggcaccaaagtgacagtgcttggaagtagactcgaggacctgaagaacgtgttcccacctgaggtggccgtgttcgagcctagcgaggccgagatcagccacacccagaaagccaccctcgtgtgcctggctaccggcttctaccccgaccatgtggaactgtcttggtgggtcaacggcaaagaggtgcacagcggcgtgtgtaccgacccccagccactgaaagaacagcccgccctgaacgacagccggtactgcctgagcagcagactgagagtgtccgccaccttctggcagaacccccggaaccacttcagatgccaggtgcagttctacggcctgagcgagaacgacgagtggacccaggacagagccaagcccgtgacccagatcgtgtctgccgaagcctggggcagagccgattgcgacgtgaagctggtggaaaagagcttcgagacagacaccaacctgaacttccagaacctgagcgtgatcggcttcagaatcctgctgctgaaagtggccggctttaacctgctgatgaccctgcggctgtggtccagcagggccaagcgatctggatctggagcaacaaacttctcactactcaaacaagcaggtgacgtggaggagaatcccgggcctactagtatggactggatttggcgcatccttttccttgtcggcgctgctaccggcgcgcattccttcgaacttgaaatggctcaggtgcagctggtgcagagcggagccgaagtgaagaaacctggcagcagcgtgaaggtgtcctgcaaagcttctggcggcaccttcagcagctacgccatctcttgggttcgacaggcccctggacaaggactggaatggatgggcagaatcatccccatcctgggaatcgccaactacgcccagaaattccagggcagagtgacaatcaccgccgacaagagcaccagcaccgcctacatggaactgagcagcctgagaagcgaggacaccgccgtgtactattgtgcaagaggcggctactacagccacgacatgtggagcgaagattggggccagggcacactggtcacagtgtcatctacgcgtatccagaaccctgatcctgccgtgtaccagctgcgggatagcaagagcagcgacaagagcgtgtgtctgttcaccgacttcgacagccagaccaacgtgtcccagagcaaggactccgacgtgtacatcaccgataagtgcgtgctggacatgcggagcatggacttcaagagcaactccgccgtggcctggtccaacaagtccgatttcgcctgcgccaacgccttcaacaacagcattatccccgaggacacattcttcccaagccccgagagcagctgcggctttaccagcgagagctaccagcagggcgtgctgagcgccaccatcctgtacgagatcctgctgggcaaggccaccctgtacgccgtgctggtgtctgccctggtgctgatggctatggtcaagcggaaggacagccgggga

SEQ ID NO: 4374 - DNA, 2283 bp, synthetic construct
  source 1..2283: mol_type = other DNA
atggccttaccagtgaccgccttgctcctgccgctggccttgctgctccacgccgccaggccggaagtgcagctggttgaatctggcggaggactggttcagcctggcggatctctgagactgtcttgtgccgccagcggcttcagcttcagcgacttttggatgagctgggtccgacaggcccctggcaaaggacttgaatgggtcgccacaatcagccaggccggcagcgagaaggactacgtggactctgtgaagggcagattcaccatcagccgggacaacgccaagaagtccctgtacctccagatgaacagcctgagagccgaggacaccgccgtgtactattgtgcctctggcgtgtacagcttcgactacagaggccagggcaccctggtcacagtctcttctggtaccggcggaggcggatctggcggcggaggtagcggtggcggaggatctgaattcgacttcgtgatgacacagagccctgatagcctggccgtgtctctcggcgagcgagtgaccatgagctgcaagtctagccagagcctgctgaacagcggcaaccagaagaactacctgacctggtatcagcagaagcccggccagcctcctaagctgctgatctactgggccagcaccagagaaagcggcgtgcccgatagattttctggctctggcagcggcaccgacttcaccctgacaatttctagcctgcaagccgaggacgtggccgtgtactactgccagaacgactacagctacccctacaccttcggccagggcaccaagctggaaatcaaactcgaggacctgaagaacgtgttcccacctgaggtggccgtgttcgagcctagcgaggccgagatcagccacacccagaaagccaccctcgtgtgcctggctaccggcttctaccccgaccatgtggaactgtcttggtgggtcaacggcaaagaggtgcacagcggcgtgtgtaccgacccccagccactgaaagaacagcccgccctgaacgacagccggtactgcctgagcagcagactgagagtgtccgccaccttctggcagaacccccggaaccacttcagatgccaggtgcagttctacggcctgagcgagaacgacgagtggacccaggacagagccaagcccgtgacccagatcgtgtctgccgaagcctggggcagagccgattgcgacgtgaagctggtggaaaagagcttcgagacagacaccaacctgaacttccagaacctgagcgtgatcggcttcagaatcctgctgctgaaagtggccggctttaacctgctgatgaccctgcggctgtggtccagcagggccaagcgatctggatctggagcaacaaacttctcactactcaaacaagcaggtgacgtggaggagaatcccgggcctactagtatggactggatttggcgcatccttttccttgtcggcgctgctaccggcgcgcattccttcgaagaagtgcaactggttcagagcggagccgagctgaagaaacctggggccagcgtgaaggtgtcctgtaaagccagcggctacacctttaccgactactacatgaaatgggtccgacaggccccaggccagggactcgaatggatcggcgatattatccccagcaacggggccaccttctacaaccagaaattcaagggccgcgtgaccatcaccgtggacaagagcacaagcaccgcctacatggaactgagcagcctgagaagcgaggacaccgccgtgtattattgcgccagaagccatctgctgcgggccagttggttcgcctattggggacagggaaccctggtcaccgttagctctacgcgtatccagaaccctgatcctgccgtgtaccagctgcgggatagcaagagcagcgacaagagcgtgtgtctgttcaccgacttcgacagccagaccaacgtgtcccagagcaaggactccgacgtgtacatcaccgataagtgcgtgctggacatgcggagcatggacttcaagagcaactccgccgtggcctggtccaacaagtccgatttcgcctgcgccaacgccttcaacaacagcattatccccgaggacacattcttcccaagccccgagagcagctgcggctttaccagcgagagctaccagcagggcgtgctgagcgccaccatcctgtacgagatcctgctgggcaaggccaccctgtacgccgtgctggtgtctgccctggtgctgatggctatggtcaagcggaaggacagccgggga

SEQ ID NO: 4375 - DNA, 2283 bp, synthetic construct
  source 1..2283: mol_type = other DNA
atggccttaccagtgaccgccttgctcctgccgctggccttgctgctccacgccgccaggccggaagtgcagctggttgaatctggcggaggactggttcagcctggcggatctctgagactgtcttgtgccgccagcggcttcagcttcagcgacttttggatgagctgggtccgacaggcccctggcaaaggacttgaatgggtcgccacaatcagccaggccggcagcgagaaggactacgtggactctgtgaagggcagattcaccatcagccgggacaacgccaagaagtccctgtacctccagatgaacagcctgagagccgaggacaccgccgtgtactattgtgcctctggcgtgtacagcttcgactacagaggccagggcaccctggtcacagtctcttctggtaccggcggaggcggatctggcggcggaggtagcggtggcggaggatctgaattcgacttcgtgatgacacagagccctgatagcctggccgtgtctctcggcgagcgagtgaccatgagctgcaagtctagccagagcctgctgaacagcggcaaccagaagaactacctgacctggtatcagcagaagcccggccagcctcctaagctgctgatctactgggccagcaccagagaaagcggcgtgcccgatagattttctggctctggcagcggcaccgacttcaccctgacaatttctagcctgcaagccgaggacgtggccgtgtactactgccagaacgactacagctacccctacaccttcggccagggcaccaagctggaaatcaaactcgaggacctgaagaacgtgttcccacctgaggtggccgtgttcgagcctagcgaggccgagatcagccacacccagaaagccaccctcgtgtgcctggctaccggcttctaccccgaccatgtggaactgtcttggtgggtcaacggcaaagaggtgcacagcggcgtgtgtaccgacccccagccactgaaagaacagcccgccctgaacgacagccggtactgcctgagcagcagactgagagtgtccgccaccttctggcagaacccccggaaccacttcagatgccaggtgcagttctacggcctgagcgagaacgacgagtggacccaggacagagccaagcccgtgacccagatcgtgtctgccgaagcctggggcagagccgattgcgacgtgaagctggtggaaaagagcttcgagacagacaccaacctgaacttccagaacctgagcgtgatcggcttcagaatcctgctgctgaaagtggccggctttaacctgctgatgaccctgcggctgtggtccagcagggccaagcgatctggatctggagcaacaaacttctcactactcaaacaagcaggtgacgtggaggagaatcccgggcctactagtatggactggatttggcgcatccttttccttgtcggcgctgctaccggcgcgcattccttcgaacaagtgcaactggttcagagcggagccgagctgaagaaacctggggccagcgtgaaggtgtcctgtaaagccagcggctacacctttaccgactactacatgaaatgggtccgacaggccccaggccagggactcgaatggatcggcgatattatccccagcaacggggccaccttctacaaccagaaattcaagggccgcgtgaccatcaccgtggacaagagcacaagcaccgcctacatggaactgagcagcctgagaagcgaggacaccgccgtgtattattgcgccagaagccatctgctgcgggccagttggttcgcctattggggacagggaaccctggtcaccgttagctctacgcgtatccagaaccctgatcctgccgtgtaccagctgcgggatagcaagagcagcgacaagagcgtgtgtctgttcaccgacttcgacagccagaccaacgtgtcccagagcaaggactccgacgtgtacatcaccgataagtgcgtgctggacatgcggagcatggacttcaagagcaactccgccgtggcctggtccaacaagtccgatttcgcctgcgccaacgccttcaacaacagcattatccccgaggacacattcttcccaagccccgagagcagctgcggctttaccagcgagagctaccagcagggcgtgctgagcgccaccatcctgtacgagatcctgctgggcaaggccaccctgtacgccgtgctggtgtctgccctggtgctgatggctatggtcaagcggaaggacagccgggga

SEQ ID NO: 4376 - DNA, 2253 bp, synthetic construct
  source 1..2253: mol_type = other DNA
atggccttaccagtgaccgccttgctcctgccgctggccttgctgctccacgccgccaggccggaagtgcagctggttgaatctggcggaggactggttcagcctggcggatctctgagactgtcttgtgccgccagcggcttcagcttcagcgacttttggatgagctgggtccgacaggcccctggcaaaggacttgaatgggtcgccacaatcagccaggccggcagcgagaaggactacgtggactctgtgaagggcagattcaccatcagccgggacaacgccaagaagtccctgtacctccagatgaacagcctgagagccgaggacaccgccgtgtactattgtgcctctggcgtgtacagcttcgactacagaggccagggcaccctggtcacagtctcttctggtaccggcggaggcggatctggcggcggaggtagcggtggcggaggatctgaattcgacgtgcagatcacacagagccctagctacctggctgcctctcctggcgagacaatcaccatcaactgtcgggccagcaagagcatcagcaaggacctggcctggtatcaagagaagcccggcaagaccaacaagctgctgatctacagcggcagcacactccagtctggcatccccagcagattttccggctctggcagcggcaccgatttcaccctgaccataagcagcctggaacctgaggacttcgccatgtactactgccagcagcacaacaagtacccctacacctttggcggaggcaccaagctggaaatcaagagactcgaggacctgaagaacgtgttcccacctgaggtggccgtgttcgagcctagcgaggccgagatcagccacacccagaaagccaccctcgtgtgcctggctaccggcttctaccccgaccatgtggaactgtcttggtgggtcaacggcaaagaggtgcacagcggcgtgtgtaccgacccccagccactgaaagaacagcccgccctgaacgacagccggtactgcctgagcagcagactgagagtgtccgccaccttctggcagaacccccggaaccacttcagatgccaggtgcagttctacggcctgagcgagaacgacgagtggacccaggacagagccaagcccgtgacccagatcgtgtctgccgaagcctggggcagagccgattgcgacgtgaagctggtggaaaagagcttcgagacagacaccaacctgaacttccagaacctgagcgtgatcggcttcagaatcctgctgctgaaagtggccggctttaacctgctgatgaccctgcggctgtggtccagcagggccaagcgatctggatctggagcaacaaacttctcactactcaaacaagcaggtgacgtggaggagaatcccgggcctactagtatggactggatttggcgcatccttttccttgtcggcgctgctaccggcgcgcattccttcgaacaagttcaactgcaacagcctggggccgagcttgttagacctggcgcttctgtgaagctgagctgcaaggccagcggctacaccttcaccagctactggatgaactgggtcaagcagcggcctgaccagggcctcgaatggatcggcagaatcgacccctacgacagcgagacacactacaaccagaagttcaaggacaaggccatcctgaccgtggacaagagcagctccaccgcctacatgcaactgagcagcctgacctctgaggatagcgccgtgtactattgcgccagaggcaactgggacgactattggggccagggcacaaccctgacagtgtctagtacgcgtatccagaaccctgatcctgccgtgtaccagctgcgggatagcaagagcagcgacaagagcgtgtgtctgttcaccgacttcgacagccagaccaacgtgtcccagagcaaggactccgacgtgtacatcaccgataagtgcgtgctggacatgcggagcatggacttcaagagcaactccgccgtggcctggtccaacaagtccgatttcgcctgcgccaacgccttcaacaacagcattatccccgaggacacattcttcccaagccccgagagcagctgcggctttaccagcgagagctaccagcagggcgtgctgagcgccaccatcctgtacgagatcctgctgggcaaggccaccctgtacgccgtgctggtgtctgccctggtgctgatggctatggtcaagcggaaggacagccgggga

SEQ ID NO: 4377 - DNA, 2259 bp, synthetic construct
  source 1..2259: mol_type = other DNA
atggccttaccagtgaccgccttgctcctgccgctggccttgctgctccacgccgccaggccggaagtgcagctggttgaatctggcggaggactggttcagcctggcggatctctgagactgtcttgtgccgccagcggcttcagcttcagcgacttttggatgagctgggtccgacaggcccctggcaaaggacttgaatgggtcgccacaatcagccaggccggcagcgagaaggactacgtggactctgtgaagggcagattcaccatcagccgggacaacgccaagaagtccctgtacctccagatgaacagcctgagagccgaggacaccgccgtgtactattgtgcctctggcgtgtacagcttcgactacagaggccagggcaccctggtcacagtctcttctggtaccggcggaggcggatctggcggcggaggtagcggtggcggaggatctgaattcgagatcgtgctgacacagagccctaccagcatgacagcctctccaggcgagcaagtgaccatcacctgtagagccagcagcagcatcaactacatgcactggtatcagcagaagcctggcgcaagccccagaccttggatctacgagacaagcaagctggcctccggcgtgcccgatagattttctggatctgccagcggcaccagctacagcctgaccatcaacaacatggaagccgaggacgccgccacctactactgccagcagtggaattacccctcctggacctttggcggaggcaccaagctggaacttaaactcgaggacctgaagaacgtgttcccacctgaggtggccgtgttcgagcctagcgaggccgagatcagccacacccagaaagccaccctcgtgtgcctggctaccggcttctaccccgaccatgtggaactgtcttggtgggtcaacggcaaagaggtgcacagcggcgtgtgtaccgacccccagccactgaaagaacagcccgccctgaacgacagccggtactgcctgagcagcagactgagagtgtccgccaccttctggcagaacccccggaaccacttcagatgccaggtgcagttctacggcctgagcgagaacgacgagtggacccaggacagagccaagcccgtgacccagatcgtgtctgccgaagcctggggcagagccgattgcgacgtgaagctggtggaaaagagcttcgagacagacaccaacctgaacttccagaacctgagcgtgatcggcttcagaatcctgctgctgaaagtggccggctttaacctgctgatgaccctgcggctgtggtccagcagggccaagcgatctggatctggagcaacaaacttctcactactcaaacaagcaggtgacgtggaggagaatcccgggcctactagtatggactggatttggcgcatccttttccttgtcggcgctgctaccggcgcgcattccttcgaagaagtgcagctcgttgagtctggtggcggactggttcagcctggaagaagcctgaagctgagctgtgccgccagcggcttcaccttcagcgactacaatatggcctgggtccgacaggcccctaagaaaggactggaatgggtcgccaccatcctgtacgatggcggcagaacctactaccggggcagcgtgaagggcagattcaccatcagcagagacaacgccaagagcaccctgtacctgcggatggactctctgagaagcgaggataccgccacatattactgtgccacacacagccggggcaccgactactttgattattggggccagggcgtgatggttaccgtgtctagtacgcgtatccagaaccctgatcctgccgtgtaccagctgcgggatagcaagagcagcgacaagagcgtgtgtctgttcaccgacttcgacagccagaccaacgtgtcccagagcaaggactccgacgtgtacatcaccgataagtgcgtgctggacatgcggagcatggacttcaagagcaactccgccgtggcctggtccaacaagtccgatttcgcctgcgccaacgccttcaacaacagcattatccccgaggacacattcttcccaagccccgagagcagctgcggctttaccagcgagagctaccagcagggcgtgctgagcgccaccatcctgtacgagatcctgctgggcaaggccaccctgtacgccgtgctggtgtctgccctggtgctgatggctatggtcaagcggaaggacagccgggga

SEQ ID NO: 4378 - DNA, 2286 bp, synthetic construct
  source 1..2286: mol_type = other DNA
atggccttaccagtgaccgccttgctcctgccgctggccttgctgctccacgccgccaggccggaagtgcagctggttgaatctggcggaggactggttcagcctggcggatctctgagactgtcttgtgccgccagcggcttcagcttcagcgacttttggatgagctgggtccgacaggcccctggcaaaggacttgaatgggtcgccacaatcagccaggccggcagcgagaaggactacgtggactctgtgaagggcagattcaccatcagccgggacaacgccaagaagtccctgtacctccagatgaacagcctgagagccgaggacaccgccgtgtactattgtgcctctggcgtgtacagcttcgactacagaggccagggcaccctggtcacagtctcttctggtaccggcggaggcggatctggcggcggaggtagcggtggcggaggatctgaattcgacatcgtgatgacacagagcccttctagcctggccgtgtctgagggcgagacagtgaccatcaactgcaagagcagccagagcttcctgtctagcggcgacggcaagaattacgtggcctggtatcagtacaagcccggacagagccccaagctgctgatctactgggccagcacaagacagagcggcgtgcccgatagattcatcggctctggcagcggcaccgacttcaccctgacaatctctacagtgcaggccgaggacctggctatctactactgccagcagtattacgacacccctctgacctttggctccggcaccaagctggaaatcaaactcgaggacctgaagaacgtgttcccacctgaggtggccgtgttcgagcctagcgaggccgagatcagccacacccagaaagccaccctcgtgtgcctggctaccggcttctaccccgaccatgtggaactgtcttggtgggtcaacggcaaagaggtgcacagcggcgtgtgtaccgacccccagccactgaaagaacagcccgccctgaacgacagccggtactgcctgagcagcagactgagagtgtccgccaccttctggcagaacccccggaaccacttcagatgccaggtgcagttctacggcctgagcgagaacgacgagtggacccaggacagagccaagcccgtgacccagatcgtgtctgccgaagcctggggcagagccgattgcgacgtgaagctggtggaaaagagcttcgagacagacaccaacctgaacttccagaacctgagcgtgatcggcttcagaatcctgctgctgaaagtggccggctttaacctgctgatgaccctgcggctgtggtccagcagggccaagcgatctggatctggagcaacaaacttctcactactcaaacaagcaggtgacgtggaggagaatcccgggcctactagtatggactggatttggcgcatccttttccttgtcggcgctgctaccggcgcgcattccttcgaagaagtgaagctgcaagagtctggccccagcctggtgcagagtagccaaacactgagcctgacctgtaccgtgtccggctttagcctgaccagctaccacatccactgggtccgacagacccctggcaaaggactggaatggatgggcgtgatgtggagcgacggcgacaccagctataacagcgccctgaagtcccggctgagcatcagcagagatacaagccagagccaggtgttcctgaagatgaacagcctccagaccgaggacaccgccacctactattgtgccagaggctactacagcagctacctgtacctttggttcgcctattggggccagggcaccctggttacagtcagctctacgcgtatccagaaccctgatcctgccgtgtaccagctgcgggatagcaagagcagcgacaagagcgtgtgtctgttcaccgacttcgacagccagaccaacgtgtcccagagcaaggactccgacgtgtacatcaccgataagtgcgtgctggacatgcggagcatggacttcaagagcaactccgccgtggcctggtccaacaagtccgatttcgcctgcgccaacgccttcaacaacagcattatccccgaggacacattcttcccaagccccgagagcagctgcggctttaccagcgagagctaccagcagggcgtgctgagcgccaccatcctgtacgagatcctgctgggcaaggccaccctgtacgccgtgctggtgtctgccctggtgctgatggctatggtcaagcggaaggacagccgggga

SEQ ID NO: 4379 - DNA, 2298 bp, synthetic construct
  source 1..2298: mol_type = other DNA
atggccttaccagtgaccgccttgctcctgccgctggccttgctgctccacgccgccaggccggaagtgcagctggttgaatctggcggaggactggttcagcctggcggatctctgagactgtcttgtgccgccagcggcttcagcttcagcgacttttggatgagctgggtccgacaggcccctggcaaaggacttgaatgggtcgccacaatcagccaggccggcagcgagaaggactacgtggactctgtgaagggcagattcaccatcagccgggacaacgccaagaagtccctgtacctccagatgaacagcctgagagccgaggacaccgccgtgtactattgtgcctctggcgtgtacagcttcgactacagaggccagggcaccctggtcacagtctcttctggtaccggcggaggcggatctggcggcggaggtagcggtggcggaggatctgaattcgacgtgctgatgacccagacacctgtgtctctgccagtgtctctcggaggccaggtgtccatctcctgtagaagcagccagagcctggtgcactccgacggcgatacctacctgcactggtatctccagaagcctggacagagccctcagctcctgatctaccgggtgtccaacagattcagcggcgtgcccgatagattttccggcagcggctctggcaccgacttcaccctgaagatcagcagagtggaacccgaggacctgggcctgtactactgtctccagaccacacacttcccaccttggacctttggcggaggcaccaagctggaaatgaaactcgaggacctgaagaacgtgttcccacctgaggtggccgtgttcgagcctagcgaggccgagatcagccacacccagaaagccaccctcgtgtgcctggctaccggcttctaccccgaccatgtggaactgtcttggtgggtcaacggcaaagaggtgcacagcggcgtgtgtaccgacccccagccactgaaagaacagcccgccctgaacgacagccggtactgcctgagcagcagactgagagtgtccgccaccttctggcagaacccccggaaccacttcagatgccaggtgcagttctacggcctgagcgagaacgacgagtggacccaggacagagccaagcccgtgacccagatcgtgtctgccgaagcctggggcagagccgattgcgacgtgaagctggtggaaaagagcttcgagacagacaccaacctgaacttccagaacctgagcgtgatcggcttcagaatcctgctgctgaaagtggccggctttaacctgctgatgaccctgcggctgtggtccagcagggccaagcgatctggatctggagcaacaaacttctcactactcaaacaagcaggtgacgtggaggagaatcccgggcctactagtatggactggatttggcgcatccttttccttgtcggcgctgctaccggcgcgcattccttcgaacaggttcagctccagcagtctggacccgagcttagaaggccaggatctagcgtcagactgagctgcaaggccagcggctaccggatcaaggacttcctgatccactggattaagaacagacccgagcacggcctggaatggatcggatggattgaccctgaggacggcgagactaagtacgcccagaagttccagaccaaggccacactgaccgccgacacctctagcaacaccgcctacatgcaactgagcagcctgaccagcgaggacaccgccacctacttttgtgctagatggggcgacgtgtactacggcctgatgagaggccatgtgatggatgcctggggccagggaacaagcgtgacagtctcttctacgcgtatccagaaccctgatcctgccgtgtaccagctgcgggatagcaagagcagcgacaagagcgtgtgtctgttcaccgacttcgacagccagaccaacgtgtcccagagcaaggactccgacgtgtacatcaccgataagtgcgtgctggacatgcggagcatggacttcaagagcaactccgccgtggcctggtccaacaagtccgatttcgcctgcgccaacgccttcaacaacagcattatccccgaggacacattcttcccaagccccgagagcagctgcggctttaccagcgagagctaccagcagggcgtgctgagcgccaccatcctgtacgagatcctgctgggcaaggccaccctgtacgccgtgctggtgtctgccctggtgctgatggctatggtcaagcggaaggacagccgggga

SEQ ID NO: 4380 - DNA, 2283 bp, synthetic construct
  source 1..2283: mol_type = other DNA
atggccttaccagtgaccgccttgctcctgccgctggccttgctgctccacgccgccaggccggaagtgcagctggttgaatctggcggaggactggttcagcctggcggatctctgagactgtcttgtgccgccagcggcttcagcttcagcgacttttggatgagctgggtccgacaggcccctggcaaaggacttgaatgggtcgccacaatcagccaggccggcagcgagaaggactacgtggactctgtgaagggcagattcaccatcagccgggacaacgccaagaagtccctgtacctccagatgaacagcctgagagccgaggacaccgccgtgtactattgtgcctctggcgtgtacagcttcgactacagaggccagggcaccctggtcacagtctcttctggtaccggcggaggcggatctggcggcggaggtagcggtggcggaggatctgaattcgacatcgtgatgacacagagccccgccacactgtcactgtctccaggcgaaagagccacactgagctgtcggagcagcaagagcctccagaacgtgaacggcaacacctacctgtactggttccagcagaagcccggccagtctcctcagctcctgatctacagaatgagcaacctgaacagcggcgtgcccgacagattttctggcagcggaagcggcaccgagttcaccctgaccataagcagcctggaacctgaggacttcgccgtgtactactgtatgcagcacctggaataccccatcaccttcggagccggcaccaagctggaaatcaaactcgaggacctgaagaacgtgttcccacctgaggtggccgtgttcgagcctagcgaggccgagatcagccacacccagaaagccaccctcgtgtgcctggctaccggcttctaccccgaccatgtggaactgtcttggtgggtcaacggcaaagaggtgcacagcggcgtgtgtaccgacccccagccactgaaagaacagcccgccctgaacgacagccggtactgcctgagcagcagactgagagtgtccgccaccttctggcagaacccccggaaccacttcagatgccaggtgcagttctacggcctgagcgagaacgacgagtggacccaggacagagccaagcccgtgacccagatcgtgtctgccgaagcctggggcagagccgattgcgacgtgaagctggtggaaaagagcttcgagacagacaccaacctgaacttccagaacctgagcgtgatcggcttcagaatcctgctgctgaaagtggccggctttaacctgctgatgaccctgcggctgtggtccagcagggccaagcgatctggatctggagcaacaaacttctcactactcaaacaagcaggtgacgtggaggagaatcccgggcctactagtatggactggatttggcgcatccttttccttgtcggcgctgctaccggcgcgcattccttcgaagaagtgcaactggttgaatctggcggcggactggttaagcctggcggatctctgaagctgagctgtgccgccagcggctacacctttaccagctacgtgatgcactgggtccgacaggcccctggcaaaggacttgagtggatcggctacatcaacccctacaacgatggcaccaagtacaacgagaagttccagggcagagtgaccatcagctccgacaagagcatcagcaccgcctacatggaactgagcagcctgagaagcgaggataccgccatgtactattgcgccagaggcacctactactacggcaccagagtgttcgactactggggccagggaaccctggtcacagtctcttctacgcgtatccagaaccctgatcctgccgtgtaccagctgcgggatagcaagagcagcgacaagagcgtgtgtctgttcaccgacttcgacagccagaccaacgtgtcccagagcaaggactccgacgtgtacatcaccgataagtgcgtgctggacatgcggagcatggacttcaagagcaactccgccgtggcctggtccaacaagtccgatttcgcctgcgccaacgccttcaacaacagcattatccccgaggacacattcttcccaagccccgagagcagctgcggctttaccagcgagagctaccagcagggcgtgctgagcgccaccatcctgtacgagatcctgctgggcaaggccaccctgtacgccgtgctggtgtctgccctggtgctgatggctatggtcaagcggaaggacagccgggga

SEQ ID NO: 4381 - DNA, 2271 bp, synthetic construct
  source 1..2271: mol_type = other DNA
atggccttaccagtgaccgccttgctcctgccgctggccttgctgctccacgccgccaggccggaagtgcagctggttgaatctggcggaggactggttcagcctggcggatctctgagactgtcttgtgccgccagcggcttcagcttcagcgacttttggatgagctgggtccgacaggcccctggcaaaggacttgaatgggtcgccacaatcagccaggccggcagcgagaaggactacgtggactctgtgaagggcagattcaccatcagccgggacaacgccaagaagtccctgtacctccagatgaacagcctgagagccgaggacaccgccgtgtactattgtgcctctggcgtgtacagcttcgactacagaggccagggcaccctggtcacagtctcttctggtaccggcggaggcggatctggcggcggaggtagcggtggcggaggatctgaattcgacatccagatgacacagagccctagcagcctgtctgccagcgtgggagacagagtgaccatcacatgcaaggccagcgaccacatcaacaactggctggcctggtatcagcagaagcctggacaggcccctaagctgctgatctacggcgctaccacactggaaacaggcgtgcccagcagattttctggcagcggctctggcaccgactacaccctgacaatatccagcctccagcctgaggacttcgccacctactactgtcagcagagctggaacaccccttggacattcggccagggcaccaagctggaaatcaagagactcgaggacctgaagaacgtgttcccacctgaggtggccgtgttcgagcctagcgaggccgagatcagccacacccagaaagccaccctcgtgtgcctggctaccggcttctaccccgaccatgtggaactgtcttggtgggtcaacggcaaagaggtgcacagcggcgtgtgtaccgacccccagccactgaaagaacagcccgccctgaacgacagccggtactgcctgagcagcagactgagagtgtccgccaccttctggcagaacccccggaaccacttcagatgccaggtgcagttctacggcctgagcgagaacgacgagtggacccaggacagagccaagcccgtgacccagatcgtgtctgccgaagcctggggcagagccgattgcgacgtgaagctggtggaaaagagcttcgagacagacaccaacctgaacttccagaacctgagcgtgatcggcttcagaatcctgctgctgaaagtggccggctttaacctgctgatgaccctgcggctgtggtccagcagggccaagcgatctggatctggagcaacaaacttctcactactcaaacaagcaggtgacgtggaggagaatcccgggcctactagtatggactggatttggcgcatccttttccttgtcggcgctgctaccggcgcgcattccttcgaacaagttcagcttcaacagcctggcgctgagctggtcaaacctggcgcttctgtgaagatgagctgcaaagccagcggctacgccttcagcagctactggatcaactggatgaagcagaaacccggccagggactcgaatggatcggccaaatctatcccggcgacggcgacaccaactacaacggcaagttcaagggcagagccacactgaccgccgatacctctagcagcacagcctacatgcagctgagcagcctgaccagcgaagatagcgccgtgtacttctgtgcccggtccatcacaacagtcgtgggctgcgctatggactattggggccagggaacaagcgtgaccgtgtctagtacgcgtatccagaaccctgatcctgccgtgtaccagctgcgggatagcaagagcagcgacaagagcgtgtgtctgttcaccgacttcgacagccagaccaacgtgtcccagagcaaggactccgacgtgtacatcaccgataagtgcgtgctggacatgcggagcatggacttcaagagcaactccgccgtggcctggtccaacaagtccgatttcgcctgcgccaacgccttcaacaacagcattatccccgaggacacattcttcccaagccccgagagcagctgcggctttaccagcgagagctaccagcagggcgtgctgagcgccaccatcctgtacgagatcctgctgggcaaggccaccctgtacgccgtgctggtgtctgccctggtgctgatggctatggtcaagcggaaggacagccgggga

SEQ ID NO: 4382 - DNA, 2277 bp, synthetic construct
  source 1..2277: mol_type = other DNA
atggccttaccagtgaccgccttgctcctgccgctggccttgctgctccacgccgccaggccggaagtgcagctggttgaatctggcggaggactggttcagcctggcggatctctgagactgtcttgtgccgccagcggcttcagcttcagcgacttttggatgagctgggtccgacaggcccctggcaaaggacttgaatgggtcgccacaatcagccaggccggcagcgagaaggactacgtggactctgtgaagggcagattcaccatcagccgggacaacgccaagaagtccctgtacctccagatgaacagcctgagagccgaggacaccgccgtgtactattgtgcctctggcgtgtacagcttcgactacagaggccagggcaccctggtcacagtctcttctggtaccggcggaggcggatctggcggcggaggtagcggtggcggaggatctgaattccagatcgtgctgtctcagtctcctgccatcctgagcgcttccccaggcgagaaagtgaccatgacctgtagagccagcagcagcgtgtcctacatgcactggtatcagcagaagcccggcagcagccctaagccttggatctacgccaccagcaatctggcctctggcgtgccagccagattttctggctctggcagcggcaccagctacagcttcacaatcagcagagtggaagccgaggacgccgccacctactattgtcagcagtggaccttcaatcctcctaccttcggcggaggcacccggctggaaatcaaaagaacagtggctgctctcgaggacctgaagaacgtgttcccacctgaggtggccgtgttcgagcctagcgaggccgagatcagccacacccagaaagccaccctcgtgtgcctggctaccggcttctaccccgaccatgtggaactgtcttggtgggtcaacggcaaagaggtgcacagcggcgtgtgtaccgacccccagccactgaaagaacagcccgccctgaacgacagccggtactgcctgagcagcagactgagagtgtccgccaccttctggcagaacccccggaaccacttcagatgccaggtgcagttctacggcctgagcgagaacgacgagtggacccaggacagagccaagcccgtgacccagatcgtgtctgccgaagcctggggcagagccgattgcgacgtgaagctggtggaaaagagcttcgagacagacaccaacctgaacttccagaacctgagcgtgatcggcttcagaatcctgctgctgaaagtggccggctttaacctgctgatgaccctgcggctgtggtccagcagggccaagcgatctggatctggagcaacaaacttctcactactcaaacaagcaggtgacgtggaggagaatcccgggcctactagtatggactggatttggcgcatccttttccttgtcggcgctgctaccggcgcgcattccttcgaacaggcttatctgcaacagagcggagccgaactcgtcagacctggcgcttctgtgaagatgagctgcaaggccagcggctacaccttcaccagctataatatgcactgggtcaagcagacccctcggcagggactcgaatggatcggcggaatctatcccggcaacggcgacacctcctacaaccagaagttcaagggcaaagccacactgaccgtgggcaagagcagcagcaccgcctatatgcagctcagcagcctgaccagcgaggacagcgccgtgtacttctgcgccagatacgactacaactacgctatggactactggggccagggcaccagcgtgacagttagctctgccagcacgcgtatccagaaccctgatcctgccgtgtaccagctgcgggatagcaagagcagcgacaagagcgtgtgtctgttcaccgacttcgacagccagaccaacgtgtcccagagcaaggactccgacgtgtacatcaccgataagtgcgtgctggacatgcggagcatggacttcaagagcaactccgccgtggcctggtccaacaagtccgatttcgcctgcgccaacgccttcaacaacagcattatccccgaggacacattcttcccaagccccgagagcagctgcggctttaccagcgagagctaccagcagggcgtgctgagcgccaccatcctgtacgagatcctgctgggcaaggccaccctgtacgccgtgctggtgtctgccctggtgctgatggctatggtcaagcggaaggacagccgggga

SEQ ID NO: 4383 - DNA, 2271 bp, synthetic construct
  source 1..2271: mol_type = other DNA
atggccttaccagtgaccgccttgctcctgccgctggccttgctgctccacgccgccaggccggaagtgcagctggttgaatctggcggaggactggttcagcctggcggatctctgagactgtcttgtgccgccagcggcttcagcttcagcgacttttggatgagctgggtccgacaggcccctggcaaaggacttgaatgggtcgccacaatcagccaggccggcagcgagaaggactacgtggactctgtgaagggcagattcaccatcagccgggacaacgccaagaagtccctgtacctccagatgaacagcctgagagccgaggacaccgccgtgtactattgtgcctctggcgtgtacagcttcgactacagaggccagggcaccctggtcacagtctcttctggtaccggcggaggcggatctggcggcggaggtagcggtggcggaggatctgaattcgagatcgtgctgacacagagccctgccaccctgtctctgagccctggcgaaagagccaccctgagctgtagagccagccagagcgtgtccagctacctggcctggtatcagcagaagcccggccaggctccccggctgctgatctacgatgccagcaatagagccaccggcatccccgccagattttccggctctggcagcggcaccgacttcaccctgaccatcagctccctggaacccgaggacttcgccgtgtactactgccagcagcggagcaactggcccatcacattcggccagggcacccggctggaaatcaaactcgaggacctgaagaacgtgttcccacctgaggtggccgtgttcgagcctagcgaggccgagatcagccacacccagaaagccaccctcgtgtgcctggctaccggcttctaccccgaccatgtggaactgtcttggtgggtcaacggcaaagaggtgcacagcggcgtgtgtaccgacccccagccactgaaagaacagcccgccctgaacgacagccggtactgcctgagcagcagactgagagtgtccgccaccttctggcagaacccccggaaccacttcagatgccaggtgcagttctacggcctgagcgagaacgacgagtggacccaggacagagccaagcccgtgacccagatcgtgtctgccgaagcctggggcagagccgattgcgacgtgaagctggtggaaaagagcttcgagacagacaccaacctgaacttccagaacctgagcgtgatcggcttcagaatcctgctgctgaaagtggccggctttaacctgctgatgaccctgcggctgtggtccagcagggccaagcgatctggatctggagcaacaaacttctcactactcaaacaagcaggtgacgtggaggagaatcccgggcctactagtatggactggatttggcgcatccttttccttgtcggcgctgctaccggcgcgcattccttcgaagaggtgcagcttgttgagtctggcggaggactggtgcagcccgatagaagcctgagactgtcttgtgccgccagcggcttcaccttccacgattatgccatgcactgggtccgacaggcccctggcaaaggacttgaatgggtgtccaccatctcttggaacagcggcacaatcggctacgccgactctgtgaagggcagattcaccatcagccgggacaacgccaagaacagcctgtacctccagatgaactccctgagagccgaggacacagccctgtactactgcgccaaggacatccagtacggcaactactactacggcatggacgtgtggggccagggcacaacagtgacagtctcttctacgcgtatccagaaccctgatcctgccgtgtaccagctgcgggatagcaagagcagcgacaagagcgtgtgtctgttcaccgacttcgacagccagaccaacgtgtcccagagcaaggactccgacgtgtacatcaccgataagtgcgtgctggacatgcggagcatggacttcaagagcaactccgccgtggcctggtccaacaagtccgatttcgcctgcgccaacgccttcaacaacagcattatccccgaggacacattcttcccaagccccgagagcagctgcggctttaccagcgagagctaccagcagggcgtgctgagcgccaccatcctgtacgagatcctgctgggcaaggccaccctgtacgccgtgctggtgtctgccctggtgctgatggctatggtcaagcggaaggacagccgggga

SEQ ID NO: 4384 - DNA, 2256 bp, synthetic construct
  source 1..2256: mol_type = other DNA
atggccttaccagtgaccgccttgctcctgccgctggccttgctgctccacgccgccaggccggaagtgcagctggttgaatctggcggaggactggttcagcctggcggatctctgagactgtcttgtgccgccagcggcttcagcttcagcgacttttggatgagctgggtccgacaggcccctggcaaaggacttgaatgggtcgccacaatcagccaggccggcagcgagaaggactacgtggactctgtgaagggcagattcaccatcagccgggacaacgccaagaagtccctgtacctccagatgaacagcctgagagccgaggacaccgccgtgtactattgtgcctctggcgtgtacagcttcgactacagaggccagggcaccctggtcacagtctcttctggtaccggcggaggcggatctggcggcggaggtagcggtggcggaggatctgaattcgacatccagatgacacagagccctagcagcctgtctgccagcgtgggagatagagtgaccatcaactgcaaggccagccaggacatcaacagctacctgagctggttccagcagaagcctggcaaggcccctaagacactgatctaccgggccaacagactggtggatggcgtgccaagcagattttctggcagcggcagcggccaggattacaccctgacaatatccagcctccagcctgaggacttcgccacctactactgcctccagtacgacgagttccctctgacctttggcggaggcaccaaggtggaaatcaaactcgaggacctgaagaacgtgttcccacctgaggtggccgtgttcgagcctagcgaggccgagatcagccacacccagaaagccaccctcgtgtgcctggctaccggcttctaccccgaccatgtggaactgtcttggtgggtcaacggcaaagaggtgcacagcggcgtgtgtaccgacccccagccactgaaagaacagcccgccctgaacgacagccggtactgcctgagcagcagactgagagtgtccgccaccttctggcagaacccccggaaccacttcagatgccaggtgcagttctacggcctgagcgagaacgacgagtggacccaggacagagccaagcccgtgacccagatcgtgtctgccgaagcctggggcagagccgattgcgacgtgaagctggtggaaaagagcttcgagacagacaccaacctgaacttccagaacctgagcgtgatcggcttcagaatcctgctgctgaaagtggccggctttaacctgctgatgaccctgcggctgtggtccagcagggccaagcgatctggatctggagcaacaaacttctcactactcaaacaagcaggtgacgtggaggagaatcccgggcctactagtatggactggatttggcgcatccttttccttgtcggcgctgctaccggcgcgcattccttcgaacaggtgcaactggtgcagtctggggccgaagtgaagaaacctggggcctctgtgaaggtgtcctgcaaagccagcggctacacctttaccaactacgacatcaactgggtccgacaggctccaggccaaggactggaatggatcggctggatctatcctggcgacggcagcaccaagtacaacgagaagttcaaggccaaggccacactgaccgccgataccagcacaagcaccgcctacatggaactgcggagcctgagaagcgacgacaccgccgtgtactattgtgcctccggctacgaggacgctatggactattggggccagggcaccaccgtgacagtgtctagtacgcgtatccagaaccctgatcctgccgtgtaccagctgcgggatagcaagagcagcgacaagagcgtgtgtctgttcaccgacttcgacagccagaccaacgtgtcccagagcaaggactccgacgtgtacatcaccgataagtgcgtgctggacatgcggagcatggacttcaagagcaactccgccgtggcctggtccaacaagtccgatttcgcctgcgccaacgccttcaacaacagcattatccccgaggacacattcttcccaagccccgagagcagctgcggctttaccagcgagagctaccagcagggcgtgctgagcgccaccatcctgtacgagatcctgctgggcaaggccaccctgtacgccgtgctggtgtctgccctggtgctgatggctatggtcaagcggaaggacagccgggga

SEQ ID NO: 4385 - DNA, 2262 bp, synthetic construct
  source 1..2262: mol_type = other DNA
atggccttaccagtgaccgccttgctcctgccgctggccttgctgctccacgccgccaggccggaagtgcagctggttgaatctggcggaggactggttcagcctggcggatctctgagactgtcttgtgccgccagcggcttcagcttcagcgacttttggatgagctgggtccgacaggcccctggcaaaggacttgaatgggtcgccacaatcagccaggccggcagcgagaaggactacgtggactctgtgaagggcagattcaccatcagccgggacaacgccaagaagtccctgtacctccagatgaacagcctgagagccgaggacaccgccgtgtactattgtgcctctggcgtgtacagcttcgactacagaggccagggcaccctggtcacagtctcttctggtaccggcggaggcggatctggcggcggaggtagcggtggcggaggatctgaattcgacatcgtgatgacccagacacctctgagcctgagcgtgacacctggacagcctgccagcattagctgcaagagcagccagtctctgctggacggcgacggcaagacctacctgaattggctgctccagaagcctggacagagccctcagcggctgatctacctggtgtccaagctggatagcggcgtgcccgatagattttctggcagcggctctggcaccgacttcaccctgaagatcagcagagtggaagccgaggacgtgggcgtgtactactgttggcagggcacacacttccccagaacattcggccagggcacaaagctggaaatcaaactcgaggacctgaagaacgtgttcccacctgaggtggccgtgttcgagcctagcgaggccgagatcagccacacccagaaagccaccctcgtgtgcctggctaccggcttctaccccgaccatgtggaactgtcttggtgggtcaacggcaaagaggtgcacagcggcgtgtgtaccgacccccagccactgaaagaacagcccgccctgaacgacagccggtactgcctgagcagcagactgagagtgtccgccaccttctggcagaacccccggaaccacttcagatgccaggtgcagttctacggcctgagcgagaacgacgagtggacccaggacagagccaagcccgtgacccagatcgtgtctgccgaagcctggggcagagccgattgcgacgtgaagctggtggaaaagagcttcgagacagacaccaacctgaacttccagaacctgagcgtgatcggcttcagaatcctgctgctgaaagtggccggctttaacctgctgatgaccctgcggctgtggtccagcagggccaagcgatctggatctggagcaacaaacttctcactactcaaacaagcaggtgacgtggaggagaatcccgggcctactagtatggactggatttggcgcatccttttccttgtcggcgctgctaccggcgcgcattccttcgaacaagtgcaactggttcagagcggagccgaagtgaagaaacctggggcctctgtgaaggtgtcctgcaaggccagcggctacaccttcaaggacacctacatccactgggtccgacaggcccctggacaaggacttgagtggatgggcagaatcgaccccgccaacggcaacaccaaatacgaccccaagttccagggcagagtgaccatgaccagagacaccagcatcagcaccgcctacatggaactgagccggctgagatccgatgacaccgccgtgtactattgcgctagaagaggcggagtggattggggccagggaacactggttaccgtgtctagtacgcgtatccagaaccctgatcctgccgtgtaccagctgcgggatagcaagagcagcgacaagagcgtgtgtctgttcaccgacttcgacagccagaccaacgtgtcccagagcaaggactccgacgtgtacatcaccgataagtgcgtgctggacatgcggagcatggacttcaagagcaactccgccgtggcctggtccaacaagtccgatttcgcctgcgccaacgccttcaacaacagcattatccccgaggacacattcttcccaagccccgagagcagctgcggctttaccagcgagagctaccagcagggcgtgctgagcgccaccatcctgtacgagatcctgctgggcaaggccaccctgtacgccgtgctggtgtctgccctggtgctgatggctatggtcaagcggaaggacagccgggga

SEQ ID NO: 4386 - DNA, 2265 bp, synthetic construct
  source 1..2265: mol_type = other DNA
atggccttaccagtgaccgccttgctcctgccgctggccttgctgctccacgccgccaggccggaagtgcagctggttgaatctggcggaggactggttcagcctggcggatctctgagactgtcttgtgccgccagcggcttcagcttcagcgacttttggatgagctgggtccgacaggcccctggcaaaggacttgaatgggtcgccacaatcagccaggccggcagcgagaaggactacgtggactctgtgaagggcagattcaccatcagccgggacaacgccaagaagtccctgtacctccagatgaacagcctgagagccgaggacaccgccgtgtactattgtgcctctggcgtgtacagcttcgactacagaggccagggcaccctggtcacagtctcttctggtaccggcggaggcggatctggcggcggaggtagcggtggcggaggatctgaattcgacatccagatgacacagagccctagcagcctgtctgccagcgtgggagacagagtgaccatcacatgcaaggccagccaggatgtgtctacagccgtggcctggttccagcagaagcctggaaaagcccctaagctgctgatctacagccccagctacagatacaccggcgtgcccagcagattttctggcagcggctctggcaccgacttcaccctgacaatatccagcctccagcctgaggacttcacctactactgccagcagctctacagcaccccttacacattcggccagggcaccaaggtggaaatcaaactcgaggacctgaagaacgtgttcccacctgaggtggccgtgttcgagcctagcgaggccgagatcagccacacccagaaagccaccctcgtgtgcctggctaccggcttctaccccgaccatgtggaactgtcttggtgggtcaacggcaaagaggtgcacagcggcgtgtgtaccgacccccagccactgaaagaacagcccgccctgaacgacagccggtactgcctgagcagcagactgagagtgtccgccaccttctggcagaacccccggaaccacttcagatgccaggtgcagttctacggcctgagcgagaacgacgagtggacccaggacagagccaagcccgtgacccagatcgtgtctgccgaagcctggggcagagccgattgcgacgtgaagctggtggaaaagagcttcgagacagacaccaacctgaacttccagaacctgagcgtgatcggcttcagaatcctgctgctgaaagtggccggctttaacctgctgatgaccctgcggctgtggtccagcagggccaagcgatctggatctggagcaacaaacttctcactactcaaacaagcaggtgacgtggaggagaatcccgggcctactagtatggactggatttggcgcatccttttccttgtcggcgctgctaccggcgcgcattccttcgaagaagtgcaactggttcagagcggagccgaagtgaagaaacctggggcctctgtgaaggtgtcctgcaaagccagcggctacacctttaccgactactacctggacgtggtcgtgcggcaagctcctggacaaggactggaatggatcggcagagtgaacccctacaacggcggcaccatctacaaccagaaattcaagggaagagtgaccctgaccagagacaccagcacctccacagcctacctggaactgagcagcctgagaagcgaagataccgccgtgtactactgcgccagggaccactacagatatgaccctctgctggactactggggccagggaaccctggttacagtgtctagtacgcgtatccagaaccctgatcctgccgtgtaccagctgcgggatagcaagagcagcgacaagagcgtgtgtctgttcaccgacttcgacagccagaccaacgtgtcccagagcaaggactccgacgtgtacatcaccgataagtgcgtgctggacatgcggagcatggacttcaagagcaactccgccgtggcctggtccaacaagtccgatttcgcctgcgccaacgccttcaacaacagcattatccccgaggacacattcttcccaagccccgagagcagctgcggctttaccagcgagagctaccagcagggcgtgctgagcgccaccatcctgtacgagatcctgctgggcaaggccaccctgtacgccgtgctggtgtctgccctggtgctgatggctatggtcaagcggaaggacagccgggga

SEQ ID NO: 4387 - DNA, 2283 bp, synthetic construct
  source 1..2283: mol_type = other DNA
atggccttaccagtgaccgccttgctcctgccgctggccttgctgctccacgccgccaggccggaagtgcagctggttgaatctggcggaggactggttcagcctggcggatctctgagactgtcttgtgccgccagcggcttcagcttcagcgacttttggatgagctgggtccgacaggcccctggcaaaggacttgaatgggtcgccacaatcagccaggccggcagcgagaaggactacgtggactctgtgaagggcagattcaccatcagccgggacaacgccaagaagtccctgtacctccagatgaacagcctgagagccgaggacaccgccgtgtactattgtgcctctggcgtgtacagcttcgactacagaggccagggcaccctggtcacagtctcttctggtaccggcggaggcggatctggcggcggaggtagcggtggcggaggatctgaattcgacatccagatgacacagagccctagcagcctgtctgccagcgtgggagacagagtgaccatcacctgtagagccagccagagcgtgtccaccagcagctacaactacatgcactggtatcagcagaagcccggcaagcctcctaagctgctgattaagtacgccagcaacctggaaagcggcgtgcccagcagattttctggcagcggctctggcaccgacttcaccctgacaatatccagcctccagcctgaggacttcgccacctactactgtcagcactcctgggagatccctctgacattcggccagggcaccaaggtggaaatcaaactcgaggacctgaagaacgtgttcccacctgaggtggccgtgttcgagcctagcgaggccgagatcagccacacccagaaagccaccctcgtgtgcctggctaccggcttctaccccgaccatgtggaactgtcttggtgggtcaacggcaaagaggtgcacagcggcgtgtgtaccgacccccagccactgaaagaacagcccgccctgaacgacagccggtactgcctgagcagcagactgagagtgtccgccaccttctggcagaacccccggaaccacttcagatgccaggtgcagttctacggcctgagcgagaacgacgagtggacccaggacagagccaagcccgtgacccagatcgtgtctgccgaagcctggggcagagccgattgcgacgtgaagctggtggaaaagagcttcgagacagacaccaacctgaacttccagaacctgagcgtgatcggcttcagaatcctgctgctgaaagtggccggctttaacctgctgatgaccctgcggctgtggtccagcagggccaagcgatctggatctggagcaacaaacttctcactactcaaacaagcaggtgacgtggaggagaatcccgggcctactagtatggactggatttggcgcatccttttccttgtcggcgctgctaccggcgcgcattccttcgaagaagtgcaactggttcagagcggagccgaagtgaagaaacctggggcctctgtgaaggtgtcctgcaaggccagcggctacagcttcaccgactattatatgcactgggtccgacaggctccaggccagggacttgagtggatcggcagaatcaacccctacaacggcgctgccttctacagccagaacttcaaggatagagtgaccctgaccgtggacaccagcaccagcacagcctacctggaactgagcagcctgagaagcgaggacaccgccgtgtactactgcgccattgagagaggcgctgacctggaaggctacgctatggattattggggccagggaaccctggtcaccgtgtcatctacgcgtatccagaaccctgatcctgccgtgtaccagctgcgggatagcaagagcagcgacaagagcgtgtgtctgttcaccgacttcgacagccagaccaacgtgtcccagagcaaggactccgacgtgtacatcaccgataagtgcgtgctggacatgcggagcatggacttcaagagcaactccgccgtggcctggtccaacaagtccgatttcgcctgcgccaacgccttcaacaacagcattatccccgaggacacattcttcccaagccccgagagcagctgcggctttaccagcgagagctaccagcagggcgtgctgagcgccaccatcctgtacgagatcctgctgggcaaggccaccctgtacgccgtgctggtgtctgccctggtgctgatggctatggtcaagcggaaggacagccgggga

SEQ ID NO: 4388 - DNA, 2277 bp, synthetic construct
  source 1..2277: mol_type = other DNA
atggccttaccagtgaccgccttgctcctgccgctggccttgctgctccacgccgccaggccggaagtgcagctggttgaatctggcggaggactggttcagcctggcggatctctgagactgtcttgtgccgccagcggcttcagcttcagcgacttttggatgagctgggtccgacaggcccctggcaaaggacttgaatgggtcgccacaatcagccaggccggcagcgagaaggactacgtggactctgtgaagggcagattcaccatcagccgggacaacgccaagaagtccctgtacctccagatgaacagcctgagagccgaggacaccgccgtgtactattgtgcctctggcgtgtacagcttcgactacagaggccagggcaccctggtcacagtctcttctggtaccggcggaggcggatctggcggcggaggtagcggtggcggaggatctgaattcgagatcgtgctgacacagtctccagccacactgagcgcttctccaggcgagagagtgaccctgacctgtagagccagcagcaacgtgatctccagctacgtgcactggtatcagcagaagcctggcagcagccccagactgtttctgtacagcaccagcaatctggcctccggcgtgccaagcagattttctggctctggcagcggcaccgacttcacctttaccatctctagcctggaagccgaggacgccgccacctactactgtcagcagtacagcggctaccctctgaccttcggccagggcacaagactggaaatcaaactcgaggacctgaagaacgtgttcccacctgaggtggccgtgttcgagcctagcgaggccgagatcagccacacccagaaagccaccctcgtgtgcctggctaccggcttctaccccgaccatgtggaactgtcttggtgggtcaacggcaaagaggtgcacagcggcgtgtgtaccgacccccagccactgaaagaacagcccgccctgaacgacagccggtactgcctgagcagcagactgagagtgtccgccaccttctggcagaacccccggaaccacttcagatgccaggtgcagttctacggcctgagcgagaacgacgagtggacccaggacagagccaagcccgtgacccagatcgtgtctgccgaagcctggggcagagccgattgcgacgtgaagctggtggaaaagagcttcgagacagacaccaacctgaacttccagaacctgagcgtgatcggcttcagaatcctgctgctgaaagtggccggctttaacctgctgatgaccctgcggctgtggtccagcagggccaagcgatctggatctggagcaacaaacttctcactactcaaacaagcaggtgacgtggaggagaatcccgggcctactagtatggactggatttggcgcatccttttccttgtcggcgctgctaccggcgcgcattccttcgaacaagttcagctgcaagagtctggccctggcctggtcaagcctagcgaaacactgagcctgacctgcgccgtgtctggctactctatcaccagcgcctactattggaactggatcagacagcctcctggcaaaggactggaatggatcggctacatcagctacgacggcagaaacaactacaaccccagcctgaagaaccggatcaccatcaatcccgacaccagcaagaaccagttcagcctccagctgaacagcgtgacccctgaggataccgccgtgtactactgtgccagagaaggcgactacgacgtgggcaactactacgctatggactactggggccagggaaccctggtcacagtctcttctacgcgtatccagaaccctgatcctgccgtgtaccagctgcgggatagcaagagcagcgacaagagcgtgtgtctgttcaccgacttcgacagccagaccaacgtgtcccagagcaaggactccgacgtgtacatcaccgataagtgcgtgctggacatgcggagcatggacttcaagagcaactccgccgtggcctggtccaacaagtccgatttcgcctgcgccaacgccttcaacaacagcattatccccgaggacacattcttcccaagccccgagagcagctgcggctttaccagcgagagctaccagcagggcgtgctgagcgccaccatcctgtacgagatcctgctgggcaaggccaccctgtacgccgtgctggtgtctgccctggtgctgatggctatggtcaagcggaaggacagccgggga

SEQ ID NO: 4389 - DNA, 2277 bp, synthetic construct
  source 1..2277: mol_type = other DNA
atggccttaccagtgaccgccttgctcctgccgctggccttgctgctccacgccgccaggccggaagtgcagctggttgaatctggcggaggactggttcagcctggcggatctctgagactgtcttgtgccgccagcggcttcagcttcagcgacttttggatgagctgggtccgacaggcccctggcaaaggacttgaatgggtcgccacaatcagccaggccggcagcgagaaggactacgtggactctgtgaagggcagattcaccatcagccgggacaacgccaagaagtccctgtacctccagatgaacagcctgagagccgaggacaccgccgtgtactattgtgcctctggcgtgtacagcttcgactacagaggccagggcaccctggtcacagtctcttctggtaccggcggaggcggatctggcggcggaggtagcggtggcggaggatctgaattcgagatcgtgctgacacagtctcccgccacactgtcactgtctccaggcgaaagagccacactgagctgtagagccagcagcaacgtgatctccagctacgtgcactggtatcagcagaagcctggacaggcccctcggctgctgatctacagcacaagcaatctggcctctggcatccccgccagattttctggctctggaagcggcaccgacttcaccctgaccataagcagcctggaacctgaggacttcgccgtgtactactgccagcagtatagcggctaccctctgaccttcggccagggcacaagactggaaatcaaactcgaggacctgaagaacgtgttcccacctgaggtggccgtgttcgagcctagcgaggccgagatcagccacacccagaaagccaccctcgtgtgcctggctaccggcttctaccccgaccatgtggaactgtcttggtgggtcaacggcaaagaggtgcacagcggcgtgtgtaccgacccccagccactgaaagaacagcccgccctgaacgacagccggtactgcctgagcagcagactgagagtgtccgccaccttctggcagaacccccggaaccacttcagatgccaggtgcagttctacggcctgagcgagaacgacgagtggacccaggacagagccaagcccgtgacccagatcgtgtctgccgaagcctggggcagagccgattgcgacgtgaagctggtggaaaagagcttcgagacagacaccaacctgaacttccagaacctgagcgtgatcggcttcagaatcctgctgctgaaagtggccggctttaacctgctgatgaccctgcggctgtggtccagcagggccaagcgatctggatctggagcaacaaacttctcactactcaaacaagcaggtgacgtggaggagaatcccgggcctactagtatggactggatttggcgcatccttttccttgtcggcgctgctaccggcgcgcattccttcgaagaagtgcaactggtggaaagtggcggcggactggtgcaacctggaagaagcctgagactgtcctgtgccgccagcggctactctatcacaagcgcctactactggaactgggtccgacaggctcctggcaaaggactggaatgggtgtcctacatcagctacgacggcagaaacaactacaaccccagcctgaagaaccgcttcaccatcagccgggacaacgccaagaagtccctgtacctccagatgaacagcctgagagccgaggacacagccctgtactattgcgccaaagagggcgactacgacgtcggcaactactacgctatggactactggggccagggaaccaccgtgactgtctcttctacgcgtatccagaaccctgatcctgccgtgtaccagctgcgggatagcaagagcagcgacaagagcgtgtgtctgttcaccgacttcgacagccagaccaacgtgtcccagagcaaggactccgacgtgtacatcaccgataagtgcgtgctggacatgcggagcatggacttcaagagcaactccgccgtggcctggtccaacaagtccgatttcgcctgcgccaacgccttcaacaacagcattatccccgaggacacattcttcccaagccccgagagcagctgcggctttaccagcgagagctaccagcagggcgtgctgagcgccaccatcctgtacgagatcctgctgggcaaggccaccctgtacgccgtgctggtgtctgccctggtgctgatggctatggtcaagcggaaggacagccgggga

SEQ ID NO: 4390 - DNA, 2274 bp, synthetic construct
  source 1..2274: mol_type = other DNA
atggccttaccagtgaccgccttgctcctgccgctggccttgctgctccacgccgccaggccggaagtgcagctggttgaatctggcggaggactggttcagcctggcggatctctgagactgtcttgtgccgccagcggcttcagcttcagcgacttttggatgagctgggtccgacaggcccctggcaaaggacttgaatgggtcgccacaatcagccaggccggcagcgagaaggactacgtggactctgtgaagggcagattcaccatcagccgggacaacgccaagaagtccctgtacctccagatgaacagcctgagagccgaggacaccgccgtgtactattgtgcctctggcgtgtacagcttcgactacagaggccagggcaccctggtcacagtctcttctggtaccggcggaggcggatctggcggcggaggtagcggtggcggaggatctgaattcgacgtggtcatgacacagaccccactgagcctgcctgtgtctctgggagatcaggccagcatctcctgtagaagcagccagagcctggtgcacagcaacggcaacacctacctgcggtggtatctccagaagcctggacagagccccaaggtgctgatctacaaggtgtccaacagagtgtccggcgtgcccgatagattttctggcagcggctctggcaccgacttcaccctgaagatcaatagagtggaagccgaggacctgggcgtgtacttctgtagccagagcacccatgtgccttggacctttggcggaggcaccaagctggaaatcaagctcgaggacctgaagaacgtgttcccacctgaggtggccgtgttcgagcctagcgaggccgagatcagccacacccagaaagccaccctcgtgtgcctggctaccggcttctaccccgaccatgtggaactgtcttggtgggtcaacggcaaagaggtgcacagcggcgtgtgtaccgacccccagccactgaaagaacagcccgccctgaacgacagccggtactgcctgagcagcagactgagagtgtccgccaccttctggcagaacccccggaaccacttcagatgccaggtgcagttctacggcctgagcgagaacgacgagtggacccaggacagagccaagcccgtgacccagatcgtgtctgccgaagcctggggcagagccgattgcgacgtgaagctggtggaaaagagcttcgagacagacaccaacctgaacttccagaacctgagcgtgatcggcttcagaatcctgctgctgaaagtggccggctttaacctgctgatgaccctgcggctgtggtccagcagggccaagcgatctggatctggagcaacaaacttctcactactcaaacaagcaggtgacgtggaggagaatcccgggcctactagtatggactggatttggcgcatccttttccttgtcggcgctgctaccggcgcgcattccttcgaaggcgtgaagctggacgagacaggcggaggacttgttcaacctggcggagccatgaagctgagctgtgtgaccagcggctttaccttcggccactactggatgaactgggtccgacagtcccctgagaaaggactggaatgggtcgcccagttcagaaacaagccctacaactacgaaacctactacagcgacagcgtgaagggcagattcaccatcagccgggacgacagcaagtccagcgtgtacctccagatgaacaacctgcgcgtggaagataccggcatctactactgtaccggggccagctacggcatggaatatctcggccagggcaccagcgtgaccgtgtctacaacgcgtatccagaaccctgatcctgccgtgtaccagctgcgggatagcaagagcagcgacaagagcgtgtgtctgttcaccgacttcgacagccagaccaacgtgtcccagagcaaggactccgacgtgtacatcaccgataagtgcgtgctggacatgcggagcatggacttcaagagcaactccgccgtggcctggtccaacaagtccgatttcgcctgcgccaacgccttcaacaacagcattatccccgaggacacattcttcccaagccccgagagcagctgcggctttaccagcgagagctaccagcagggcgtgctgagcgccaccatcctgtacgagatcctgctgggcaaggccaccctgtacgccgtgctggtgtctgccctggtgctgatggctatggtcaagcggaaggacagccgggga

SEQ ID NO: 4391 - DNA, 2292 bp, synthetic construct
  source 1..2292: mol_type = other DNA
atggccttaccagtgaccgccttgctcctgccgctggccttgctgctccacgccgccaggccggaagtgcagctggttgaatctggcggaggactggttcagcctggcggatctctgagactgtcttgtgccgccagcggcttcagcttcagcgacttttggatgagctgggtccgacaggcccctggcaaaggacttgaatgggtcgccacaatcagccaggccggcagcgagaaggactacgtggactctgtgaagggcagattcaccatcagccgggacaacgccaagaagtccctgtacctccagatgaacagcctgagagccgaggacaccgccgtgtactattgtgcctctggcgtgtacagcttcgactacagaggccagggcaccctggtcacagtctcttctggtaccggcggaggcggatctggcggcggaggtagcggtggcggaggatctgaattccaggtgcaactggtggaatctggcggcaatctggttcagcctggcggctctctgagactgtcttgtgccgccagcggcttcaccttcggcagcttttctatgagctgggtccgacaagctcctggcggaggacttgaatgggtggcaggactgtctgccagaagcagcctgacacactacgccgactctgtgaagggcagattcaccatcagccgggacaacgccaagaacagcgtgtacctccagatgaacagcctgagagtggaagataccgccgtgtactactgcgccagaagaagctacgacagcagcggctactggggccacttctacagctacatggatgtgtggggccagggcaccctggttacagtttctctcgaggacctgaagaacgtgttcccacctgaggtggccgtgttcgagcctagcgaggccgagatcagccacacccagaaagccaccctcgtgtgcctggctaccggcttctaccccgaccatgtggaactgtcttggtgggtcaacggcaaagaggtgcacagcggcgtgtgtaccgacccccagccactgaaagaacagcccgccctgaacgacagccggtactgcctgagcagcagactgagagtgtccgccaccttctggcagaacccccggaaccacttcagatgccaggtgcagttctacggcctgagcgagaacgacgagtggacccaggacagagccaagcccgtgacccagatcgtgtctgccgaagcctggggcagagccgattgcgacgtgaagctggtggaaaagagcttcgagacagacaccaacctgaacttccagaacctgagcgtgatcggcttcagaatcctgctgctgaaagtggccggctttaacctgctgatgaccctgcggctgtggtccagcagggccaagcgatctggatctggagcaacaaacttctcactactcaaacaagcaggtgacgtggaggagaatcccgggcctactagtatggactggatttggcgcatccttttccttgtcggcgctgctaccggcgcgcattccttcgaatctgtgctgacccagcctagctccgtgtctgctgctcctggacagaaagtgaccatctcctgtagcggcagcaccagcaacatcggcaacaactacgtgtcctggtatcagcagcaccccggcaaggcccctaagctgatgatctacgacgtgtccaagaggcccagcggcgtgccagatagattttccggcagcaagagcggcaacagcgccagcctggatattagcggactccagtctgaggacgaggccgactactattgcgccgcctgggatgatagcctgagcgagtttctgtttggcaccggcaccaagctgacagtgcttggaacgcgtatccagaaccctgatcctgccgtgtaccagctgcgggatagcaagagcagcgacaagagcgtgtgtctgttcaccgacttcgacagccagaccaacgtgtcccagagcaaggactccgacgtgtacatcaccgataagtgcgtgctggacatgcggagcatggacttcaagagcaactccgccgtggcctggtccaacaagtccgatttcgcctgcgccaacgccttcaacaacagcattatccccgaggacacattcttcccaagccccgagagcagctgcggctttaccagcgagagctaccagcagggcgtgctgagcgccaccatcctgtacgagatcctgctgggcaaggccaccctgtacgccgtgctggtgtctgccctggtgctgatggctatggtcaagcggaaggacagccgggga

SEQ ID NO: 4392 - DNA, 2277 bp, synthetic construct
  source 1..2277: mol_type = other DNA
atggccttaccagtgaccgccttgctcctgccgctggccttgctgctccacgccgccaggccggaagtgcagctggttgaatctggcggaggactggttcagcctggcggatctctgagactgtcttgtgccgccagcggcttcagcttcagcgacttttggatgagctgggtccgacaggcccctggcaaaggacttgaatgggtcgccacaatcagccaggccggcagcgagaaggactacgtggactctgtgaagggcagattcaccatcagccgggacaacgccaagaagtccctgtacctccagatgaacagcctgagagccgaggacaccgccgtgtactattgtgcctctggcgtgtacagcttcgactacagaggccagggcaccctggtcacagtctcttctggtaccggcggaggcggatctggcggcggaggtagcggtggcggaggatctgaattcgacgtggtcatgacacagagcccttctagcctgtctgccagcgtgggcgacagagtgacaatcacctgtcagagcagcctggacatcagccactacctgaactggtatcagcagaagcccggcaaggcccctaagctgctgatctacgacgccagcaatctggaaaccggcgtgcccagcagattttctggcagcggaagcggcacccacttcaccttcacaatatccagcctccagcctgaggacttcgccacctactactgccagcagtacgacaacctgcctctgacctttggcggaggcaccaagctggaaatcaagagactcgaggacctgaagaacgtgttcccacctgaggtggccgtgttcgagcctagcgaggccgagatcagccacacccagaaagccaccctcgtgtgcctggctaccggcttctaccccgaccatgtggaactgtcttggtgggtcaacggcaaagaggtgcacagcggcgtgtgtaccgacccccagccactgaaagaacagcccgccctgaacgacagccggtactgcctgagcagcagactgagagtgtccgccaccttctggcagaacccccggaaccacttcagatgccaggtgcagttctacggcctgagcgagaacgacgagtggacccaggacagagccaagcccgtgacccagatcgtgtctgccgaagcctggggcagagccgattgcgacgtgaagctggtggaaaagagcttcgagacagacaccaacctgaacttccagaacctgagcgtgatcggcttcagaatcctgctgctgaaagtggccggctttaacctgctgatgaccctgcggctgtggtccagcagggccaagcgatctggatctggagcaacaaacttctcactactcaaacaagcaggtgacgtggaggagaatcccgggcctactagtatggactggatttggcgcatccttttccttgtcggcgctgctaccggcgcgcattccttcgaacaagttcaactggttcaatcaggcggaggcgtggtgcaacctggtggctctctgagagtgtcttgtgctgcctctggcgtgaccctgagcgactatggaatgcactgggtccgacaggcccctggcaaaggacttgagtgggtcgccttcatcagaaacgacggcagcgacaagtattacgccgacagcgtgaagggcagattcaccatcagccgggacaacagcgagaaaaccgtgtctctccagatgtctagcctgagagccgaggacaccgccgtgtactactgtgccaagaatggcgagagcggccctctggactactggtatctggatctgtggggcagaggcaccctggtcacagtctcttctacgcgtatccagaaccctgatcctgccgtgtaccagctgcgggatagcaagagcagcgacaagagcgtgtgtctgttcaccgacttcgacagccagaccaacgtgtcccagagcaaggactccgacgtgtacatcaccgataagtgcgtgctggacatgcggagcatggacttcaagagcaactccgccgtggcctggtccaacaagtccgatttcgcctgcgccaacgccttcaacaacagcattatccccgaggacacattcttcccaagccccgagagcagctgcggctttaccagcgagagctaccagcagggcgtgctgagcgccaccatcctgtacgagatcctgctgggcaaggccaccctgtacgccgtgctggtgtctgccctggtgctgatggctatggtcaagcggaaggacagccgggga

SEQ ID NO: 4393 - DNA, 2289 bp, synthetic construct
  source 1..2289: mol_type = other DNA
atggccttaccagtgaccgccttgctcctgccgctggccttgctgctccacgccgccaggccggaagtgcagctggttgaatctggcggaggactggttcagcctggcggatctctgagactgtcttgtgccgccagcggcttcagcttcagcgacttttggatgagctgggtccgacaggcccctggcaaaggacttgaatgggtcgccacaatcagccaggccggcagcgagaaggactacgtggactctgtgaagggcagattcaccatcagccgggacaacgccaagaagtccctgtacctccagatgaacagcctgagagccgaggacaccgccgtgtactattgtgcctctggcgtgtacagcttcgactacagaggccagggcaccctggtcacagtctcttctggtaccggcggaggcggatctggcggcggaggtagcggtggcggaggatctgaattcagctacgagctgacacagcctccatccgtgtctggcacacctggacagagagtggctatctcctgtagcggcagcagcagcaacatcggcaccagaatggtcacctggtatcagcacgtgccaggcacagcccctaagctgctgatcttcaacaacaaccagcggcctagcggcgtgcccgatagattttctgccagcaagagcggcacaagcgccagcctggctatcatcggactccagtctgacgacgaggccgactactactgtgccacctgggacgacaacgtgaagtcctacgtgttcggcaccggcaccaaagtgacagtgcttggaagtagactcgaggacctgaagaacgtgttcccacctgaggtggccgtgttcgagcctagcgaggccgagatcagccacacccagaaagccaccctcgtgtgcctggctaccggcttctaccccgaccatgtggaactgtcttggtgggtcaacggcaaagaggtgcacagcggcgtgtgtaccgacccccagccactgaaagaacagcccgccctgaacgacagccggtactgcctgagcagcagactgagagtgtccgccaccttctggcagaacccccggaaccacttcagatgccaggtgcagttctacggcctgagcgagaacgacgagtggacccaggacagagccaagcccgtgacccagatcgtgtctgccgaagcctggggcagagccgattgcgacgtgaagctggtggaaaagagcttcgagacagacaccaacctgaacttccagaacctgagcgtgatcggcttcagaatcctgctgctgaaagtggccggctttaacctgctgatgaccctgcggctgtggtccagcagggccaagcgatctggatctggagcaacaaacttctcactactcaaacaagcaggtgacgtggaggagaatcccgggcctactagtatggactggatttggcgcatccttttccttgtcggcgctgctaccggcgcgcattccttcgaacttgaaatggcccaggttcagctccagcagtggggagctggactgctgaagcctagcgagacactgagcctgacctgtgctgtgtacggcggcagcttcagcggctactactggtcctggatcagacagcctcctggcaaaggactggaatggatcggcgagatcaaccacagcggctccaccaactacaaccccagcctgaagtccagagtgaccatcagcgtggacaccagcaagaaccagttctccctgaagctgagcagcgtgacagccgctgataccgccgtgtactattgcgctagagcccctcagtcttggtacgtgggagatgtgtggggccagggcacactggttacagtgtcatctacgcgtatccagaaccctgatcctgccgtgtaccagctgcgggatagcaagagcagcgacaagagcgtgtgtctgttcaccgacttcgacagccagaccaacgtgtcccagagcaaggactccgacgtgtacatcaccgataagtgcgtgctggacatgcggagcatggacttcaagagcaactccgccgtggcctggtccaacaagtccgatttcgcctgcgccaacgccttcaacaacagcattatccccgaggacacattcttcccaagccccgagagcagctgcggctttaccagcgagagctaccagcagggcgtgctgagcgccaccatcctgtacgagatcctgctgggcaaggccaccctgtacgccgtgctggtgtctgccctggtgctgatggctatggtcaagcggaaggacagccgggga

SEQ ID NO: 4394 - DNA, 2280 bp, synthetic construct
  source 1..2280: mol_type = other DNA
atggccttaccagtgaccgccttgctcctgccgctggccttgctgctccacgccgccaggccggaagtgcagctggttgaatctggcggaggactggttcagcctggcggatctctgagactgtcttgtgccgccagcggcttcagcttcagcgacttttggatgagctgggtccgacaggcccctggcaaaggacttgaatgggtcgccacaatcagccaggccggcagcgagaaggactacgtggactctgtgaagggcagattcaccatcagccgggacaacgccaagaagtccctgtacctccagatgaacagcctgagagccgaggacaccgccgtgtactattgtgcctctggcgtgtacagcttcgactacagaggccagggcaccctggtcacagtctcttctggtaccggcggaggcggatctggcggcggaggtagcggtggcggaggatctgaattccagtctgtgctgacacagcctcctagcctgtctgtggcccctggaaagacagccagcatcacatgcggcggcaacaacatcggcatgaagtccgtgcactggtatcagcagaggccaggacaggctcctgtgctggtcatctactacgacagcgacagaccctctggcatccccggcagattttccggcagcaactctggcaataccgccacactgaccatctccagagtggaagctggcgacgaggccgactactactgccaagtgtgggataccaccggcgatcaccctggctatgtgtttggcaccggcaccaaagtgacagtgcttctcgaggacctgaagaacgtgttcccacctgaggtggccgtgttcgagcctagcgaggccgagatcagccacacccagaaagccaccctcgtgtgcctggctaccggcttctaccccgaccatgtggaactgtcttggtgggtcaacggcaaagaggtgcacagcggcgtgtgtaccgacccccagccactgaaagaacagcccgccctgaacgacagccggtactgcctgagcagcagactgagagtgtccgccaccttctggcagaacccccggaaccacttcagatgccaggtgcagttctacggcctgagcgagaacgacgagtggacccaggacagagccaagcccgtgacccagatcgtgtctgccgaagcctggggcagagccgattgcgacgtgaagctggtggaaaagagcttcgagacagacaccaacctgaacttccagaacctgagcgtgatcggcttcagaatcctgctgctgaaagtggccggctttaacctgctgatgaccctgcggctgtggtccagcagggccaagcgatctggatctggagcaacaaacttctcactactcaaacaagcaggtgacgtggaggagaatcccgggcctactagtatggactggatttggcgcatccttttccttgtcggcgctgctaccggcgcgcattccttcgaacaagttcaactggttcagagcggagccgaagtgaagaaacctggcagcagcgtgaaggtgtcctgcaaagcaagcggcggcacctttagcagctacgccatctcttgggtccgacaggcacctggacaaggactggaatggatgggcggcatcatccccatcttcggcacagccaattacgcccagaaattccagggcagagtgaccatcaccgccgacgagtctacaagcaccgcctacatggaactgagcagcctgagaagcgaggacaccgccgtgtactattgtgccagaggcgtgtacggctacagcggctctgccccttatgatgagtggggccagggaaccctggtcaccgtttcttctacgcgtatccagaaccctgatcctgccgtgtaccagctgcgggatagcaagagcagcgacaagagcgtgtgtctgttcaccgacttcgacagccagaccaacgtgtcccagagcaaggactccgacgtgtacatcaccgataagtgcgtgctggacatgcggagcatggacttcaagagcaactccgccgtggcctggtccaacaagtccgatttcgcctgcgccaacgccttcaacaacagcattatccccgaggacacattcttcccaagccccgagagcagctgcggctttaccagcgagagctaccagcagggcgtgctgagcgccaccatcctgtacgagatcctgctgggcaaggccaccctgtacgccgtgctggtgtctgccctggtgctgatggctatggtcaagcggaaggacagccgggga

SEQ ID NO: 4395 - DNA, 2274 bp, synthetic construct
  source 1..2274: mol_type = other DNA
atggccttaccagtgaccgccttgctcctgccgctggccttgctgctccacgccgccaggccggaagtgcagctggttgaatctggcggaggactggttcagcctggcggatctctgagactgtcttgtgccgccagcggcttcagcttcagcgacttttggatgagctgggtccgacaggcccctggcaaaggacttgaatgggtcgccacaatcagccaggccggcagcgagaaggactacgtggactctgtgaagggcagattcaccatcagccgggacaacgccaagaagtccctgtacctccagatgaacagcctgagagccgaggacaccgccgtgtactattgtgcctctggcgtgtacagcttcgactacagaggccagggcaccctggtcacagtctcttctggtaccggcggaggcggatctggcggcggaggtagcggtggcggaggatctgaattcgaggtgcaactggttgagtctggcggaggactggtgcagcctggaagaagcctgagactgtcttgtgccgccagcggcttcaccttcgacgattatgccatgcactgggtccgacaggcccctggcaaaggacttgaatgggtgtccggcatctcctggaacagcggctctatcggctacgccgattccgtgaagggcagattcaccatcagccgggacaacgccaagaacagcctgtacctccagatgaactccctgagagccgaggacacagccctgtactactgcgccaaagacaaaggcggaggctactacgacttttggagcggcagcgattattggggccagggcacactggtcacagtgtctagcctcgaggacctgaagaacgtgttcccacctgaggtggccgtgttcgagcctagcgaggccgagatcagccacacccagaaagccaccctcgtgtgcctggctaccggcttctaccccgaccatgtggaactgtcttggtgggtcaacggcaaagaggtgcacagcggcgtgtgtaccgacccccagccactgaaagaacagcccgccctgaacgacagccggtactgcctgagcagcagactgagagtgtccgccaccttctggcagaacccccggaaccacttcagatgccaggtgcagttctacggcctgagcgagaacgacgagtggacccaggacagagccaagcccgtgacccagatcgtgtctgccgaagcctggggcagagccgattgcgacgtgaagctggtggaaaagagcttcgagacagacaccaacctgaacttccagaacctgagcgtgatcggcttcagaatcctgctgctgaaagtggccggctttaacctgctgatgaccctgcggctgtggtccagcagggccaagcgatctggatctggagcaacaaacttctcactactcaaacaagcaggtgacgtggaggagaatcccgggcctactagtatggactggatttggcgcatccttttccttgtcggcgctgctaccggcgcgcattccttcgaatcttctgagctgacacaggaccctgccgtgtctgttgctctgggccagacagtgcggattacctgtcagggcgatagcctgagaagctactacgcctcctggtatcagcagaagccaggccaggctcctgtgctggtcatctacggcaagaacaacagacccagcggcatccccgatagattcagcggaagcagctctggcaataccgccagcctgacaattactggcgctcaggccgaggacgaggccgactactactgcaacagcagagatagcagcggctgggttttcggcggaggcacaaaactgacagtgctgacgcgtatccagaaccctgatcctgccgtgtaccagctgcgggatagcaagagcagcgacaagagcgtgtgtctgttcaccgacttcgacagccagaccaacgtgtcccagagcaaggactccgacgtgtacatcaccgataagtgcgtgctggacatgcggagcatggacttcaagagcaactccgccgtggcctggtccaacaagtccgatttcgcctgcgccaacgccttcaacaacagcattatccccgaggacacattcttcccaagccccgagagcagctgcggctttaccagcgagagctaccagcagggcgtgctgagcgccaccatcctgtacgagatcctgctgggcaaggccaccctgtacgccgtgctggtgtctgccctggtgctgatggctatggtcaagcggaaggacagccgggga

SEQ ID NO: 4396 - DNA, 2301 bp, synthetic construct
  source 1..2301: mol_type = other DNA
atggccttaccagtgaccgccttgctcctgccgctggccttgctgctccacgccgccaggccggaagtgcagctggttgaatctggcggaggactggttcagcctggcggatctctgagactgtcttgtgccgccagcggcttcagcttcagcgacttttggatgagctgggtccgacaggcccctggcaaaggacttgaatgggtcgccacaatcagccaggccggcagcgagaaggactacgtggactctgtgaagggcagattcaccatcagccgggacaacgccaagaagtccctgtacctccagatgaacagcctgagagccgaggacaccgccgtgtactattgtgcctctggcgtgtacagcttcgactacagaggccagggcaccctggtcacagtctcttctggtaccggcggaggcggatctggcggcggaggtagcggtggcggaggatctgaattcgaagtgcagctccagcagtctggacctggcctggttaagcctagccagacactgagcctgacctgtgccatcagcggcgatagcgtgctgagcaacagcgacacctggaactggatcagacagagccctagcagaggactggaatggctgggcagaacctaccacagaagcacttggtacgacgactacgccagctctgtgcggggcagagtgtccatcaatgtggacaccagcaagaaccagtacagcctgcaactgaacgccgtgacacctgaggataccggcgtgtactactgcgccagagacagactccaggacggcaactcttggagcgacgcctttgatgtgtggggccagggcacaatggtcaccgtttctagcctcgaggacctgaagaacgtgttcccacctgaggtggccgtgttcgagcctagcgaggccgagatcagccacacccagaaagccaccctcgtgtgcctggctaccggcttctaccccgaccatgtggaactgtcttggtgggtcaacggcaaagaggtgcacagcggcgtgtgtaccgacccccagccactgaaagaacagcccgccctgaacgacagccggtactgcctgagcagcagactgagagtgtccgccaccttctggcagaacccccggaaccacttcagatgccaggtgcagttctacggcctgagcgagaacgacgagtggacccaggacagagccaagcccgtgacccagatcgtgtctgccgaagcctggggcagagccgattgcgacgtgaagctggtggaaaagagcttcgagacagacaccaacctgaacttccagaacctgagcgtgatcggcttcagaatcctgctgctgaaagtggccggctttaacctgctgatgaccctgcggctgtggtccagcagggccaagcgatctggatctggagcaacaaacttctcactactcaaacaagcaggtgacgtggaggagaatcccgggcctactagtatggactggatttggcgcatccttttccttgtcggcgctgctaccggcgcgcattccttcgaacaatctgctctgacacagcctgccagcgtgtcaggatctcctggacagagcatcaccatctcttgcaccggcaccagctctgatgtcggcggctacaattacgtgtcctggtatcagcagcaccccggcaaggcccctaagctgatgatctacgacgtgtccaacagacccagcggcgtgtccaatagattctccggcagcaagagcggcaacaccgccagcctgacaatttctggactgcaagccgaggacgaggccgactactactgtagcagctacaccagcagcagcacactggtgtacgtgttcggcacaggcaccaaagtgaccgtgcttacgcgtatccagaaccctgatcctgccgtgtaccagctgcgggatagcaagagcagcgacaagagcgtgtgtctgttcaccgacttcgacagccagaccaacgtgtcccagagcaaggactccgacgtgtacatcaccgataagtgcgtgctggacatgcggagcatggacttcaagagcaactccgccgtggcctggtccaacaagtccgatttcgcctgcgccaacgccttcaacaacagcattatccccgaggacacattcttcccaagccccgagagcagctgcggctttaccagcgagagctaccagcagggcgtgctgagcgccaccatcctgtacgagatcctgctgggcaaggccaccctgtacgccgtgctggtgtctgccctggtgctgatggctatggtcaagcggaaggacagccgggga

SEQ ID NO: 4397 - DNA, 2235 bp, synthetic construct
  source 1..2235: mol_type = other DNA
atggccttaccagtgaccgccttgctcctgccgctggccttgctgctccacgccgccaggccggaagtgcagctggttgaatctggcggaggactggttcagcctggcggatctctgagactgtcttgtgccgccagcggcttcagcttcagcgacttttggatgagctgggtccgacaggcccctggcaaaggacttgaatgggtcgccacaatcagccaggccggcagcgagaaggactacgtggactctgtgaagggcagattcaccatcagccgggacaacgccaagaagtccctgtacctccagatgaacagcctgagagccgaggacaccgccgtgtactattgtgcctctggcgtgtacagcttcgactacagaggccagggcaccctggtcacagtctcttctggtaccggcggaggcggatctggcggcggaggtagcggtggcggaggatctgaattccaggtgcaactggttcagtctggggccgaagtgaagaaacctggggcctctgtgaaggtgtcctgcaaggcttccggctacacctttaccagctacgacatcaactgggtccgacaggccacaggccaaggactggaatggatgggctggatgaaccccaacagcggcaataccggctacgcccagaaattccagggcagagtgaccatgaccagaaacaccagcatcagcaccgcctacatggaactgagcagcctgagaagcgaggacaccgccgtgtactattgcgccagaggcgacagcaccaaggtggaaatcaaactcgaggacctgaagaacgtgttcccacctgaggtggccgtgttcgagcctagcgaggccgagatcagccacacccagaaagccaccctcgtgtgcctggctaccggcttctaccccgaccatgtggaactgtcttggtgggtcaacggcaaagaggtgcacagcggcgtgtgtaccgacccccagccactgaaagaacagcccgccctgaacgacagccggtactgcctgagcagcagactgagagtgtccgccaccttctggcagaacccccggaaccacttcagatgccaggtgcagttctacggcctgagcgagaacgacgagtggacccaggacagagccaagcccgtgacccagatcgtgtctgccgaagcctggggcagagccgattgcgacgtgaagctggtggaaaagagcttcgagacagacaccaacctgaacttccagaacctgagcgtgatcggcttcagaatcctgctgctgaaagtggccggctttaacctgctgatgaccctgcggctgtggtccagcagggccaagcgatctggatctggagcaacaaacttctcactactcaaacaagcaggtgacgtggaggagaatcccgggcctactagtatggactggatttggcgcatccttttccttgtcggcgctgctaccggcgcgcattccttcgaacaatctgtgctgacccagcctagatccgtgtctggctctcctggacagagcgtgaccatctcttgtaccggcaccagctctgatgtcggcggctacaattacgtgtcctggtatcagcagcaccccggcgaagcccctaagctgattatctacgacgccgacaagcggcccagcggcatcagcaatagattcagctctggcaagagcggcaacaccgccagcctgacaatcagcggactccaggtggaagatgaggccgactactactgctgctcctatgccggcggaagcacctgggttttcggaggcggtacaaaagtgaccgtgctgacgcgtatccagaaccctgatcctgccgtgtaccagctgcgggatagcaagagcagcgacaagagcgtgtgtctgttcaccgacttcgacagccagaccaacgtgtcccagagcaaggactccgacgtgtacatcaccgataagtgcgtgctggacatgcggagcatggacttcaagagcaactccgccgtggcctggtccaacaagtccgatttcgcctgcgccaacgccttcaacaacagcattatccccgaggacacattcttcccaagccccgagagcagctgcggctttaccagcgagagctaccagcagggcgtgctgagcgccaccatcctgtacgagatcctgctgggcaaggccaccctgtacgccgtgctggtgtctgccctggtgctgatggctatggtcaagcggaaggacagccgggga

SEQ ID NO: 4398 - DNA, 2301 bp, synthetic construct
  source 1..2301: mol_type = other DNA
atggccttaccagtgaccgccttgctcctgccgctggccttgctgctccacgccgccaggccggaagtgcagctggttgaatctggcggaggactggttcagcctggcggatctctgagactgtcttgtgccgccagcggcttcagcttcagcgacttttggatgagctgggtccgacaggcccctggcaaaggacttgaatgggtcgccacaatcagccaggccggcagcgagaaggactacgtggactctgtgaagggcagattcaccatcagccgggacaacgccaagaagtccctgtacctccagatgaacagcctgagagccgaggacaccgccgtgtactattgtgcctctggcgtgtacagcttcgactacagaggccagggcaccctggtcacagtctcttctggtaccggcggaggcggatctggcggcggaggtagcggtggcggaggatctgaattcgaagtgcagctccagcagtctggacctggcctggttaagcctagccagacactgagcctgacctgtgccatcagcggcgatagcgtgtcctctaatagcgccgcctggaactggatcagacagagccctagcagaggactggaatggctgggcagaacctactaccgcagcaagtggtacagcgactacgccgtgtccgtgaagtcccggatcaccatcaatcccgacaccagcaagaaccagttcagcctgcaactgaacagcgtgacccctgaggataccgccgtgtactactgcgccagagatccctacgacttttggagcggctaccccgacgcctttgacatctggggacagggcacaatggtcaccgtttctagcctcgaggacctgaagaacgtgttcccacctgaggtggccgtgttcgagcctagcgaggccgagatcagccacacccagaaagccaccctcgtgtgcctggctaccggcttctaccccgaccatgtggaactgtcttggtgggtcaacggcaaagaggtgcacagcggcgtgtgtaccgacccccagccactgaaagaacagcccgccctgaacgacagccggtactgcctgagcagcagactgagagtgtccgccaccttctggcagaacccccggaaccacttcagatgccaggtgcagttctacggcctgagcgagaacgacgagtggacccaggacagagccaagcccgtgacccagatcgtgtctgccgaagcctggggcagagccgattgcgacgtgaagctggtggaaaagagcttcgagacagacaccaacctgaacttccagaacctgagcgtgatcggcttcagaatcctgctgctgaaagtggccggctttaacctgctgatgaccctgcggctgtggtccagcagggccaagcgatctggatctggagcaacaaacttctcactactcaaacaagcaggtgacgtggaggagaatcccgggcctactagtatggactggatttggcgcatccttttccttgtcggcgctgctaccggcgcgcattccttcgaacaatctgctctgacacagcctgccagcgtgtcaggatctcctggacagagcatcaccatctcttgcaccggcaccagctctgatgtcggcggctacaattacgtgtcctggtatcagcagcaccccggcaaggcccctaaagtgattatcagcgaagtgaacaacagacccagcggcgtgtcccacagattcagcggctctaagtctggcaacaccgccagcctgacaatctctggactgcaagccgaggacgaggccgactacttctgtagcagctacaccagcggcagaaccctgtacgtgttcggcacaggcagcaaagtgacagtgctgggaacgcgtatccagaaccctgatcctgccgtgtaccagctgcgggatagcaagagcagcgacaagagcgtgtgtctgttcaccgacttcgacagccagaccaacgtgtcccagagcaaggactccgacgtgtacatcaccgataagtgcgtgctggacatgcggagcatggacttcaagagcaactccgccgtggcctggtccaacaagtccgatttcgcctgcgccaacgccttcaacaacagcattatccccgaggacacattcttcccaagccccgagagcagctgcggctttaccagcgagagctaccagcagggcgtgctgagcgccaccatcctgtacgagatcctgctgggcaaggccaccctgtacgccgtgctggtgtctgccctggtgctgatggctatggtcaagcggaaggacagccgggga

SEQ ID NO: 4399 - DNA, 2298 bp, synthetic construct
  source 1..2298: mol_type = other DNA
atggccttaccagtgaccgccttgctcctgccgctggccttgctgctccacgccgccaggccggaagtgcagctggttgaatctggcggaggactggttcagcctggcggatctctgagactgtcttgtgccgccagcggcttcagcttcagcgacttttggatgagctgggtccgacaggcccctggcaaaggacttgaatgggtcgccacaatcagccaggccggcagcgagaaggactacgtggactctgtgaagggcagattcaccatcagccgggacaacgccaagaagtccctgtacctccagatgaacagcctgagagccgaggacaccgccgtgtactattgtgcctctggcgtgtacagcttcgactacagaggccagggcaccctggtcacagtctcttctggtaccggcggaggcggatctggcggcggaggtagcggtggcggaggatctgaattccaatctgctctgacacagcctgccagcgcctctggatctcctggacagagcgtgaccatctcctgtaccggcacctcttctgatgtcggcggctacaactacgtgtcctggtatcagcagcaccccggcaaggcccctaagctgatgatctacgacgtgtccaacagacccagcggcgtgtccaatagattctccggcagcaagagcggcaacaccgccagcctgacaatttctggactgcaagccgaggacgaggccgactactactgtagcagctacaccagcagcagcacactgtacgtgttcggcacaggcacccagctcacagttcttctcgaggacctgaagaacgtgttcccacctgaggtggccgtgttcgagcctagcgaggccgagatcagccacacccagaaagccaccctcgtgtgcctggctaccggcttctaccccgaccatgtggaactgtcttggtgggtcaacggcaaagaggtgcacagcggcgtgtgtaccgacccccagccactgaaagaacagcccgccctgaacgacagccggtactgcctgagcagcagactgagagtgtccgccaccttctggcagaacccccggaaccacttcagatgccaggtgcagttctacggcctgagcgagaacgacgagtggacccaggacagagccaagcccgtgacccagatcgtgtctgccgaagcctggggcagagccgattgcgacgtgaagctggtggaaaagagcttcgagacagacaccaacctgaacttccagaacctgagcgtgatcggcttcagaatcctgctgctgaaagtggccggctttaacctgctgatgaccctgcggctgtggtccagcagggccaagcgatctggatctggagcaacaaacttctcactactcaaacaagcaggtgacgtggaggagaatcccgggcctactagtatggactggatttggcgcatccttttccttgtcggcgctgctaccggcgcgcattccttcgaagaagtgcagctccagcagtctggacctggcctggttaagcctagccagacactgagcctgacctgtgccatcagcggcgattccatgctgagcaacagcgacacctggaactggatcagacagagccccagcagaggcctggaatggctgggcagaacataccacagaagcacttggtacgacgactacgccagctctgtgcggggcagagtgtccatcaatgtggacaccagcaagaaccagtacagcctgcaactgaacgccgtgacacctgaggataccggcgtgtactactgtgccagagtgcggctccaggacggcaattcttggagcgacgcctttgatgtgtggggccagggcacaatggtcaccgtttctagcacgcgtatccagaaccctgatcctgccgtgtaccagctgcgggatagcaagagcagcgacaagagcgtgtgtctgttcaccgacttcgacagccagaccaacgtgtcccagagcaaggactccgacgtgtacatcaccgataagtgcgtgctggacatgcggagcatggacttcaagagcaactccgccgtggcctggtccaacaagtccgatttcgcctgcgccaacgccttcaacaacagcattatccccgaggacacattcttcccaagccccgagagcagctgcggctttaccagcgagagctaccagcagggcgtgctgagcgccaccatcctgtacgagatcctgctgggcaaggccaccctgtacgccgtgctggtgtctgccctggtgctgatggctatggtcaagcggaaggacagccgggga

SEQ ID NO: 4400 - DNA, 2298 bp, synthetic construct
  source 1..2298: mol_type = other DNA
atggccttaccagtgaccgccttgctcctgccgctggccttgctgctccacgccgccaggccggaagtgcagctggttgaatctggcggaggactggttcagcctggcggatctctgagactgtcttgtgccgccagcggcttcagcttcagcgacttttggatgagctgggtccgacaggcccctggcaaaggacttgaatgggtcgccacaatcagccaggccggcagcgagaaggactacgtggactctgtgaagggcagattcaccatcagccgggacaacgccaagaagtccctgtacctccagatgaacagcctgagagccgaggacaccgccgtgtactattgtgcctctggcgtgtacagcttcgactacagaggccagggcaccctggtcacagtctcttctggtaccggcggaggcggatctggcggcggaggtagcggtggcggaggatctgaattcgacgtgatgctgacccagacaccactgagcctgcctgtgtctctgggcgatcaggccagcatctcctgtagaagcagccagagcatcctgcacagcaccggcgatacctacctggaatggtatctccagaagcctggacagagccccaagctgctgattaacaaggtgtccaaccggctgagcggcgtgcccgatagattttctggcagcggctctggcaccgacttcaccctgaagatcagcagagtggaagccgaggacctgggcgtgtactactgcttccaaggcagccatgttccttggacctttggcggaggcaccaagctggaaatcaagagagctgacgccgctcctaccgtgtccatctttcctctcgaggacctgaagaacgtgttcccacctgaggtggccgtgttcgagcctagcgaggccgagatcagccacacccagaaagccaccctcgtgtgcctggctaccggcttctaccccgaccatgtggaactgtcttggtgggtcaacggcaaagaggtgcacagcggcgtgtgtaccgacccccagccactgaaagaacagcccgccctgaacgacagccggtactgcctgagcagcagactgagagtgtccgccaccttctggcagaacccccggaaccacttcagatgccaggtgcagttctacggcctgagcgagaacgacgagtggacccaggacagagccaagcccgtgacccagatcgtgtctgccgaagcctggggcagagccgattgcgacgtgaagctggtggaaaagagcttcgagacagacaccaacctgaacttccagaacctgagcgtgatcggcttcagaatcctgctgctgaaagtggccggctttaacctgctgatgaccctgcggctgtggtccagcagggccaagcgatctggatctggagcaacaaacttctcactactcaaacaagcaggtgacgtggaggagaatcccgggcctactagtatggactggatttggcgcatccttttccttgtcggcgctgctaccggcgcgcattccttcgaacaagtgaagctccagcagagcggccctagccttgtgaaacctggcgcttccgtgaagatgagctgcaaggccagcggctacaccttcaccgatttctacatgaaatgggtcaagcagagccacggcaagtctctggaatggatcggcgacatcaaccccaacatcggagacaccttctacaaccagaagttcaagggcaaagccacactgaccgtggacaagagcagcagcaccgcctacatgcagctcaacagcctgaccagcgaggacagcgccgtgtacttttgttccgtgggctacttcgacgtgtggggagccggaacaaccgtgacagtctcttctacgcgtatccagaaccctgatcctgccgtgtaccagctgcgggatagcaagagcagcgacaagagcgtgtgtctgttcaccgacttcgacagccagaccaacgtgtcccagagcaaggactccgacgtgtacatcaccgataagtgcgtgctggacatgcggagcatggacttcaagagcaactccgccgtggcctggtccaacaagtccgatttcgcctgcgccaacgccttcaacaacagcattatccccgaggacacattcttcccaagccccgagagcagctgcggctttaccagcgagagctaccagcagggcgtgctgagcgccaccatcctgtacgagatcctgctgggcaaggccaccctgtacgccgtgctggtgtctgccctggtgctgatggctatggtcaagcggaaggacagccgggga

SEQ ID NO: 4401 - DNA, 2286 bp, synthetic construct
  source 1..2286: mol_type = other DNA
atggccttaccagtgaccgccttgctcctgccgctggccttgctgctccacgccgccaggccggaagtgcagctggttgaatctggcggaggactggttcagcctggcggatctctgagactgtcttgtgccgccagcggcttcagcttcagcgacttttggatgagctgggtccgacaggcccctggcaaaggacttgaatgggtcgccacaatcagccaggccggcagcgagaaggactacgtggactctgtgaagggcagattcaccatcagccgggacaacgccaagaagtccctgtacctccagatgaacagcctgagagccgaggacaccgccgtgtactattgtgcctctggcgtgtacagcttcgactacagaggccagggcaccctggtcacagtctcttctggtaccggcggaggcggatctggcggcggaggtagcggtggcggaggatctgaattcgagatcgtgctgacacagtctcccgccacactgtcactgtctccaggcgaaagagccacactgagctgtagagccagccagagcgtgtccatctacctggcctggtatcagcagaagcctggacaggctccccggctgctgatctacgatgccagcaatagagccacaggcatccccgccagattttctggctctggcagcggcaccgatttcaccctgaccataagcagcctggaacctgaggacttcgccgtgtactactgccagcagagaagcaactggcctcctttcacattcggccctggcaccaaggtggacatcaaactcgaggacctgaagaacgtgttcccacctgaggtggccgtgttcgagcctagcgaggccgagatcagccacacccagaaagccaccctcgtgtgcctggctaccggcttctaccccgaccatgtggaactgtcttggtgggtcaacggcaaagaggtgcacagcggcgtgtgtaccgacccccagccactgaaagaacagcccgccctgaacgacagccggtactgcctgagcagcagactgagagtgtccgccaccttctggcagaacccccggaaccacttcagatgccaggtgcagttctacggcctgagcgagaacgacgagtggacccaggacagagccaagcccgtgacccagatcgtgtctgccgaagcctggggcagagccgattgcgacgtgaagctggtggaaaagagcttcgagacagacaccaacctgaacttccagaacctgagcgtgatcggcttcagaatcctgctgctgaaagtggccggctttaacctgctgatgaccctgcggctgtggtccagcagggccaagcgatctggatctggagcaacaaacttctcactactcaaacaagcaggtgacgtggaggagaatcccgggcctactagtatggactggatttggcgcatccttttccttgtcggcgctgctaccggcgcgcattccttcgaacaggtgcagcttgttgaaagcggaggcggagttgtgcagcctggcagaagtctgagactgtcttgtgccgccagcggcttcaccttcagcagctatggaatgcactgggtccgacaggcccctggcaaaggacttgaatgggttgccgtgatctgggacgacggcagcaacaagtattacgtggacagcgtgaagggcagattcaccatcagccgggacaacagcaagaacaccctgtacctccagatgaacagcctgagagccgaggacacagccgtgtattattgcgccagagatgactactacggcagcggctccttcaacagctactatggcacagacgtgtggggccagggcacaacagttaccgttagctctacgcgtatccagaaccctgatcctgccgtgtaccagctgcgggatagcaagagcagcgacaagagcgtgtgtctgttcaccgacttcgacagccagaccaacgtgtcccagagcaaggactccgacgtgtacatcaccgataagtgcgtgctggacatgcggagcatggacttcaagagcaactccgccgtggcctggtccaacaagtccgatttcgcctgcgccaacgccttcaacaacagcattatccccgaggacacattcttcccaagccccgagagcagctgcggctttaccagcgagagctaccagcagggcgtgctgagcgccaccatcctgtacgagatcctgctgggcaaggccaccctgtacgccgtgctggtgtctgccctggtgctgatggctatggtcaagcggaaggacagccgggga

SEQ ID NO: 4402 - DNA, 2241 bp, synthetic construct
  source 1..2241: mol_type = other DNA
atggccttaccagtgaccgccttgctcctgccgctggccttgctgctccacgccgccaggccggaagtgcagctggttgaatctggcggaggactggttcagcctggcggatctctgagactgtcttgtgccgccagcggcttcagcttcagcgacttttggatgagctgggtccgacaggcccctggcaaaggacttgaatgggtcgccacaatcagccaggccggcagcgagaaggactacgtggactctgtgaagggcagattcaccatcagccgggacaacgccaagaagtccctgtacctccagatgaacagcctgagagccgaggacaccgccgtgtactattgtgcctctggcgtgtacagcttcgactacagaggccagggcaccctggtcacagtctcttctggtaccggcggaggcggatctggcggcggaggtagcggtggcggaggatctgaattcgacatccagatgacacagagccctagcagcctgtctgccagcgtgggagacagagtgaccatcacctgtagagccagccagggcatctcttcttggctggcctggtatcagcagaagcccgagaaggcccctaagagcctgatctatgccgccagctctctccagagcggagtgcctagcagattttctggcagcggctccggcaccgatttcaccctgacaatatccagcctccagcctgaggacttcgccacctactactgccagcagtacaacagctacccctacaccttcggccagggcaccaagctggaaatcaaactcgaggacctgaagaacgtgttcccacctgaggtggccgtgttcgagcctagcgaggccgagatcagccacacccagaaagccaccctcgtgtgcctggctaccggcttctaccccgaccatgtggaactgtcttggtgggtcaacggcaaagaggtgcacagcggcgtgtgtaccgacccccagccactgaaagaacagcccgccctgaacgacagccggtactgcctgagcagcagactgagagtgtccgccaccttctggcagaacccccggaaccacttcagatgccaggtgcagttctacggcctgagcgagaacgacgagtggacccaggacagagccaagcccgtgacccagatcgtgtctgccgaagcctggggcagagccgattgcgacgtgaagctggtggaaaagagcttcgagacagacaccaacctgaacttccagaacctgagcgtgatcggcttcagaatcctgctgctgaaagtggccggctttaacctgctgatgaccctgcggctgtggtccagcagggccaagcgatctggatctggagcaacaaacttctcactactcaaacaagcaggtgacgtggaggagaatcccgggcctactagtatggactggatttggcgcatccttttccttgtcggcgctgctaccggcgcgcattccttcgaagaagtgcaactggttcaatctggcggcggactggttcatccaggcggttctctgagactgagctgtgccggctctggcttcaccttcagcacctacctgatgtactgggtccgacaggcccctggcaagacactggaatgggtgtccgctattggcagcggaggcgatacctactacgccgactctgtgaagggcagattcaccatcagccgggacaacgccaagaacagcctgtacctccagatgaactccctgagagccgaggacatggccgtgtactactgtgccagaggactcggctattggggccagggaacactggtcacagtgtcctctacgcgtatccagaaccctgatcctgccgtgtaccagctgcgggatagcaagagcagcgacaagagcgtgtgtctgttcaccgacttcgacagccagaccaacgtgtcccagagcaaggactccgacgtgtacatcaccgataagtgcgtgctggacatgcggagcatggacttcaagagcaactccgccgtggcctggtccaacaagtccgatttcgcctgcgccaacgccttcaacaacagcattatccccgaggacacattcttcccaagccccgagagcagctgcggctttaccagcgagagctaccagcagggcgtgctgagcgccaccatcctgtacgagatcctgctgggcaaggccaccctgtacgccgtgctggtgtctgccctggtgctgatggctatggtcaagcggaaggacagccgggga

SEQ ID NO: 4403 - DNA, 2298 bp, synthetic construct
  source 1..2298: mol_type = other DNA
atggccttaccagtgaccgccttgctcctgccgctggccttgctgctccacgccgccaggccggaagtgcagctggttgaatctggcggaggactggttcagcctggcggatctctgagactgtcttgtgccgccagcggcttcagcttcagcgacttttggatgagctgggtccgacaggcccctggcaaaggacttgaatgggtcgccacaatcagccaggccggcagcgagaaggactacgtggactctgtgaagggcagattcaccatcagccgggacaacgccaagaagtccctgtacctccagatgaacagcctgagagccgaggacaccgccgtgtactattgtgcctctggcgtgtacagcttcgactacagaggccagggcaccctggtcacagtctcttctggtaccggcggaggcggatctggcggcggaggtagcggtggcggaggatctgaattcctgcctgttctgacacagcctccatccgtgtctgtggcccctggaaagaccgccagaatcacatgcggcggcaacaacatcggcagcaagagcgtgcactggtatcagcagaagcctggacaggctcctgtgctggtggtgtacgacgacagcgatagacctagcggcatccccgagagattcagcggcagcaattccggcaataccgccacactgaccatcagcagagtggaagctggcgacgaggccgactactactgccaagtgtgggacagcagcagcgactacgtggtgtttggcggcggaacaaagctgacagtgcttctcgaggacctgaagaacgtgttcccacctgaggtggccgtgttcgagcctagcgaggccgagatcagccacacccagaaagccaccctcgtgtgcctggctaccggcttctaccccgaccatgtggaactgtcttggtgggtcaacggcaaagaggtgcacagcggcgtgtgtaccgacccccagccactgaaagaacagcccgccctgaacgacagccggtactgcctgagcagcagactgagagtgtccgccaccttctggcagaacccccggaaccacttcagatgccaggtgcagttctacggcctgagcgagaacgacgagtggacccaggacagagccaagcccgtgacccagatcgtgtctgccgaagcctggggcagagccgattgcgacgtgaagctggtggaaaagagcttcgagacagacaccaacctgaacttccagaacctgagcgtgatcggcttcagaatcctgctgctgaaagtggccggctttaacctgctgatgaccctgcggctgtggtccagcagggccaagcgatctggatctggagcaacaaacttctcactactcaaacaagcaggtgacgtggaggagaatcccgggcctactagtatggactggatttggcgcatccttttccttgtcggcgctgctaccggcgcgcattccttcgaagaagttcaactggtgcagagcggagccgaagtgaagaagccaggcgagagcctgaagattagctgcaaaggcagcggctacagcttcaccagctactggatcggctgggtccgacagatgcctggcaaaggactggaatggatgggcatcatctaccccggcgacagcgacaccagatacagccctagctttcagggccaagtgaccatctccgccgacaagagcatcagcacagcctacctccagtggtcctctctgaaggccagcgataccgccatgtactactgcgccagacaagtctggggatggcaaggcggcatgtaccccaggtctaactggtggtacaacctggactcttggggccagggcacactggtcacagtctcttctacgcgtatccagaaccctgatcctgccgtgtaccagctgcgggatagcaagagcagcgacaagagcgtgtgtctgttcaccgacttcgacagccagaccaacgtgtcccagagcaaggactccgacgtgtacatcaccgataagtgcgtgctggacatgcggagcatggacttcaagagcaactccgccgtggcctggtccaacaagtccgatttcgcctgcgccaacgccttcaacaacagcattatccccgaggacacattcttcccaagccccgagagcagctgcggctttaccagcgagagctaccagcagggcgtgctgagcgccaccatcctgtacgagatcctgctgggcaaggccaccctgtacgccgtgctggtgtctgccctggtgctgatggctatggtcaagcggaaggacagccgggga

SEQ ID NO: 4404 - DNA, 2277 bp, synthetic construct
  source 1..2277: mol_type = other DNA
atggccttaccagtgaccgccttgctcctgccgctggccttgctgctccacgccgccaggccggaagtgcagctggttgaatctggcggaggactggttcagcctggcggatctctgagactgtcttgtgccgccagcggcttcagcttcagcgacttttggatgagctgggtccgacaggcccctggcaaaggacttgaatgggtcgccacaatcagccaggccggcagcgagaaggactacgtggactctgtgaagggcagattcaccatcagccgggacaacgccaagaagtccctgtacctccagatgaacagcctgagagccgaggacaccgccgtgtactattgtgcctctggcgtgtacagcttcgactacagaggccagggcaccctggtcacagtctcttctggtaccggcggaggcggatctggcggcggaggtagcggtggcggaggatctgaattcgagctggtcatgacacagagccctgcttctctggccgtgtcactgggacagagagccaccatctcttgcagagccagcgagagcgtggacagctacggcaagagcttcatgcactggtatcagctcaagcccggccagcctcctaagctgctgatctacagagcctccaacctggaaagcggcgtgccagccagattttctggcagcggcagcagaaccgacttcaccctgaccattgatcccgtggaagccgatgatgccgccacctactactgccagcagaacaacgaggacccctggacatttggcggaggcaccaagctggaaatcaaactcgaggacctgaagaacgtgttcccacctgaggtggccgtgttcgagcctagcgaggccgagatcagccacacccagaaagccaccctcgtgtgcctggctaccggcttctaccccgaccatgtggaactgtcttggtgggtcaacggcaaagaggtgcacagcggcgtgtgtaccgacccccagccactgaaagaacagcccgccctgaacgacagccggtactgcctgagcagcagactgagagtgtccgccaccttctggcagaacccccggaaccacttcagatgccaggtgcagttctacggcctgagcgagaacgacgagtggacccaggacagagccaagcccgtgacccagatcgtgtctgccgaagcctggggcagagccgattgcgacgtgaagctggtggaaaagagcttcgagacagacaccaacctgaacttccagaacctgagcgtgatcggcttcagaatcctgctgctgaaagtggccggctttaacctgctgatgaccctgcggctgtggtccagcagggccaagcgatctggatctggagcaacaaacttctcactactcaaacaagcaggtgacgtggaggagaatcccgggcctactagtatggactggatttggcgcatccttttccttgtcggcgctgctaccggcgcgcattccttcgaagaagtgcagctcgaacagtctggccccgagcttgtgaaacctggcgcttccgtgaagatgagctgcaaggccagcggctacaccttcaccaactactacatgaaatgggtcaagcagagccacggcaagtccctggaatggatcggcgatctgaaccccaacaacggcgacaccttctacaaccagaagttcaagggcaaagccacactgaccgtggacaagagcagcaacaccgcctacatgcagctcaactccctgaccagcgaggacagcgccgtgtactactgtgccagaaccggcagatacgaagagaacgctatggactactggggccagggcacaagcgtgacagtctcttctacgcgtatccagaaccctgatcctgccgtgtaccagctgcgggatagcaagagcagcgacaagagcgtgtgtctgttcaccgacttcgacagccagaccaacgtgtcccagagcaaggactccgacgtgtacatcaccgataagtgcgtgctggacatgcggagcatggacttcaagagcaactccgccgtggcctggtccaacaagtccgatttcgcctgcgccaacgccttcaacaacagcattatccccgaggacacattcttcccaagccccgagagcagctgcggctttaccagcgagagctaccagcagggcgtgctgagcgccaccatcctgtacgagatcctgctgggcaaggccaccctgtacgccgtgctggtgtctgccctggtgctgatggctatggtcaagcggaaggacagccgggga

SEQ ID NO: 4405 - DNA, 2259 bp, synthetic construct
  source 1..2259: mol_type = other DNA
atggccttaccagtgaccgccttgctcctgccgctggccttgctgctccacgccgccaggccggaagtgcagctggttgaatctggcggaggactggttcagcctggcggatctctgagactgtcttgtgccgccagcggcttcagcttcagcgacttttggatgagctgggtccgacaggcccctggcaaaggacttgaatgggtcgccacaatcagccaggccggcagcgagaaggactacgtggactctgtgaagggcagattcaccatcagccgggacaacgccaagaagtccctgtacctccagatgaacagcctgagagccgaggacaccgccgtgtactattgtgcctctggcgtgtacagcttcgactacagaggccagggcaccctggtcacagtctcttctggtaccggcggaggcggatctggcggcggaggtagcggtggcggaggatctgaattcgacgtggtcatgacacagagcccttctagcctgtctgccagcgtgggcgacagagtgaccatcacctgtatggcctccgaggacatctacatccggctggcctggtatcagcagaagcctggaaacgcccctaagctgctgatctacgccgccacctctctggaaacaggcgtgccaagcagattttccggcagcggctctggcaccgatttcaccctgacaatatccagcctccagcctgaggacttcgccacctactactgccagcagtattggagcagcccctggacatttggcggaggcaccaaggtggaaatcaaactcgaggacctgaagaacgtgttcccacctgaggtggccgtgttcgagcctagcgaggccgagatcagccacacccagaaagccaccctcgtgtgcctggctaccggcttctaccccgaccatgtggaactgtcttggtgggtcaacggcaaagaggtgcacagcggcgtgtgtaccgacccccagccactgaaagaacagcccgccctgaacgacagccggtactgcctgagcagcagactgagagtgtccgccaccttctggcagaacccccggaaccacttcagatgccaggtgcagttctacggcctgagcgagaacgacgagtggacccaggacagagccaagcccgtgacccagatcgtgtctgccgaagcctggggcagagccgattgcgacgtgaagctggtggaaaagagcttcgagacagacaccaacctgaacttccagaacctgagcgtgatcggcttcagaatcctgctgctgaaagtggccggctttaacctgctgatgaccctgcggctgtggtccagcagggccaagcgatctggatctggagcaacaaacttctcactactcaaacaagcaggtgacgtggaggagaatcccgggcctactagtatggactggatttggcgcatccttttccttgtcggcgctgctaccggcgcgcattccttcgaacaggttcagctgcaagagtctggccccggactggtcaagcctagccaaacactgagcctgacctgtaccgtgtccggctacagcatcaccagcgactacacctggaactggatcagacagcctcctggcaacggactggaatggatcggctacatcacctacagcggcagcaccagctacaaccccagcctgaaaagccgggtgctgatctccgtggacaccagcaagaatcaggtgtccctgaagctgagcagcgtgacagccgctgataccgccgtgtactactgtgccagactggggagaagatacacaatggactactggggccagggcaccaccgtgacagtttcttctacgcgtatccagaaccctgatcctgccgtgtaccagctgcgggatagcaagagcagcgacaagagcgtgtgtctgttcaccgacttcgacagccagaccaacgtgtcccagagcaaggactccgacgtgtacatcaccgataagtgcgtgctggacatgcggagcatggacttcaagagcaactccgccgtggcctggtccaacaagtccgatttcgcctgcgccaacgccttcaacaacagcattatccccgaggacacattcttcccaagccccgagagcagctgcggctttaccagcgagagctaccagcagggcgtgctgagcgccaccatcctgtacgagatcctgctgggcaaggccaccctgtacgccgtgctggtgtctgccctggtgctgatggctatggtcaagcggaaggacagccgggga

SEQ ID NO: 4406 - DNA, 2271 bp, synthetic construct
  source 1..2271: mol_type = other DNA
atggccttaccagtgaccgccttgctcctgccgctggccttgctgctccacgccgccaggccggaagtgcagctggttgaatctggcggaggactggttcagcctggcggatctctgagactgtcttgtgccgccagcggcttcagcttcagcgacttttggatgagctgggtccgacaggcccctggcaaaggacttgaatgggtcgccacaatcagccaggccggcagcgagaaggactacgtggactctgtgaagggcagattcaccatcagccgggacaacgccaagaagtccctgtacctccagatgaacagcctgagagccgaggacaccgccgtgtactattgtgcctctggcgtgtacagcttcgactacagaggccagggcaccctggtcacagtctcttctggtaccggcggaggcggatctggcggcggaggtagcggtggcggaggatctgaattcgatattgtgctgactcagagccctgccactctgagccttagtccaggcgacagagctaccatctcctgtagggcctctgaatccgtgaccattctgggctctcatctcatatattggtatcaacaaaagccgggccagcctccacggctgctcattcaactggcctctaacgtgcagaccggcgtgccagctagattttctggctctggctcccggaccgactttacactgacaatcagctccgtggaacccgaagattttgccgtctattattgcctccagtccaggaccattcctcggacattcggccagggaacaaaactcgaaatcaagcggctcgaggacctgaagaacgtgttcccacctgaggtggccgtgttcgagcctagcgaggccgagatcagccacacccagaaagccaccctcgtgtgcctggctaccggcttctaccccgaccatgtggaactgtcttggtgggtcaacggcaaagaggtgcacagcggcgtgtgtaccgacccccagccactgaaagaacagcccgccctgaacgacagccggtactgcctgagcagcagactgagagtgtccgccaccttctggcagaacccccggaaccacttcagatgccaggtgcagttctacggcctgagcgagaacgacgagtggacccaggacagagccaagcccgtgacccagatcgtgtctgccgaagcctggggcagagccgattgcgacgtgaagctggtggaaaagagcttcgagacagacaccaacctgaacttccagaacctgagcgtgatcggcttcagaatcctgctgctgaaagtggccggctttaacctgctgatgaccctgcggctgtggtccagcagggccaagcgatctggatctggagcaacaaacttctcactactcaaacaagcaggtgacgtggaggagaatcccgggcctactagtatggactggatttggcgcatccttttccttgtcggcgctgctaccggcgcgcattccttcgaacaggtgcagctcgttcagagtggccccgaagtgaaaaagccaggcgagtccgtgaagatttcctgcaaagcctccggctacacattccggcactactctatgaattgggtcaagcaggccccaggccagggccttaagtggatgggacgcatcaataccgagtccggcgtgccaatctacgccgatgacttcaaaggccggttcagcttcaccgtggatacctctgcctccaccgcctacctggaaatcagcagcctgaccagcgaggatacagctgtgtacttctgtagcaacgattacctctacagcctggatttctggggacagggaaccacactgaccgtgtctagcacgcgtatccagaaccctgatcctgccgtgtaccagctgcgggatagcaagagcagcgacaagagcgtgtgtctgttcaccgacttcgacagccagaccaacgtgtcccagagcaaggactccgacgtgtacatcaccgataagtgcgtgctggacatgcggagcatggacttcaagagcaactccgccgtggcctggtccaacaagtccgatttcgcctgcgccaacgccttcaacaacagcattatccccgaggacacattcttcccaagccccgagagcagctgcggctttaccagcgagagctaccagcagggcgtgctgagcgccaccatcctgtacgagatcctgctgggcaaggccaccctgtacgccgtgctggtgtctgccctggtgctgatggctatggtcaagcggaaggacagccgggga

SEQ ID NO: 4407 - DNA, 2271 bp, synthetic construct
  source 1..2271: mol_type = other DNA
atggccttaccagtgaccgccttgctcctgccgctggccttgctgctccacgccgccaggccggaagtgcagctggttgaatctggcggaggactggttcagcctggcggatctctgagactgtcttgtgccgccagcggcttcagcttcagcgacttttggatgagctgggtccgacaggcccctggcaaaggacttgaatgggtcgccacaatcagccaggccggcagcgagaaggactacgtggactctgtgaagggcagattcaccatcagccgggacaacgccaagaagtccctgtacctccagatgaacagcctgagagccgaggacaccgccgtgtactattgtgcctctggcgtgtacagcttcgactacagaggccagggcaccctggtcacagtctcttctggtaccggcggaggcggatctggcggcggaggtagcggtggcggaggatctgaattcgacatcgtgctgacacagtctcccgccacactgtcactgagccctggcgatagagccacactgagctgtagagccagcgagagcgtgacaatcctgggcagccacctgatctactggtatcagcagaagcccggacaggcccctagactgctgattcagctcgccagcaatgtgcagacaggcatccctgccagattttccggcagcggcagcagaaccgatttcaccctgaccataagcagcctggaacctgaggacttcgccgtgtactactgcctccagagccggacaatccccagaacctttggacagggcaccaagctggaaatcaagagactcgaggacctgaagaacgtgttcccacctgaggtggccgtgttcgagcctagcgaggccgagatcagccacacccagaaagccaccctcgtgtgcctggctaccggcttctaccccgaccatgtggaactgtcttggtgggtcaacggcaaagaggtgcacagcggcgtgtgtaccgacccccagccactgaaagaacagcccgccctgaacgacagccggtactgcctgagcagcagactgagagtgtccgccaccttctggcagaacccccggaaccacttcagatgccaggtgcagttctacggcctgagcgagaacgacgagtggacccaggacagagccaagcccgtgacccagatcgtgtctgccgaagcctggggcagagccgattgcgacgtgaagctggtggaaaagagcttcgagacagacaccaacctgaacttccagaacctgagcgtgatcggcttcagaatcctgctgctgaaagtggccggctttaacctgctgatgaccctgcggctgtggtccagcagggccaagcgatctggatctggagcaacaaacttctcactactcaaacaagcaggtgacgtggaggagaatcccgggcctactagtatggactggatttggcgcatccttttccttgtcggcgctgctaccggcgcgcattccttcgaacaggttcagctggtgcagtctggcagcgagctgaagaaacctggcgagagcgtgaagatcagctgcaaggccagcggctacaccttcacacactacagcatgaactgggtccgacaggcccctggacaaggactggaatggatgggcagaatcaacaccgagacaggcgagcccctgtacgccgacgatttcaagggcagattcgtgttcagcctggacaccagcgccagcacagcctatctccagatcagctctctgaaggccgaggacaccgccgtgtactactgctccaacgactacctgtactccctggactattggggccagggcacactggtcacagtgtctagtacgcgtatccagaaccctgatcctgccgtgtaccagctgcgggatagcaagagcagcgacaagagcgtgtgtctgttcaccgacttcgacagccagaccaacgtgtcccagagcaaggactccgacgtgtacatcaccgataagtgcgtgctggacatgcggagcatggacttcaagagcaactccgccgtggcctggtccaacaagtccgatttcgcctgcgccaacgccttcaacaacagcattatccccgaggacacattcttcccaagccccgagagcagctgcggctttaccagcgagagctaccagcagggcgtgctgagcgccaccatcctgtacgagatcctgctgggcaaggccaccctgtacgccgtgctggtgtctgccctggtgctgatggctatggtcaagcggaaggacagccgggga

SEQ ID NO: 4408 - DNA, 2274 bp, synthetic construct
  source 1..2274: mol_type = other DNA
atggccttaccagtgaccgccttgctcctgccgctggccttgctgctccacgccgccaggccggaagtgcagctggttgaatctggcggaggactggttcagcctggcggatctctgagactgtcttgtgccgccagcggcttcagcttcagcgacttttggatgagctgggtccgacaggcccctggcaaaggacttgaatgggtcgccacaatcagccaggccggcagcgagaaggactacgtggactctgtgaagggcagattcaccatcagccgggacaacgccaagaagtccctgtacctccagatgaacagcctgagagccgaggacaccgccgtgtactattgtgcctctggcgtgtacagcttcgactacagaggccagggcaccctggtcacagtctcttctggtaccggcggaggcggatctggcggcggaggtagcggtggcggaggatctgaattcgacatccagctgactcagagccctagctttctgagcgccagcgtgggcgacagagtgaccattacatgtagagccagccagggcatcagcaccgacctgaactggtatcagcagaagcctggcaaggcccctaagctgctgatctacgccgccagcaatctggaaagcggcgtgccaagcagattttccggctctggcagcggcaccgagttcaccctgacaatatctagcctccagcctgaggacttcgccacctactactgccagcagagctacaactggccctacacctttggcggaggcaccaaggtggaaatcaagagactcgaggacctgaagaacgtgttcccacctgaggtggccgtgttcgagcctagcgaggccgagatcagccacacccagaaagccaccctcgtgtgcctggctaccggcttctaccccgaccatgtggaactgtcttggtgggtcaacggcaaagaggtgcacagcggcgtgtgtaccgacccccagccactgaaagaacagcccgccctgaacgacagccggtactgcctgagcagcagactgagagtgtccgccaccttctggcagaacccccggaaccacttcagatgccaggtgcagttctacggcctgagcgagaacgacgagtggacccaggacagagccaagcccgtgacccagatcgtgtctgccgaagcctggggcagagccgattgcgacgtgaagctggtggaaaagagcttcgagacagacaccaacctgaacttccagaacctgagcgtgatcggcttcagaatcctgctgctgaaagtggccggctttaacctgctgatgaccctgcggctgtggtccagcagggccaagcgatctggatctggagcaacaaacttctcactactcaaacaagcaggtgacgtggaggagaatcccgggcctactagtatggactggatttggcgcatccttttccttgtcggcgctgctaccggcgcgcattccttcgaagaagttcagctggttgaatcaggcggaggactcgtgaaacctggcggctctctgagactgtcttgtgccgccagcggcttcaccttcagcaacttcgagatgaactgggtccgacaggccccaggcaaaggactggaatgggtgtccggcatcagctccaatggccggtacatcaactacgccgacagcgtgaagggcagattcaccatcagccgggacaacgccaagaacagcctgtacctccagatgaactccctgagagccgaggacaccgccgtgtactattgtgccagagtggtggacttcgaccaggactacaacggcttcgactattggggccagggcaccctggttaccgttagctctacgcgtatccagaaccctgatcctgccgtgtaccagctgcgggatagcaagagcagcgacaagagcgtgtgtctgttcaccgacttcgacagccagaccaacgtgtcccagagcaaggactccgacgtgtacatcaccgataagtgcgtgctggacatgcggagcatggacttcaagagcaactccgccgtggcctggtccaacaagtccgatttcgcctgcgccaacgccttcaacaacagcattatccccgaggacacattcttcccaagccccgagagcagctgcggctttaccagcgagagctaccagcagggcgtgctgagcgccaccatcctgtacgagatcctgctgggcaaggccaccctgtacgccgtgctggtgtctgccctggtgctgatggctatggtcaagcggaaggacagccgggga

SEQ ID NO: 4409 - DNA, 2268 bp, synthetic construct
  source 1..2268: mol_type = other DNA
atggccttaccagtgaccgccttgctcctgccgctggccttgctgctccacgccgccaggccggaagtgcagctggttgaatctggcggaggactggttcagcctggcggatctctgagactgtcttgtgccgccagcggcttcagcttcagcgacttttggatgagctgggtccgacaggcccctggcaaaggacttgaatgggtcgccacaatcagccaggccggcagcgagaaggactacgtggactctgtgaagggcagattcaccatcagccgggacaacgccaagaagtccctgtacctccagatgaacagcctgagagccgaggacaccgccgtgtactattgtgcctctggcgtgtacagcttcgactacagaggccagggcaccctggtcacagtctcttctggtaccggcggaggcggatctggcggcggaggtagcggtggcggaggatctgaattcgacatccaactgactcagagccccagctttctgagcgcctctgtgggcgacagagtgaccatcacatgtagtctcagcctgggcatcagcacatggcgggattggtttccgccgaggcttggcaggggccttgagccgctgacctacgccgccagcacactgcaaagcggagtgcctagcagattttccggcagcggctctggcaccgagttcaccctgacaatatccagcctccagcctgaggacttcgccacctactactgccagcagctcaacagctaccctctgacctttggcggaggcaccaaggtggaaatcaagagactcgaggacctgaagaacgtgttcccacctgaggtggccgtgttcgagcctagcgaggccgagatcagccacacccagaaagccaccctcgtgtgcctggctaccggcttctaccccgaccatgtggaactgtcttggtgggtcaacggcaaagaggtgcacagcggcgtgtgtaccgacccccagccactgaaagaacagcccgccctgaacgacagccggtactgcctgagcagcagactgagagtgtccgccaccttctggcagaacccccggaaccacttcagatgccaggtgcagttctacggcctgagcgagaacgacgagtggacccaggacagagccaagcccgtgacccagatcgtgtctgccgaagcctggggcagagccgattgcgacgtgaagctggtggaaaagagcttcgagacagacaccaacctgaacttccagaacctgagcgtgatcggcttcagaatcctgctgctgaaagtggccggctttaacctgctgatgaccctgcggctgtggtccagcagggccaagcgatctggatctggagcaacaaacttctcactactcaaacaagcaggtgacgtggaggagaatcccgggcctactagtatggactggatttggcgcatccttttccttgtcggcgctgctaccggcgcgcattccttcgaagaagttcaactggttgagtctggtggcggcctggttaagcctggcggatctctgagactgagctgtgccgccagcggcttcacctttagcacatacggcatgagctgggtccgacaggcccctggaaaaggacttgagtgggtcgcctacatcaacaacggctccggctacatctactacgccgacagcgtgaagggcagattcaccatcagccgggacaacgccaagaacagcctgtacctccagatgaactccctgagagccgaggacaccgccgtgtactattgtgccagaggacagtggtggagcggcggagactttgattattggggccagggcaccctggtcaccgtttcttctacgcgtatccagaaccctgatcctgccgtgtaccagctgcgggatagcaagagcagcgacaagagcgtgtgtctgttcaccgacttcgacagccagaccaacgtgtcccagagcaaggactccgacgtgtacatcaccgataagtgcgtgctggacatgcggagcatggacttcaagagcaactccgccgtggcctggtccaacaagtccgatttcgcctgcgccaacgccttcaacaacagcattatccccgaggacacattcttcccaagccccgagagcagctgcggctttaccagcgagagctaccagcagggcgtgctgagcgccaccatcctgtacgagatcctgctgggcaaggccaccctgtacgccgtgctggtgtctgccctggtgctgatggctatggtcaagcggaaggacagccgggga

SEQ ID NO: 4410 - DNA, 2271 bp, synthetic construct
  source 1..2271: mol_type = other DNA
atggccttaccagtgaccgccttgctcctgccgctggccttgctgctccacgccgccaggccggaagtgcagctggttgaatctggcggaggactggttcagcctggcggatctctgagactgtcttgtgccgccagcggcttcagcttcagcgacttttggatgagctgggtccgacaggcccctggcaaaggacttgaatgggtcgccacaatcagccaggccggcagcgagaaggactacgtggactctgtgaagggcagattcaccatcagccgggacaacgccaagaagtccctgtacctccagatgaacagcctgagagccgaggacaccgccgtgtactattgtgcctctggcgtgtacagcttcgactacagaggccagggcaccctggtcacagtctcttctggtaccggcggaggcggatctggcggcggaggtagcggtggcggaggatctgaattcgagatcgtgctgacacagtctcccgccacactgtcactgtctccaggcgaaagagccacactgagctgtagcgccagcagcagcgtgtcctacatgtactggtatcagcagaagcccggacaggcccctagactgctgatctacagaaccagcaacctggcctctggcatccccgccagattttctggctctggcagcggcaccgatttcaccctgaccataagcagcctggaacctgaggacttcgccgtgtactactgccagcagtaccacagctaccccaccacctttggacagggcaccaaggtggaaatcaagcggacagttctcgaggacctgaagaacgtgttcccacctgaggtggccgtgttcgagcctagcgaggccgagatcagccacacccagaaagccaccctcgtgtgcctggctaccggcttctaccccgaccatgtggaactgtcttggtgggtcaacggcaaagaggtgcacagcggcgtgtgtaccgacccccagccactgaaagaacagcccgccctgaacgacagccggtactgcctgagcagcagactgagagtgtccgccaccttctggcagaacccccggaaccacttcagatgccaggtgcagttctacggcctgagcgagaacgacgagtggacccaggacagagccaagcccgtgacccagatcgtgtctgccgaagcctggggcagagccgattgcgacgtgaagctggtggaaaagagcttcgagacagacaccaacctgaacttccagaacctgagcgtgatcggcttcagaatcctgctgctgaaagtggccggctttaacctgctgatgaccctgcggctgtggtccagcagggccaagcgatctggatctggagcaacaaacttctcactactcaaacaagcaggtgacgtggaggagaatcccgggcctactagtatggactggatttggcgcatccttttccttgtcggcgctgctaccggcgcgcattccttcgaagaagtgcagctggttgaatcaggtggcggcctggttcaacctggcggatctctgagactgtcttgtgccgccagcggcttcagcttcaacacctacgccatgaactgggtccgacaggctcctggcaaaggactggaatgggtgtcccacatcagaagcaagagcaacaacttcgccacctactacgccgacagcgtgaaggacagattcaccatcagccgggacaacgccaagaacagcctgtacctccagatgaactccctgagagccgaggacaccgccgtgtattattgcgccagacaaggcggcgacttccctatggattattggggccagggcaccctggtcaccgtttcttctacgcgtatccagaaccctgatcctgccgtgtaccagctgcgggatagcaagagcagcgacaagagcgtgtgtctgttcaccgacttcgacagccagaccaacgtgtcccagagcaaggactccgacgtgtacatcaccgataagtgcgtgctggacatgcggagcatggacttcaagagcaactccgccgtggcctggtccaacaagtccgatttcgcctgcgccaacgccttcaacaacagcattatccccgaggacacattcttcccaagccccgagagcagctgcggctttaccagcgagagctaccagcagggcgtgctgagcgccaccatcctgtacgagatcctgctgggcaaggccaccctgtacgccgtgctggtgtctgccctggtgctgatggctatggtcaagcggaaggacagccgggga

SEQ ID NO: 4411 - DNA, 2259 bp, synthetic construct
  source 1..2259: mol_type = other DNA
atggccttaccagtgaccgccttgctcctgccgctggccttgctgctccacgccgccaggccggaagtgcagctggttgaatctggcggaggactggttcagcctggcggatctctgagactgtcttgtgccgccagcggcttcagcttcagcgacttttggatgagctgggtccgacaggcccctggcaaaggacttgaatgggtcgccacaatcagccaggccggcagcgagaaggactacgtggactctgtgaagggcagattcaccatcagccgggacaacgccaagaagtccctgtacctccagatgaacagcctgagagccgaggacaccgccgtgtactattgtgcctctggcgtgtacagcttcgactacagaggccagggcaccctggtcacagtctcttctggtaccggcggaggcggatctggcggcggaggtagcggtggcggaggatctgaattcgacgtggtcatgacacagagcccttctagcctgtctgccagcgtgggcgacagagtgaccatcacctgtaaagccagcgaggacatctacatccggctggcctggtatcagcagaagcctggaaaggcccctaagctgctgatctacgccgccacctctctggaaacaggcgtgccaagcagattttccggcagcggctctggcaccgatttcaccctgacaatatccagcctccagcctgaggacttcgccacctactactgccagcagtattggaccacaccttggacctttggcggaggcaccaaggtggaaatcaaactcgaggacctgaagaacgtgttcccacctgaggtggccgtgttcgagcctagcgaggccgagatcagccacacccagaaagccaccctcgtgtgcctggctaccggcttctaccccgaccatgtggaactgtcttggtgggtcaacggcaaagaggtgcacagcggcgtgtgtaccgacccccagccactgaaagaacagcccgccctgaacgacagccggtactgcctgagcagcagactgagagtgtccgccaccttctggcagaacccccggaaccacttcagatgccaggtgcagttctacggcctgagcgagaacgacgagtggacccaggacagagccaagcccgtgacccagatcgtgtctgccgaagcctggggcagagccgattgcgacgtgaagctggtggaaaagagcttcgagacagacaccaacctgaacttccagaacctgagcgtgatcggcttcagaatcctgctgctgaaagtggccggctttaacctgctgatgaccctgcggctgtggtccagcagggccaagcgatctggatctggagcaacaaacttctcactactcaaacaagcaggtgacgtggaggagaatcccgggcctactagtatggactggatttggcgcatccttttccttgtcggcgctgctaccggcgcgcattccttcgaacaggtgcagctccaagagtctggccctggactggtcaagcctagccagacactgagcctgacctgtaccgtgtccggctacagcatcaccatcgactacacctggaactggatcagacagcctcctggcaaaggactggaatggatcggctacatcacctacagcggcagcaccgactacaaccccagcctgaaaagccgggtgctgatctccgtggacaccagcaagaatcaggtgtccctgaagctgagcagcgtgacagccgctgataccgccgtgtactactgtgccagactgggcagaagatacgccctggattattggggccagggcaccaccgtgacagtgtcatctacgcgtatccagaaccctgatcctgccgtgtaccagctgcgggatagcaagagcagcgacaagagcgtgtgtctgttcaccgacttcgacagccagaccaacgtgtcccagagcaaggactccgacgtgtacatcaccgataagtgcgtgctggacatgcggagcatggacttcaagagcaactccgccgtggcctggtccaacaagtccgatttcgcctgcgccaacgccttcaacaacagcattatccccgaggacacattcttcccaagccccgagagcagctgcggctttaccagcgagagctaccagcagggcgtgctgagcgccaccatcctgtacgagatcctgctgggcaaggccaccctgtacgccgtgctggtgtctgccctggtgctgatggctatggtcaagcggaaggacagccgggga

SEQ ID NO: 4412 - DNA, 2274 bp, synthetic construct
  source 1..2274: mol_type = other DNA
atggccttaccagtgaccgccttgctcctgccgctggccttgctgctccacgccgccaggccggaagtgcagctggttgaatctggcggaggactggttcagcctggcggatctctgagactgtcttgtgccgccagcggcttcagcttcagcgacttttggatgagctgggtccgacaggcccctggcaaaggacttgaatgggtcgccacaatcagccaggccggcagcgagaaggactacgtggactctgtgaagggcagattcaccatcagccgggacaacgccaagaagtccctgtacctccagatgaacagcctgagagccgaggacaccgccgtgtactattgtgcctctggcgtgtacagcttcgactacagaggccagggcaccctggtcacagtctcttctggtaccggcggaggcggatctggcggcggaggtagcggtggcggaggatctgaattcgacatccagatgacccagaccacaagcagcctgtctgccagcctgggcgacagagtgaccatctcttgtagagccagccaggacatcagcaactacctgaactggtatcagcagaaacccgacggcaccgtgaagctgctgatctactacaccagcatcctgcacagcggcgtgcccagcagattttctggctctggcagcggcaccgactacagcctgaccatcagcaatctggaacaagaggacttcgctacctacttctgccagcaaggcaacaccctgccttggacatttggcggaggcaccaagctggaaatcaaagctctcgaggacctgaagaacgtgttcccacctgaggtggccgtgttcgagcctagcgaggccgagatcagccacacccagaaagccaccctcgtgtgcctggctaccggcttctaccccgaccatgtggaactgtcttggtgggtcaacggcaaagaggtgcacagcggcgtgtgtaccgacccccagccactgaaagaacagcccgccctgaacgacagccggtactgcctgagcagcagactgagagtgtccgccaccttctggcagaacccccggaaccacttcagatgccaggtgcagttctacggcctgagcgagaacgacgagtggacccaggacagagccaagcccgtgacccagatcgtgtctgccgaagcctggggcagagccgattgcgacgtgaagctggtggaaaagagcttcgagacagacaccaacctgaacttccagaacctgagcgtgatcggcttcagaatcctgctgctgaaagtggccggctttaacctgctgatgaccctgcggctgtggtccagcagggccaagcgatctggatctggagcaacaaacttctcactactcaaacaagcaggtgacgtggaggagaatcccgggcctactagtatggactggatttggcgcatccttttccttgtcggcgctgctaccggcgcgcattccttcgaagaagtgcaactggttgaatctggcggcggactggttaagcctggcggatctctgaagctgagctgtgccgcctctggcttcgccttcagcatctacgatatgagctgggtccgacagacccctgagaagagactggaatgggtcgcctacatctctagcggcggagggacctactatcccgacacagtgaagggcagattcaccatctccagagacaacgccaagaacaccctgtacctccagatgagcagcctgaagtccgaggacaccgccatgtactactgcgccagacacagcggctatggcacacattggggagtgctgtttgcctactggggccagggaacactggtcacagtttctgctacgcgtatccagaaccctgatcctgccgtgtaccagctgcgggatagcaagagcagcgacaagagcgtgtgtctgttcaccgacttcgacagccagaccaacgtgtcccagagcaaggactccgacgtgtacatcaccgataagtgcgtgctggacatgcggagcatggacttcaagagcaactccgccgtggcctggtccaacaagtccgatttcgcctgcgccaacgccttcaacaacagcattatccccgaggacacattcttcccaagccccgagagcagctgcggctttaccagcgagagctaccagcagggcgtgctgagcgccaccatcctgtacgagatcctgctgggcaaggccaccctgtacgccgtgctggtgtctgccctggtgctgatggctatggtcaagcggaaggacagccgggga

SEQ ID NO: 4413 - DNA, 2304 bp, synthetic construct
  source 1..2304: mol_type = other DNA
atggccttaccagtgaccgccttgctcctgccgctggccttgctgctccacgccgccaggccggaagtgcagctggttgaatctggcggaggactggttcagcctggcggatctctgagactgtcttgtgccgccagcggcttcagcttcagcgacttttggatgagctgggtccgacaggcccctggcaaaggacttgaatgggtcgccacaatcagccaggccggcagcgagaaggactacgtggactctgtgaagggcagattcaccatcagccgggacaacgccaagaagtccctgtacctccagatgaacagcctgagagccgaggacaccgccgtgtactattgtgcctctggcgtgtacagcttcgactacagaggccagggcaccctggtcacagtctcttctggtaccggcggaggcggatctggcggcggaggtagcggtggcggaggatctgaattcgacatcgtgatgacacagagccctgatagcctggccgtgtctctgggagagagagccaccatcaactgcaagagcagccagagcctgctgtacagaagcaaccagaagaactacctggcctggtatcagcagaagcccggccagcctcctaagctgctgatctactgggccagcaccagagaaagcggcgtgcccgatagattttctggctctggcagcggcaccgacttcaccctgacaatttctagcctgcaagccgaggacgtggccgtgtactactgccagcagtattacaactaccccagaaccttcggccagggcaccaaggtggaaatcaagagaacagttctcgaggacctgaagaacgtgttcccacctgaggtggccgtgttcgagcctagcgaggccgagatcagccacacccagaaagccaccctcgtgtgcctggctaccggcttctaccccgaccatgtggaactgtcttggtgggtcaacggcaaagaggtgcacagcggcgtgtgtaccgacccccagccactgaaagaacagcccgccctgaacgacagccggtactgcctgagcagcagactgagagtgtccgccaccttctggcagaacccccggaaccacttcagatgccaggtgcagttctacggcctgagcgagaacgacgagtggacccaggacagagccaagcccgtgacccagatcgtgtctgccgaagcctggggcagagccgattgcgacgtgaagctggtggaaaagagcttcgagacagacaccaacctgaacttccagaacctgagcgtgatcggcttcagaatcctgctgctgaaagtggccggctttaacctgctgatgaccctgcggctgtggtccagcagggccaagcgatctggatctggagcaacaaacttctcactactcaaacaagcaggtgacgtggaggagaatcccgggcctactagtatggactggatttggcgcatccttttccttgtcggcgctgctaccggcgcgcattccttcgaagaagttcagctgcttgaatcaggcggcggactggttcaacctggcggatctctgagactgagctgtgccgccagcggctacagcatcacaagcgactatgcctggaactgggtccgacaggcccctggcaaaggactggaatgggtgtcctacatcagcaacagcggcagcaccagctacaaccccagcctgaagtcccggttcaccatcagcagagacaacagcaagaacaccctgtacctccagatgaacagcctgagagctgaggacaccgccgtgtattattgcgccaaagagcggaactacgactacgacgattactactacgctatggactactggggccagggaaccctggtcacagtctcttctacgcgtatccagaaccctgatcctgccgtgtaccagctgcgggatagcaagagcagcgacaagagcgtgtgtctgttcaccgacttcgacagccagaccaacgtgtcccagagcaaggactccgacgtgtacatcaccgataagtgcgtgctggacatgcggagcatggacttcaagagcaactccgccgtggcctggtccaacaagtccgatttcgcctgcgccaacgccttcaacaacagcattatccccgaggacacattcttcccaagccccgagagcagctgcggctttaccagcgagagctaccagcagggcgtgctgagcgccaccatcctgtacgagatcctgctgggcaaggccaccctgtacgccgtgctggtgtctgccctggtgctgatggctatggtcaagcggaaggacagccgggga

SEQ ID NO: 4414 - DNA, 2283 bp, synthetic construct
  source 1..2283: mol_type = other DNA
atggccttaccagtgaccgccttgctcctgccgctggccttgctgctccacgccgccaggccggaagtgcagctggttgaatctggcggaggactggttcagcctggcggatctctgagactgtcttgtgccgccagcggcttcagcttcagcgacttttggatgagctgggtccgacaggcccctggcaaaggacttgaatgggtcgccacaatcagccaggccggcagcgagaaggactacgtggactctgtgaagggcagattcaccatcagccgggacaacgccaagaagtccctgtacctccagatgaacagcctgagagccgaggacaccgccgtgtactattgtgcctctggcgtgtacagcttcgactacagaggccagggcaccctggtcacagtctcttctggtaccggcggaggcggatctggcggcggaggtagcggtggcggaggatctgaattcgacgtggtcatgacacagagccctctgagcctgcctgtgacacttggacagcctgccagcatcagctgtagaagcagccagagcctgctgcacagcagcggcaatacctacctggaatggtatcagcagaggcccggacagagccccagacctctgatctacaagatcagcacccggttcagcggcgtgcccgatagattttctggctctggcagcggcaccgacttcaccctgaagattagcagagtggaagccgaggacgtgggcgtgtactactgcttccaaggcagccacgtgccatacacctttggcggcggaacaaaggtggaaatcaagagactcgaggacctgaagaacgtgttcccacctgaggtggccgtgttcgagcctagcgaggccgagatcagccacacccagaaagccaccctcgtgtgcctggctaccggcttctaccccgaccatgtggaactgtcttggtgggtcaacggcaaagaggtgcacagcggcgtgtgtaccgacccccagccactgaaagaacagcccgccctgaacgacagccggtactgcctgagcagcagactgagagtgtccgccaccttctggcagaacccccggaaccacttcagatgccaggtgcagttctacggcctgagcgagaacgacgagtggacccaggacagagccaagcccgtgacccagatcgtgtctgccgaagcctggggcagagccgattgcgacgtgaagctggtggaaaagagcttcgagacagacaccaacctgaacttccagaacctgagcgtgatcggcttcagaatcctgctgctgaaagtggccggctttaacctgctgatgaccctgcggctgtggtccagcagggccaagcgatctggatctggagcaacaaacttctcactactcaaacaagcaggtgacgtggaggagaatcccgggcctactagtatggactggatttggcgcatccttttccttgtcggcgctgctaccggcgcgcattccttcgaacaagttcagctggttcagagcggagccgaagtgaagaaacctggggcctctgtgaaggtgtcctgcaaagcctctggcctgaccatcgaggactactacatgcactgggtccgacaggcccctggacaaggacttgaatggatgggctggatcgaccccgagaacggcgatacagagtacggccctaagttccagggcagagtgaccatgaccagagacaccagcatcaacaccgcctacatggaactgagccggctgagatccgatgacaccgccgtgtactattgcgccgtgcacaatgcccactacggcacttggtttgcctattggggccagggcacactggtcaccgttagctctacgcgtatccagaaccctgatcctgccgtgtaccagctgcgggatagcaagagcagcgacaagagcgtgtgtctgttcaccgacttcgacagccagaccaacgtgtcccagagcaaggactccgacgtgtacatcaccgataagtgcgtgctggacatgcggagcatggacttcaagagcaactccgccgtggcctggtccaacaagtccgatttcgcctgcgccaacgccttcaacaacagcattatccccgaggacacattcttcccaagccccgagagcagctgcggctttaccagcgagagctaccagcagggcgtgctgagcgccaccatcctgtacgagatcctgctgggcaaggccaccctgtacgccgtgctggtgtctgccctggtgctgatggctatggtcaagcggaaggacagccgggga

SEQ ID NO: 4415 - DNA, 2259 bp, synthetic construct
  source 1..2259: mol_type = other DNA
atggccttaccagtgaccgccttgctcctgccgctggccttgctgctccacgccgccaggccggaagtgcagctggttgaatctggcggaggactggttcagcctggcggatctctgagactgtcttgtgccgccagcggcttcagcttcagcgacttttggatgagctgggtccgacaggcccctggcaaaggacttgaatgggtcgccacaatcagccaggccggcagcgagaaggactacgtggactctgtgaagggcagattcaccatcagccgggacaacgccaagaagtccctgtacctccagatgaacagcctgagagccgaggacaccgccgtgtactattgtgcctctggcgtgtacagcttcgactacagaggccagggcaccctggtcacagtctcttctggtaccggcggaggcggatctggcggcggaggtagcggtggcggaggatctgaattcgacatccagatgacacagagccctagcagcctgtctgccagcgtgggagacagagtgaccatcacctgtagagccagcgagaacatctacagcaacctggcctggtatcagcagaagcctggcaaggcccctaagctgctgatctacgccgccaccaatctggctgatggcgtgccaagcagattttccggctctggcagcggcaccgatttcaccctgacaatatccagcctccagcctgaggacttcgccacctactactgccagcacttttggggcacccctacattcggccagggcaccaaggtggaaatcaagagaacagttctcgaggacctgaagaacgtgttcccacctgaggtggccgtgttcgagcctagcgaggccgagatcagccacacccagaaagccaccctcgtgtgcctggctaccggcttctaccccgaccatgtggaactgtcttggtgggtcaacggcaaagaggtgcacagcggcgtgtgtaccgacccccagccactgaaagaacagcccgccctgaacgacagccggtactgcctgagcagcagactgagagtgtccgccaccttctggcagaacccccggaaccacttcagatgccaggtgcagttctacggcctgagcgagaacgacgagtggacccaggacagagccaagcccgtgacccagatcgtgtctgccgaagcctggggcagagccgattgcgacgtgaagctggtggaaaagagcttcgagacagacaccaacctgaacttccagaacctgagcgtgatcggcttcagaatcctgctgctgaaagtggccggctttaacctgctgatgaccctgcggctgtggtccagcagggccaagcgatctggatctggagcaacaaacttctcactactcaaacaagcaggtgacgtggaggagaatcccgggcctactagtatggactggatttggcgcatccttttccttgtcggcgctgctaccggcgcgcattccttcgaagaagtgcagctggttgaatcaggtggcggcctggttcaacctggcggatctctgagactgagctgtgccgcctctggcttcagcctgacaaattacggcgtgcactgggtccgacaggcccctggaaaaggactggaatgggtgtccgtgatttggagcggcggcagcaccgattacaacgccgccttcatcagccggttcaccatcagcgccgacaccagcaagaataccgcctacctccagatgaactccctgagagccgaggacaccgccgtgtactattgcgccagagaactgatccacgctatggacaactggggccagggaaccctggtcacagtctcttctacgcgtatccagaaccctgatcctgccgtgtaccagctgcgggatagcaagagcagcgacaagagcgtgtgtctgttcaccgacttcgacagccagaccaacgtgtcccagagcaaggactccgacgtgtacatcaccgataagtgcgtgctggacatgcggagcatggacttcaagagcaactccgccgtggcctggtccaacaagtccgatttcgcctgcgccaacgccttcaacaacagcattatccccgaggacacattcttcccaagccccgagagcagctgcggctttaccagcgagagctaccagcagggcgtgctgagcgccaccatcctgtacgagatcctgctgggcaaggccaccctgtacgccgtgctggtgtctgccctggtgctgatggctatggtcaagcggaaggacagccgggga

SEQ ID NO: 4416 - DNA, 2280 bp, synthetic construct
  source 1..2280: mol_type = other DNA
atggccttaccagtgaccgccttgctcctgccgctggccttgctgctccacgccgccaggccggaagtgcagctggttgaatctggcggaggactggttcagcctggcggatctctgagactgtcttgtgccgccagcggcttcagcttcagcgacttttggatgagctgggtccgacaggcccctggcaaaggacttgaatgggtcgccacaatcagccaggccggcagcgagaaggactacgtggactctgtgaagggcagattcaccatcagccgggacaacgccaagaagtccctgtacctccagatgaacagcctgagagccgaggacaccgccgtgtactattgtgcctctggcgtgtacagcttcgactacagaggccagggcaccctggtcacagtctcttctggtaccggcggaggcggatctggcggcggaggtagcggtggcggaggatctgaattcgacttcgtgatgacacagagccctctgagcctgcctgtgacacctggcgaacctgccagcatcagctgtagaagcagccagagcatcgtgcacagcaacggcaacacctacctggaatggtatctccagaagcctggacagagcccacagctgctgatctacaaggtgtccaacagattcagcggcgtgcccgacagattttctggcagcggctctggcaccgacttcaccctgaagattagcagagtggaagccgaggacgtgggcgtgtactactgcttccaaggctctcacgtgcccctgacctttggacagggcaccaagctggaaatcaagagactcgaggacctgaagaacgtgttcccacctgaggtggccgtgttcgagcctagcgaggccgagatcagccacacccagaaagccaccctcgtgtgcctggctaccggcttctaccccgaccatgtggaactgtcttggtgggtcaacggcaaagaggtgcacagcggcgtgtgtaccgacccccagccactgaaagaacagcccgccctgaacgacagccggtactgcctgagcagcagactgagagtgtccgccaccttctggcagaacccccggaaccacttcagatgccaggtgcagttctacggcctgagcgagaacgacgagtggacccaggacagagccaagcccgtgacccagatcgtgtctgccgaagcctggggcagagccgattgcgacgtgaagctggtggaaaagagcttcgagacagacaccaacctgaacttccagaacctgagcgtgatcggcttcagaatcctgctgctgaaagtggccggctttaacctgctgatgaccctgcggctgtggtccagcagggccaagcgatctggatctggagcaacaaacttctcactactcaaacaagcaggtgacgtggaggagaatcccgggcctactagtatggactggatttggcgcatccttttccttgtcggcgctgctaccggcgcgcattccttcgaagaagtgcagctggttgaaagcggagccgaagtgaagaaacctggggcctctgtgaaggtgtcctgcaaggccagcggctacacctttaccagctactggattcactgggtccgacaggcccctggacaaggacttgagtggatgggcgagaacgacccctccaacggcaggaccaactacaacgagaagttcaagaaccgcgtgaccctgaccgtggacaccagcatctctaccgcctacatggaactgagccggctgagatccgatgacaccgccgtgtactattgcgccagaggacccaactacttttacagcatggactactggggccagggcacaatggtcaccgttagctctacgcgtatccagaaccctgatcctgccgtgtaccagctgcgggatagcaagagcagcgacaagagcgtgtgtctgttcaccgacttcgacagccagaccaacgtgtcccagagcaaggactccgacgtgtacatcaccgataagtgcgtgctggacatgcggagcatggacttcaagagcaactccgccgtggcctggtccaacaagtccgatttcgcctgcgccaacgccttcaacaacagcattatccccgaggacacattcttcccaagccccgagagcagctgcggctttaccagcgagagctaccagcagggcgtgctgagcgccaccatcctgtacgagatcctgctgggcaaggccaccctgtacgccgtgctggtgtctgccctggtgctgatggctatggtcaagcggaaggacagccgggga

SEQ ID NO: 4417 - DNA, 2259 bp, synthetic construct
  source 1..2259: mol_type = other DNA
atggccttaccagtgaccgccttgctcctgccgctggccttgctgctccacgccgccaggccggaagtgcagctggttgaatctggcggaggactggttcagcctggcggatctctgagactgtcttgtgccgccagcggcttcagcttcagcgacttttggatgagctgggtccgacaggcccctggcaaaggacttgaatgggtcgccacaatcagccaggccggcagcgagaaggactacgtggactctgtgaagggcagattcaccatcagccgggacaacgccaagaagtccctgtacctccagatgaacagcctgagagccgaggacaccgccgtgtactattgtgcctctggcgtgtacagcttcgactacagaggccagggcaccctggtcacagtctcttctggtaccggcggaggcggatctggcggcggaggtagcggtggcggaggatctgaattcgacatccagctgactcagagccctagctttctgagcgccagcgtgggcgacagagtgaccatcacatgtagcgccagatccagcatcagcttcatgtactggtatcagcagaagcccggcaaggcccctaagctgctgatctacgacaccagcaatctggcctctggcgtgcccagcagattttctggaagcggcagcggcaccgagttcaccctgacaatctctagcctggaagccgaggatgccgccacctactattgccagcagtggtccagctatcccctgacatttggacagggcaccaagctggaaatcaaactcgaggacctgaagaacgtgttcccacctgaggtggccgtgttcgagcctagcgaggccgagatcagccacacccagaaagccaccctcgtgtgcctggctaccggcttctaccccgaccatgtggaactgtcttggtgggtcaacggcaaagaggtgcacagcggcgtgtgtaccgacccccagccactgaaagaacagcccgccctgaacgacagccggtactgcctgagcagcagactgagagtgtccgccaccttctggcagaacccccggaaccacttcagatgccaggtgcagttctacggcctgagcgagaacgacgagtggacccaggacagagccaagcccgtgacccagatcgtgtctgccgaagcctggggcagagccgattgcgacgtgaagctggtggaaaagagcttcgagacagacaccaacctgaacttccagaacctgagcgtgatcggcttcagaatcctgctgctgaaagtggccggctttaacctgctgatgaccctgcggctgtggtccagcagggccaagcgatctggatctggagcaacaaacttctcactactcaaacaagcaggtgacgtggaggagaatcccgggcctactagtatggactggatttggcgcatccttttccttgtcggcgctgctaccggcgcgcattccttcgaacaggttcagctggttcagtctggggccgaagtgaagaaacctggggcctctgtgaaggtgtcctgcaaggcttccggctacacctttaccggctcttggatgaactgggtccgacaggctcctggacagggactcgaatggatcggcagaatctatcctggcgacggcgagacaaactacaacggcaagttcaaggaccgcgtgacaatcaccgccgacaagagcacaagcaccgcctacatggaactgagcagcctgcggagcgaagataccgccgtgtactactgcgcccggatctacggcaacaacgtgtacttcgatgtgtggggccagggcacaaccgtgacagtctcttctacgcgtatccagaaccctgatcctgccgtgtaccagctgcgggatagcaagagcagcgacaagagcgtgtgtctgttcaccgacttcgacagccagaccaacgtgtcccagagcaaggactccgacgtgtacatcaccgataagtgcgtgctggacatgcggagcatggacttcaagagcaactccgccgtggcctggtccaacaagtccgatttcgcctgcgccaacgccttcaacaacagcattatccccgaggacacattcttcccaagccccgagagcagctgcggctttaccagcgagagctaccagcagggcgtgctgagcgccaccatcctgtacgagatcctgctgggcaaggccaccctgtacgccgtgctggtgtctgccctggtgctgatggctatggtcaagcggaaggacagccgggga

SEQ ID NO: 4418 - DNA, 2283 bp, synthetic construct
  source 1..2283: mol_type = other DNA
atggccttaccagtgaccgccttgctcctgccgctggccttgctgctccacgccgccaggccggaagtgcagctggttgaatctggcggaggactggttcagcctggcggatctctgagactgtcttgtgccgccagcggcttcagcttcagcgacttttggatgagctgggtccgacaggcccctggcaaaggacttgaatgggtcgccacaatcagccaggccggcagcgagaaggactacgtggactctgtgaagggcagattcaccatcagccgggacaacgccaagaagtccctgtacctccagatgaacagcctgagagccgaggacaccgccgtgtactattgtgcctctggcgtgtacagcttcgactacagaggccagggcaccctggtcacagtctcttctggtaccggcggaggcggatctggcggcggaggtagcggtggcggaggatctgaattccagctggtgctgacacagtctccaagcgcctctgccagcctgggatctagcgtgaagctgacctgtacactgagcagcggccacaagaccgacaccatcgactggtatcagcagcagcctggcaaggcccctagatacctgatgaagctggaaggcagcggcagctacaacaaaggctctggcgtgcccgatagattcagcggcagttcttctggcgctgattggtatctgaccatcagcagcctccagagcgaggacgaggccgattactactgcggcacagactaccccggcaactacctgtttggcggcggaacacagctgacagtgcttggcctcgaggacctgaagaacgtgttcccacctgaggtggccgtgttcgagcctagcgaggccgagatcagccacacccagaaagccaccctcgtgtgcctggctaccggcttctaccccgaccatgtggaactgtcttggtgggtcaacggcaaagaggtgcacagcggcgtgtgtaccgacccccagccactgaaagaacagcccgccctgaacgacagccggtactgcctgagcagcagactgagagtgtccgccaccttctggcagaacccccggaaccacttcagatgccaggtgcagttctacggcctgagcgagaacgacgagtggacccaggacagagccaagcccgtgacccagatcgtgtctgccgaagcctggggcagagccgattgcgacgtgaagctggtggaaaagagcttcgagacagacaccaacctgaacttccagaacctgagcgtgatcggcttcagaatcctgctgctgaaagtggccggctttaacctgctgatgaccctgcggctgtggtccagcagggccaagcgatctggatctggagcaacaaacttctcactactcaaacaagcaggtgacgtggaggagaatcccgggcctactagtatggactggatttggcgcatccttttccttgtcggcgctgctaccggcgcgcattccttcgaacaagaacagctggttgaaagcggcggaggactggttcaacctggcggttctctgagactgagctgtgccgccagcggcttcaccttcagcgactactacatgagctggatcagacaggccccaggcaaaggactggaatgggtcgccacaatctaccccagcagcggcaagacctactacgccgattctgccaagggcagactgaccatctccagcgacaacgccaaggacagcctgtacctccagatgaacagcctgagagccgaggacaccgccgtgtactactgcaccagagatagctacgccgacgacgccgctctgtttgacatttggggccagggcaccaccgtgaccgtttcttctacgcgtatccagaaccctgatcctgccgtgtaccagctgcgggatagcaagagcagcgacaagagcgtgtgtctgttcaccgacttcgacagccagaccaacgtgtcccagagcaaggactccgacgtgtacatcaccgataagtgcgtgctggacatgcggagcatggacttcaagagcaactccgccgtggcctggtccaacaagtccgatttcgcctgcgccaacgccttcaacaacagcattatccccgaggacacattcttcccaagccccgagagcagctgcggctttaccagcgagagctaccagcagggcgtgctgagcgccaccatcctgtacgagatcctgctgggcaaggccaccctgtacgccgtgctggtgtctgccctggtgctgatggctatggtcaagcggaaggacagccgggga

SEQ ID NO: 4419 - DNA, 2259 bp, synthetic construct; identical to SEQ ID NO: 4415
  source 1..2259: mol_type = other DNA

SEQ ID NO: 4420 - DNA, 2280 bp, synthetic construct; identical to SEQ ID NO: 4416
  source 1..2280: mol_type = other DNA

SEQ ID NO: 4421 - DNA, 2259 bp, synthetic construct; identical to SEQ ID NO: 4417
  source 1..2259: mol_type = other DNA

SEQ ID NO: 4422 - DNA, 2283 bp, synthetic construct; identical to SEQ ID NO: 4418
  source 1..2283: mol_type = other DNA

SEQ ID NO: 4423 - DNA, 2280 bp, synthetic construct
  source 1..2280: mol_type = other DNA
atggccttaccagtgaccgccttgctcctgccgctggccttgctgctccacgccgccaggccggaagtgcagctggttgaatctggcggaggactggttcagcctggcggatctctgagactgtcttgtgccgccagcggcttcagcttcagcgacttttggatgagctgggtccgacaggcccctggcaaaggacttgaatgggtcgccacaatcagccaggccggcagcgagaaggactacgtggactctgtgaagggcagattcaccatcagccgggacaacgccaagaagtccctgtacctccagatgaacagcctgagagccgaggacaccgccgtgtactattgtgcctctggcgtgtacagcttcgactacagaggccagggcaccctggtcacagtctcttctggtaccggcggaggcggatctggcggcggaggtagcggtggcggaggatctgaattcgatatccagctcactcaaagcccctctagtctctctgcctcagtgggggatcgggtcagttttacttgtcaagcttcacaggatatcaacaacttccttaattggtatcagcagaagccaggaaaagcacccaagctgctcatctatgatgcctcaaatttggagacgggtgttcccagtcgattctctgggtcagggtccgggaccgactttacgtttacgatctcctctctgcagcccgaagacatcgccacatactattgtcaacagtacggcaacttgcctttcacatttgggggcgggactaaggttgaaatcaagaggctcgaggacctgaagaacgtgttcccacctgaggtggccgtgttcgagcctagcgaggccgagatcagccacacccagaaagccaccctcgtgtgcctggctaccggcttctaccccgaccatgtggaactgtcttggtgggtcaacggcaaagaggtgcacagcggcgtgtgtaccgacccccagccactgaaagaacagcccgccctgaacgacagccggtactgcctgagcagcagactgagagtgtccgccaccttctggcagaacccccggaaccacttcagatgccaggtgcagttctacggcctgagcgagaacgacgagtggacccaggacagagccaagcccgtgacccagatcgtgtctgccgaagcctggggcagagccgattgcgacgtgaagctggtggaaaagagcttcgagacagacaccaacctgaacttccagaacctgagcgtgatcggcttcagaatcctgctgctgaaagtggccggctttaacctgctgatgaccctgcggctgtggtccagcagggccaagcgatctggatctggagcaacaaacttctcactactcaaacaagcaggtgacgtggaggagaatcccgggcctactagtatggactggatttggcgcatccttttccttgtcggcgctgctaccggcgcgcattccttcgaacaggtacagctgcaggaatctgggcccggacttgtcaagccaagtcagacactttctcttacatgtaccgtgagcggcggaagtataagcagtggaggcttttactggtcttggatacggcagcacccaggcaaaggcttggagtggattggatacattcatcattcaggatctacacactataatccatcccttaagtcccgggtcaccattagcattgatacgtctaagaatctgttcagtctcaggctgtcctccgtcactgctgccgacacagccgtgtactactgcgcctccttggtttactgcggaggcgactgttatagcggctttgattattgggggcaggggaccctcgtaaccgtgagctctacgcgtatccagaaccctgatcctgccgtgtaccagctgcgggatagcaagagcagcgacaagagcgtgtgtctgttcaccgacttcgacagccagaccaacgtgtcccagagcaaggactccgacgtgtacatcaccgataagtgcgtgctggacatgcggagcatggacttcaagagcaactccgccgtggcctggtccaacaagtccgatttcgcctgcgccaacgccttcaacaacagcattatccccgaggacacattcttcccaagccccgagagcagctgcggctttaccagcgagagctaccagcagggcgtgctgagcgccaccatcctgtacgagatcctgctgggcaaggccaccctgtacgccgtgctggtgtctgccctggtgctgatggctatggtcaagcggaaggacagccgggga

SEQ ID NO: 4424 - DNA, 2268 bp, synthetic construct
  source 1..2268: mol_type = other DNA
atggccttaccagtgaccgccttgctcctgccgctggccttgctgctccacgccgccaggccggaagtgcagctggttgaatctggcggaggactggttcagcctggcggatctctgagactgtcttgtgccgccagcggcttcagcttcagcgacttttggatgagctgggtccgacaggcccctggcaaaggacttgaatgggtcgccacaatcagccaggccggcagcgagaaggactacgtggactctgtgaagggcagattcaccatcagccgggacaacgccaagaagtccctgtacctccagatgaacagcctgagagccgaggacaccgccgtgtactattgtgcctctggcgtgtacagcttcgactacagaggccagggcaccctggtcacagtctcttctggtaccggcggaggcggatctggcggcggaggtagcggtggcggaggatctgaattcgacattcagatgacacagagccctagcagcctgagcgcctctgtgggagacagagtgaccatcacatgcaagagcagccagagcgtgctgtactccagcaatcagaagaactacctggcctggttccagcagaagcctggcaaggctcctaagctgctgatctactgggccagcaccagagaaagcggcgtgccaagcagattttctggcagcggctctggcaccgacttcaccctgacaatatccagcctccagcctgaggacttcgccacctacttttgccaccagtacctgagcagctacacattcggacagggcaccaaggtggaaatcaagcggctcgaggacctgaagaacgtgttcccacctgaggtggccgtgttcgagcctagcgaggccgagatcagccacacccagaaagccaccctcgtgtgcctggctaccggcttctaccccgaccatgtggaactgtcttggtgggtcaacggcaaagaggtgcacagcggcgtgtgtaccgacccccagccactgaaagaacagcccgccctgaacgacagccggtactgcctgagcagcagactgagagtgtccgccaccttctggcagaacccccggaaccacttcagatgccaggtgcagttctacggcctgagcgagaacgacgagtggacccaggacagagccaagcccgtgacccagatcgtgtctgccgaagcctggggcagagccgattgcgacgtgaagctggtggaaaagagcttcgagacagacaccaacctgaacttccagaacctgagcgtgatcggcttcagaatcctgctgctgaaagtggccggctttaacctgctgatgaccctgcggctgtggtccagcagggccaagcgatctggatctggagcaacaaacttctcactactcaaacaagcaggtgacgtggaggagaatcccgggcctactagtatggactggatttggcgcatccttttccttgtcggcgctgctaccggcgcgcattccttcgaagaggtgcagctggttgaatctggcggaggactggttcagcctggcggatctctgagactgtcttgtgccgccagcggctacaccttcaccacctattggatgcactgggtccgacaggcccctggcaaaggacttgagtgggtcggatatatcaggcccagcaccggctacacagagtacaaccagaagttcaaggaccgcttcaccatcagcgccgacaccagcaagaataccgcctacctccagatgaacagcctgagagccgaggacaccgccgtgtactactgtgccagatccagatggctgctggactattggggccagggcacactggttacagtttctacgcgtatccagaaccctgatcctgccgtgtaccagctgcgggatagcaagagcagcgacaagagcgtgtgtctgttcaccgacttcgacagccagaccaacgtgtcccagagcaaggactccgacgtgtacatcaccgataagtgcgtgctggacatgcggagcatggacttcaagagcaactccgccgtggcctggtccaacaagtccgatttcgcctgcgccaacgccttcaacaacagcattatccccgaggacacattcttcccaagccccgagagcagctgcggctttaccagcgagagctaccagcagggcgtgctgagcgccaccatcctgtacgagatcctgctgggcaaggccaccctgtacgccgtgctggtgtctgccctggtgctgatggctatggtcaagcggaaggacagccgggga

SEQ ID NO: 4425 - DNA, 2259 bp, synthetic construct
  source 1..2259: mol_type = other DNA
atggccttaccagtgaccgccttgctcctgccgctggccttgctgctccacgccgccaggccggaagtgcagctggttgaatctggcggaggactggttcagcctggcggatctctgagactgtcttgtgccgccagcggcttcagcttcagcgacttttggatgagctgggtccgacaggcccctggcaaaggacttgaatgggtcgccacaatcagccaggccggcagcgagaaggactacgtggactctgtgaagggcagattcaccatcagccgggacaacgccaagaagtccctgtacctccagatgaacagcctgagagccgaggacaccgccgtgtactattgtgcctctggcgtgtacagcttcgactacagaggccagggcaccctggtcacagtctcttctggtaccggcggaggcggatctggcggcggaggtagcggtggcggaggatctgaattcgacatccagatgacacagagccctagcagcctgtctgccagcgtgggagacagagtgaccatcacctgtagagccagccaggacatcagcaactacctgaactggtatcagcagaagcccggcaaggcccctaagctgctgatctactacaccagcagactgcacagcggcgtgcccagcagattttctggctctggcagcggcaccgacttcaccctgacaatatctagcctccagcctgaggacttcgccacctactattgccagcagggcaacaccctgccttacacatttggacagggcaccaaggtggaaatcaagagactcgaggacctgaagaacgtgttcccacctgaggtggccgtgttcgagcctagcgaggccgagatcagccacacccagaaagccaccctcgtgtgcctggctaccggcttctaccccgaccatgtggaactgtcttggtgggtcaacggcaaagaggtgcacagcggcgtgtgtaccgacccccagccactgaaagaacagcccgccctgaacgacagccggtactgcctgagcagcagactgagagtgtccgccaccttctggcagaacccccggaaccacttcagatgccaggtgcagttctacggcctgagcgagaacgacgagtggacccaggacagagccaagcccgtgacccagatcgtgtctgccgaagcctggggcagagccgattgcgacgtgaagctggtggaaaagagcttcgagacagacaccaacctgaacttccagaacctgagcgtgatcggcttcagaatcctgctgctgaaagtggccggctttaacctgctgatgaccctgcggctgtggtccagcagggccaagcgatctggatctggagcaacaaacttctcactactcaaacaagcaggtgacgtggaggagaatcccgggcctactagtatggactggatttggcgcatccttttccttgtcggcgctgctaccggcgcgcattccttcgaagaagtgcagctggttgaatcaggtggcggcctggttcaacctggcggatctctgagactgagctgtgccgccagcggcttcaccttcagcgactactttatgagctgggtccgacaggcccctggcaaaggacttgaatgggtcgccaccatcagcaatggcggcacctacacttactaccccgacagcgtgaagggcagattcaccatctccagagacaacagcaagaacaccctgtacctccagatgaactccctgagagccgaggacaccgccgtgtactactgcgccagattcgacggctacatcttcgactattggggccagggcaccctggtcacagtctcttctacgcgtatccagaaccctgatcctgccgtgtaccagctgcgggatagcaagagcagcgacaagagcgtgtgtctgttcaccgacttcgacagccagaccaacgtgtcccagagcaaggactccgacgtgtacatcaccgataagtgcgtgctggacatgcggagcatggacttcaagagcaactccgccgtggcctggtccaacaagtccgatttcgcctgcgccaacgccttcaacaacagcattatccccgaggacacattcttcccaagccccgagagcagctgcggctttaccagcgagagctaccagcagggcgtgctgagcgccaccatcctgtacgagatcctgctgggcaaggccaccctgtacgccgtgctggtgtctgccctggtgctgatggctatggtcaagcggaaggacagccgggga

SEQ ID NO: 4426 - DNA, 2274 bp, synthetic construct
  source 1..2274: mol_type = other DNA
atggccttaccagtgaccgccttgctcctgccgctggccttgctgctccacgccgccaggccggaagtgcagctggttgaatctggcggaggactggttcagcctggcggatctctgagactgtcttgtgccgccagcggcttcagcttcagcgacttttggatgagctgggtccgacaggcccctggcaaaggacttgaatgggtcgccacaatcagccaggccggcagcgagaaggactacgtggactctgtgaagggcagattcaccatcagccgggacaacgccaagaagtccctgtacctccagatgaacagcctgagagccgaggacaccgccgtgtactattgtgcctctggcgtgtacagcttcgactacagaggccagggcaccctggtcacagtctcttctggtaccggcggaggcggatctggcggcggaggtagcggtggcggaggatctgaattcgacatccagatgacacagactacatcctccctgtctgcctctctgggagacagagtcaccatcagttgcagggcaagtcaggacattagtaagtacctgaactggtatcagcagaaaccagatggaactgttaaactcctgatctaccatacatcaagattacactcaggagtcccatcaaggttcagtggcagtgggtctggaacagattattctctcaccattagcaacctggagcaagaagatattgccacttacttttgccaacagggtaatacgcttccgtacacgttcggaggggggaccaagctggagatcacactcgagatccagaaccctgatcctgccgtgtaccagctgcgggatagcaagagcagcgacaagagcgtgtgtctgttcaccgacttcgacagccagaccaacgtgtcccagagcaaggactccgacgtgtacatcaccgataagtgcgtgctggacatgcggagcatggacttcaagagcaactccgccgtggcctggtccaacaagtccgatttcgcctgcgccaacgccttcaacaacagcattatccccgaggacacattcttcccaagccccgagagcagctgcggctttaccagcgagagctaccagcagggcgtgctgagcgccaccatcctgtacgagatcctgctgggcaaggccaccctgtacgccgtgctggtgtctgccctggtgctgatggctatggtcaagcggaaggacagccggggacgcgccaagagaagcggatctggcgtgaagcagaccctgaatttcgacctgctgaagctggctggcgacgtggaatccaacccaggccctactagtatggactggatttggcgcatccttttccttgtcggcgctgctaccggcgcgcattccttcgaagtgaaactgcaggagtcaggacctggcctggtggcgccctcacagagcctgtccgtcacatgcactgtctcaggggtctcattacccgactatggtgtaagctggattcgccagcctccacgaaagggtctggagtggctgggagtaatatggggtagtgaaaccacatactataattcagctctcaaatccagactgaccatcatcaaggacaactccaagagccaagttttcttaaaaatgaacagtctgcaaactgatgacacagccatttactactgtgccaaacattattactacggtggtagctatgctatggactactggggccaaggaacctcagtcaccgtctcctcaacgcgtgaggacctgaagaacgtgttcccacctgaggtggccgtgttcgagcctagcgaggccgagatcagccacacccagaaagccaccctcgtgtgcctggctaccggcttctaccccgaccatgtggaactgtcttggtgggtcaacggcaaagaggtgcacagcggcgtgtgtaccgacccccagccactgaaagaacagcccgccctgaacgacagccggtactgcctgagcagcagactgagagtgtccgccaccttctggcagaacccccggaaccacttcagatgccaggtgcagttctacggcctgagcgagaacgacgagtggacccaggacagagccaagcccgtgacccagatcgtgtctgccgaagcctggggcagagccgattgcgacgtgaagctggtggaaaagagcttcgagacagacaccaacctgaacttccagaacctgagcgtgatcggcttcagaatcctgctgctgaaagtggccggctttaacctgctgatgaccctgcggctgtggtccagc

SEQ ID NO: 4427 - DNA, 2277 bp, synthetic construct
  source 1..2277: mol_type = other DNA
atggccttaccagtgaccgccttgctcctgccgctggccttgctgctccacgccgccaggccggaagtgcagctggttgaatctggcggaggactggttcagcctggcggatctctgagactgtcttgtgccgccagcggcttcagcttcagcgacttttggatgagctgggtccgacaggcccctggcaaaggacttgaatgggtcgccacaatcagccaggccggcagcgagaaggactacgtggactctgtgaagggcagattcaccatcagccgggacaacgccaagaagtccctgtacctccagatgaacagcctgagagccgaggacaccgccgtgtactattgtgcctctggcgtgtacagcttcgactacagaggccagggcaccctggtcacagtctcttctggtaccggcggaggcggatctggcggcggaggtagcggtggcggaggatctgaattcgagatcgtgatgacccagagccctgccaccctgtctctgagccctggcgaaagagccaccctgagctgtagagccagccaggacatcagcaagtacctgaactggtatcagcagaagcccggccaggcccccagactgctgatctaccacaccagcagactgcacagcggcatccccgccagattttctggctctggcagcggcaccgactacaccctgacaatcagcagcctccagcccgaggacttcgccgtgtacttctgtcagcaaggcaacaccctgccctacaccttcggccagggcaccaagctggaaatcaagctcgagatccagaaccctgatcctgccgtgtaccagctgcgggatagcaagagcagcgacaagagcgtgtgtctgttcaccgacttcgacagccagaccaacgtgtcccagagcaaggactccgacgtgtacatcaccgataagtgcgtgctggacatgcggagcatggacttcaagagcaactccgccgtggcctggtccaacaagtccgatttcgcctgcgccaacgccttcaacaacagcattatccccgaggacacattcttcccaagccccgagagcagctgcggctttaccagcgagagctaccagcagggcgtgctgagcgccaccatcctgtacgagatcctgctgggcaaggccaccctgtacgccgtgctggtgtctgccctggtgctgatggctatggtcaagcggaaggacagccggggacgcgccaagagaagcggatctggcgtgaagcagaccctgaatttcgacctgctgaagctggctggcgacgtggaatccaacccaggccctactagtatggactggatttggcgcatccttttccttgtcggcgctgctaccggcgcgcattccttcgaacaggtgcaactccaggaatctggccctggcctcgtgaagcccagcgagacactgagcctgacctgtaccgtgtccggcgtgtccctgcctgactatggcgtgtcctggatcagacagccccctggcaagggcctggaatggatcggagtgatttggggcagcgaaaccacctactacaacagctccctgaagtccagagtgaccatctccaaggacaactccaagaaccaggtgtccctgaagctgagcagcgtgacagccgccgacaccgccgtgtattactgcgccaagcactactactacggcggcagctacgctatggactactggggccagggaaccctcgtgaccgtgtctagtacgcgtgaggacctgaagaacgtgttcccacctgaggtggccgtgttcgagcctagcgaggccgagatcagccacacccagaaagccaccctcgtgtgcctggctaccggcttctaccccgaccatgtggaactgtcttggtgggtcaacggcaaagaggtgcacagcggcgtgtgtaccgacccccagccactgaaagaacagcccgccctgaacgacagccggtactgcctgagcagcagactgagagtgtccgccaccttctggcagaacccccggaaccacttcagatgccaggtgcagttctacggcctgagcgagaacgacgagtggacccaggacagagccaagcccgtgacccagatcgtgtctgccgaagcctggggcagagccgattgcgacgtgaagctggtggaaaagagcttcgagacagacaccaacctgaacttccagaacctgagcgtgatcggcttcagaatcctgctgctgaaagtggccggctttaacctgctgatgaccctgcggctgtggtccagc

SEQ ID NO: 4428 - DNA, 2280 bp, synthetic construct
  source 1..2280: mol_type = other DNA
atggccttaccagtgaccgccttgctcctgccgctggccttgctgctccacgccgccaggccggaagtgcagctggttgaatctggcggaggactggttcagcctggcggatctctgagactgtcttgtgccgccagcggcttcagcttcagcgacttttggatgagctgggtccgacaggcccctggcaaaggacttgaatgggtcgccacaatcagccaggccggcagcgagaaggactacgtggactctgtgaagggcagattcaccatcagccgggacaacgccaagaagtccctgtacctccagatgaacagcctgagagccgaggacaccgccgtgtactattgtgcctctggcgtgtacagcttcgactacagaggccagggcaccctggtcacagtctcttctggtaccggcggaggcggatctggcggcggaggtagcggtggcggaggatctgaattcgacgagatcgtgctgacacagagccccgccaccctgtcactgtctccaggcgaaagagccaccctgagctgtagcgccagcagcagcgtgtcctacatgcactggtatcagcagaagcccggccaggcccccagactgctgatctacgataccagcaagctggcctccggcatccccgccagattttctggcagcggctccggcaccgacttcaccctgacaatcagcagcctggaacccgaggacgtggccgtgtactactgttttcaaggcagcgtgtaccccttcaccttcggccagggcaccaagctggaaatcaagagactcgagatccagaaccctgatcctgccgtgtaccagctgcgggatagcaagagcagcgacaagagcgtgtgtctgttcaccgacttcgacagccagaccaacgtgtcccagagcaaggactccgacgtgtacatcaccgataagtgcgtgctggacatgcggagcatggacttcaagagcaactccgccgtggcctggtccaacaagtccgatttcgcctgcgccaacgccttcaacaacagcattatccccgaggacacattcttcccaagccccgagagcagctgcggctttaccagcgagagctaccagcagggcgtgctgagcgccaccatcctgtacgagatcctgctgggcaaggccaccctgtacgccgtgctggtgtctgccctggtgctgatggctatggtcaagcggaaggacagccggggacgcgccaagagaagcggatctggcgtgaagcagaccctgaatttcgacctgctgaagctggctggcgacgtggaatccaacccaggccctactagtatggactggatttggcgcatccttttccttgtcggcgctgctaccggcgcgcattccttcgaacaggtgcagctccaggaatctggccctggcctcgtgaagcctagccagaccctgagcctgacctgtaccgtgtctggcggcagcatcagcacaagcggcatgggcgtgggctggatcagacagcaccctggcaagggcctggaatggatcggccacatttggtgggacgacgacaagcggtacaaccccgccctgaagtccagagtgaccatcagcgtggacaccagcaagaaccagttcagcctgaagctgagcagcgtgacagccgccgataccgccgtgtattattgcgcccggatggaactgtggtcctactacttcgactactggggccagggaaccctcgtgaccgtgtctagtacgcgtgaggacctgaagaacgtgttcccacctgaggtggccgtgttcgagcctagcgaggccgagatcagccacacccagaaagccaccctcgtgtgcctggctaccggcttctaccccgaccatgtggaactgtcttggtgggtcaacggcaaagaggtgcacagcggcgtgtgtaccgacccccagccactgaaagaacagcccgccctgaacgacagccggtactgcctgagcagcagactgagagtgtccgccaccttctggcagaacccccggaaccacttcagatgccaggtgcagttctacggcctgagcgagaacgacgagtggacccaggacagagccaagcccgtgacccagatcgtgtctgccgaagcctggggcagagccgattgcgacgtgaagctggtggaaaagagcttcgagacagacaccaacctgaacttccagaacctgagcgtgatcggcttcagaatcctgctgctgaaagtggccggctttaacctgctgatgaccctgcggctgtggtccagc

SEQ ID NO: 4429 - DNA, 2274 bp, synthetic construct
  source 1..2274: mol_type = other DNA
atggccttaccagtgaccgccttgctcctgccgctggccttgctgctccacgccgccaggccggaagtgcagctggttgaatctggcggaggactggttcagcctggcggatctctgagactgtcttgtgccgccagcggcttcagcttcagcgacttttggatgagctgggtccgacaggcccctggcaaaggacttgaatgggtcgccacaatcagccaggccggcagcgagaaggactacgtggactctgtgaagggcagattcaccatcagccgggacaacgccaagaagtccctgtacctccagatgaacagcctgagagccgaggacaccgccgtgtactattgtgcctctggcgtgtacagcttcgactacagaggccagggcaccctggtcacagtctcttctggtaccggcggaggcggatctggcggcggaggtagcggtggcggaggatctgaattcgactacatccacgtgacacagagccctagcagcctgtccgtgtccatcggcgatagagtgaccatcaactgccagacctctcaaggcgtgggcagcgacctgcactggtatcagcacaaacctggcagagcccctaagctgctgatccaccatgccagctctgtggaagatggcgtgcccagcagattttccggcaccggatttcacaccagcttcaacctgacaatcaacgacctccaggccgacgacatcggcacctactactgtcaagtgctccagagcttcggcagaggcagcagactggatacaaaactcgagatccagaaccctgatcctgccgtgtaccagctgcgggatagcaagagcagcgacaagagcgtgtgtctgttcaccgacttcgacagccagaccaacgtgtcccagagcaaggactccgacgtgtacatcaccgataagtgcgtgctggacatgcggagcatggacttcaagagcaactccgccgtggcctggtccaacaagtccgatttcgcctgcgccaacgccttcaacaacagcattatccccgaggacacattcttcccaagccccgagagcagctgcggctttaccagcgagagctaccagcagggcgtgctgagcgccaccatcctgtacgagatcctgctgggcaaggccaccctgtacgccgtgctggtgtctgccctggtgctgatggctatggtcaagcggaaggacagccggggacgcgccaagagaagcggatctggcgtgaagcagaccctgaatttcgacctgctgaagctggctggcgacgtggaatccaacccaggccctactagtatggactggatttggcgcatccttttccttgtcggcgctgctaccggcgcgcattccttcgaaagggcacacctggtgcagtctggcaccgccatgaagaaacctggcgcttccgtcagagtgtcctgtcagacaagcggctacaccttcacagcccacatcctgttctggttcagacaggccccaggcagaggactggaatgggtcggatggatcaagccccagtacggggccgtgaatttcggcggaggcttcagagacagagtgaccctgaccagggacgtgtaccgggaaatcgcctacatggacatccggggcctgaagcctgatgacaccgccgtgtactactgcgccagggatagaagctacggcgacagctcttgggctctcgatgcttggggacagggcacaacagtggtggtgtctgctacgcgtgaggacctgaagaacgtgttcccacctgaggtggccgtgttcgagcctagcgaggccgagatcagccacacccagaaagccaccctcgtgtgcctggctaccggcttctaccccgaccatgtggaactgtcttggtgggtcaacggcaaagaggtgcacagcggcgtgtgtaccgacccccagccactgaaagaacagcccgccctgaacgacagccggtactgcctgagcagcagactgagagtgtccgccaccttctggcagaacccccggaaccacttcagatgccaggtgcagttctacggcctgagcgagaacgacgagtggacccaggacagagccaagcccgtgacccagatcgtgtctgccgaagcctggggcagagccgattgcgacgtgaagctggtggaaaagagcttcgagacagacaccaacctgaacttccagaacctgagcgtgatcggcttcagaatcctgctgctgaaagtggccggctttaacctgctgatgaccctgcggctgtggtccagc

SEQ ID NO: 4430 - DNA, 2304 bp, synthetic construct
  source 1..2304: mol_type = other DNA
atggccttaccagtgaccgccttgctcctgccgctggccttgctgctccacgccgccaggccggaagtgcagctggttgaatctggcggaggactggttcagcctggcggatctctgagactgtcttgtgccgccagcggcttcagcttcagcgacttttggatgagctgggtccgacaggcccctggcaaaggacttgaatgggtcgccacaatcagccaggccggcagcgagaaggactacgtggactctgtgaagggcagattcaccatcagccgggacaacgccaagaagtccctgtacctccagatgaacagcctgagagccgaggacaccgccgtgtactattgtgcctctggcgtgtacagcttcgactacagaggccagggcaccctggtcacagtctcttctggtaccggcggaggcggatctggcggcggaggtagcggtggcggaggatctgaattcgacgtgcagatgatccagacccccgatagcctggccgtgtccctgggacagagagccaccatctcttgcagagccagcgagagcgtggacaactacggcatcagcttcatgcactggtatcagcagaagcccggccagagccccaagctgctgatctacagagcctccaacctggaaagcggcatccccgccagattttccggcagcggcagcagaaccgacttcaccctgaccatcaaccccgtggaaaccgacgacgtggcaacctactactgccagcagaacaacaaggacccccccacctttggcggaggcaccaagctggaaatcaagctcgagatccagaaccctgatcctgccgtgtaccagctgcgggatagcaagagcagcgacaagagcgtgtgtctgttcaccgacttcgacagccagaccaacgtgtcccagagcaaggactccgacgtgtacatcaccgataagtgcgtgctggacatgcggagcatggacttcaagagcaactccgccgtggcctggtccaacaagtccgatttcgcctgcgccaacgccttcaacaacagcattatccccgaggacacattcttcccaagccccgagagcagctgcggctttaccagcgagagctaccagcagggcgtgctgagcgccaccatcctgtacgagatcctgctgggcaaggccaccctgtacgccgtgctggtgtctgccctggtgctgatggctatggtcaagcggaaggacagccggggacgcgccaagagaagcggatctggcgtgaagcagaccctgaatttcgacctgctgaagctggctggcgacgtggaatccaacccaggccctactagtatggactggatttggcgcatccttttccttgtcggcgctgctaccggcgcgcattccttcgaagggggaggcggctctcaggtgcaactccagcagtctggcgctgagcttgtgaagcctggggccagcgtgaagattagctgcaaggccagcggctacgccttcagcagctactggatgaactgggtcaagcagcggcctggcaagggcctggaatggatcggccaaatctaccccggcgacggcgacaccacctacaacggcaagttcaagggcaaggccaccctgacagccgacaagagcagcagcaccgtgtacatgcaactgaacagcctgaccagcgaggacagcgccgtgtacttctgcgtgcggtactactacggcagctccggctacttcgactattggggccagggcaccacactgaccgtgtcctctacgcgtgaggacctgaagaacgtgttcccacctgaggtggccgtgttcgagcctagcgaggccgagatcagccacacccagaaagccaccctcgtgtgcctggctaccggcttctaccccgaccatgtggaactgtcttggtgggtcaacggcaaagaggtgcacagcggcgtgtgtaccgacccccagccactgaaagaacagcccgccctgaacgacagccggtactgcctgagcagcagactgagagtgtccgccaccttctggcagaacccccggaaccacttcagatgccaggtgcagttctacggcctgagcgagaacgacgagtggacccaggacagagccaagcccgtgacccagatcgtgtctgccgaagcctggggcagagccgattgcgacgtgaagctggtggaaaagagcttcgagacagacaccaacctgaacttccagaacctgagcgtgatcggcttcagaatcctgctgctgaaagtggccggctttaacctgctgatgaccctgcggctgtggtccagc

SEQ ID NO: 4431 - DNA, 2277 bp, synthetic construct
  source 1..2277: mol_type = other DNA
atggccttaccagtgaccgccttgctcctgccgctggccttgctgctccacgccgccaggccggaagtgcagctggttgaatctggcggaggactggttcagcctggcggatctctgagactgtcttgtgccgccagcggcttcagcttcagcgacttttggatgagctgggtccgacaggcccctggcaaaggacttgaatgggtcgccacaatcagccaggccggcagcgagaaggactacgtggactctgtgaagggcagattcaccatcagccgggacaacgccaagaagtccctgtacctccagatgaacagcctgagagccgaggacaccgccgtgtactattgtgcctctggcgtgtacagcttcgactacagaggccagggcaccctggtcacagtctcttctggtaccggcggaggcggatctggcggcggaggtagcggtggcggaggatctgaattcgacgtgcagatgatccagacccccagcagcctgtctgccagcctgggcgatagagtgaccatcagctgtcgggccagccaggacatcggcaactacctgaactggtatcagcagaaacccgacggcaccgtgaagctgctgatctactacaccagcagactgcacagcggcgtgcccagcagattttctggcagcggctctggcaccgagtacagcctgaccatctccaacctggaacaggaagatattgctacctacttctgtcagcaaggcagcgccctgccccctacatttggcggcggaacaaagctggaaatcaacctcgagatccagaaccctgatcctgccgtgtaccagctgcgggatagcaagagcagcgacaagagcgtgtgtctgttcaccgacttcgacagccagaccaacgtgtcccagagcaaggactccgacgtgtacatcaccgataagtgcgtgctggacatgcggagcatggacttcaagagcaactccgccgtggcctggtccaacaagtccgatttcgcctgcgccaacgccttcaacaacagcattatccccgaggacacattcttcccaagccccgagagcagctgcggctttaccagcgagagctaccagcagggcgtgctgagcgccaccatcctgtacgagatcctgctgggcaaggccaccctgtacgccgtgctggtgtctgccctggtgctgatggctatggtcaagcggaaggacagccggggacgcgccaagagaagcggatctggcgtgaagcagaccctgaatttcgacctgctgaagctggctggcgacgtggaatccaacccaggccctactagtatggactggatttggcgcatccttttccttgtcggcgctgctaccggcgcgcattccttcgaagctctccagctccagcagtctggcgcagaactcgtgcggcctggcgcttctgtgaccctgagctgtaaagccagcggctacaccttcaccgactacgagatgcactgggtcaagcagacccctgtgcacggcctggaatggatcggagccatcgaccctgagacaggcggcaccgcctacaaccagaagttcgagggcaaggccatcctgaccgccgacaagagcagcagcacagcctacatggaactgcggagcctgacctccgaggacagccccgtgtactactgtgccagacggcggtactacggcagcagctccttcgactattggggccagggcaccaccctgaccgtgtctagtacgcgtgaggacctgaagaacgtgttcccacctgaggtggccgtgttcgagcctagcgaggccgagatcagccacacccagaaagccaccctcgtgtgcctggctaccggcttctaccccgaccatgtggaactgtcttggtgggtcaacggcaaagaggtgcacagcggcgtgtgtaccgacccccagccactgaaagaacagcccgccctgaacgacagccggtactgcctgagcagcagactgagagtgtccgccaccttctggcagaacccccggaaccacttcagatgccaggtgcagttctacggcctgagcgagaacgacgagtggacccaggacagagccaagcccgtgacccagatcgtgtctgccgaagcctggggcagagccgattgcgacgtgaagctggtggaaaagagcttcgagacagacaccaacctgaacttccagaacctgagcgtgatcggcttcagaatcctgctgctgaaagtggccggctttaacctgctgatgaccctgcggctgtggtccagc

SEQ ID NO: 4432 - DNA, 2289 bp, synthetic construct
  source 1..2289: mol_type = other DNA
atggccttaccagtgaccgccttgctcctgccgctggccttgctgctccacgccgccaggccggaagtgcagctggttgaatctggcggaggactggttcagcctggcggatctctgagactgtcttgtgccgccagcggcttcagcttcagcgacttttggatgagctgggtccgacaggcccctggcaaaggacttgaatgggtcgccacaatcagccaggccggcagcgagaaggactacgtggactctgtgaagggcagattcaccatcagccgggacaacgccaagaagtccctgtacctccagatgaacagcctgagagccgaggacaccgccgtgtactattgtgcctctggcgtgtacagcttcgactacagaggccagggcaccctggtcacagtctcttctggtaccggcggaggcggatctggcggcggaggtagcggtggcggaggatctgaattcgacatcgtcctgacccagtccccagccagcctggcggtgtccctgggtcaacgagctaccatttcctgcagagcctctaagtccgtatccacttccggctatagttacctgcattggtaccaacagaaaccagggcagccacccaagctgctcatctatctggcctcaaacctggagtccggcgtgcccgccagattctccggaagtgggagcggcaccgactttacattgaacatccacccagtcgaagaggaagatgctgccacttattactgtcagcactccagggagctgccatttacatttggctctggcacaaaactggagatcaaactcgagatccagaaccctgatcctgccgtgtaccagctgcgggatagcaagagcagcgacaagagcgtgtgtctgttcaccgacttcgacagccagaccaacgtgtcccagagcaaggactccgacgtgtacatcaccgataagtgcgtgctggacatgcggagcatggacttcaagagcaactccgccgtggcctggtccaacaagtccgatttcgcctgcgccaacgccttcaacaacagcattatccccgaggacacattcttcccaagccccgagagcagctgcggctttaccagcgagagctaccagcagggcgtgctgagcgccaccatcctgtacgagatcctgctgggcaaggccaccctgtacgccgtgctggtgtctgccctggtgctgatggctatggtcaagcggaaggacagccggggacgcgccaagagaagcggatctggcgtgaagcagaccctgaatttcgacctgctgaagctggctggcgacgtggaatccaacccaggccctactagtatggactggatttggcgcatccttttccttgtcggcgctgctaccggcgcgcattccttcgaacaggttcagctggtcgagtccgggggaggtctggtacagccgggtggcagcctcaagctgtcatgtgccgcatctggttttgactttagcaggtattggatgagctgggtccgccaggccccgggcaagggacttgagtggattggagaaataaaccctacttccagcacaatcaacttcacaccttctttgaaagataaggtttttatctctcgggataacgctaaaaacacactgtacttgcagatgtctaaggtgcgaagcgaagacaccgccctctattattgcgcccggggtaattactaccgctatggggatgcgatggactattgggggcaaggtacctccgtcacggtctcaacgcgtgaggacctgaagaacgtgttcccacctgaggtggccgtgttcgagcctagcgaggccgagatcagccacacccagaaagccaccctcgtgtgcctggctaccggcttctaccccgaccatgtggaactgtcttggtgggtcaacggcaaagaggtgcacagcggcgtgtgtaccgacccccagccactgaaagaacagcccgccctgaacgacagccggtactgcctgagcagcagactgagagtgtccgccaccttctggcagaacccccggaaccacttcagatgccaggtgcagttctacggcctgagcgagaacgacgagtggacccaggacagagccaagcccgtgacccagatcgtgtctgccgaagcctggggcagagccgattgcgacgtgaagctggtggaaaagagcttcgagacagacaccaacctgaacttccagaacctgagcgtgatcggcttcagaatcctgctgctgaaagtggccggctttaacctgctgatgaccctgcggctgtggtccagc

SEQ ID NO: 4433 - DNA, 2283 bp, synthetic construct
  source 1..2283: mol_type = other DNA
atggccttaccagtgaccgccttgctcctgccgctggccttgctgctccacgccgccaggccggaagtgcagctggttgaatctggcggaggactggttcagcctggcggatctctgagactgtcttgtgccgccagcggcttcagcttcagcgacttttggatgagctgggtccgacaggcccctggcaaaggacttgaatgggtcgccacaatcagccaggccggcagcgagaaggactacgtggactctgtgaagggcagattcaccatcagccgggacaacgccaagaagtccctgtacctccagatgaacagcctgagagccgaggacaccgccgtgtactattgtgcctctggcgtgtacagcttcgactacagaggccagggcaccctggtcacagtctcttctggtaccggcggaggcggatctggcggcggaggtagcggtggcggaggatctgaattcgacatccagatgacccagagccctagctcactgagcgccagcgtgggcgacagggtgaccattacctgctccgccagccaggacatcagcaactacctgaactggtaccagcagaagcccggcaaggcccccaagctgctgatctactacacctccaacctgcactccggcgtgcccagcaggttcagcggaagcggcagcggcaccgatttcaccctgaccatctccagcctgcagcccgaggacttcgccacctactactgccagcagtacaggaagctcccctggactttcggccagggcaccaaactggagatcaagcgtctcgagatccagaaccctgatcctgccgtgtaccagctgcgggatagcaagagcagcgacaagagcgtgtgtctgttcaccgacttcgacagccagaccaacgtgtcccagagcaaggactccgacgtgtacatcaccgataagtgcgtgctggacatgcggagcatggacttcaagagcaactccgccgtggcctggtccaacaagtccgatttcgcctgcgccaacgccttcaacaacagcattatccccgaggacacattcttcccaagccccgagagcagctgcggctttaccagcgagagctaccagcagggcgtgctgagcgccaccatcctgtacgagatcctgctgggcaaggccaccctgtacgccgtgctggtgtctgccctggtgctgatggctatggtcaagcggaaggacagccggggacgcgccaagagaagcggatctggcgtgaagcagaccctgaatttcgacctgctgaagctggctggcgacgtggaatccaacccaggccctactagtatggactggatttggcgcatccttttccttgtcggcgctgctaccggcgcgcattccttcgaacaggtgcagctggtccagagcggcgccgaagtgaagaagcccggcagctccgtgaaagtgagctgcaaggccagcggcggcaccttcagcaactactggatgcactgggtgaggcaggcccccggacagggcctggagtggatgggcgccacctacaggggccacagcgacacctactacaaccagaagttcaagggccgggtgaccatcaccgccgacaagagcaccagcaccgcctacatggaactgagcagcctcaggagcgaggacaccgctgtgtattactgcgccaggggcgccatctacgacggctacgacgtgctggacaactggggccagggcacactggtgaccgtgtccagcacgcgtgaggacctgaagaacgtgttcccacctgaggtggccgtgttcgagcctagcgaggccgagatcagccacacccagaaagccaccctcgtgtgcctggctaccggcttctaccccgaccatgtggaactgtcttggtgggtcaacggcaaagaggtgcacagcggcgtgtgtaccgacccccagccactgaaagaacagcccgccctgaacgacagccggtactgcctgagcagcagactgagagtgtccgccaccttctggcagaacccccggaaccacttcagatgccaggtgcagttctacggcctgagcgagaacgacgagtggacccaggacagagccaagcccgtgacccagatcgtgtctgccgaagcctggggcagagccgattgcgacgtgaagctggtggaaaagagcttcgagacagacaccaacctgaacttccagaacctgagcgtgatcggcttcagaatcctgctgctgaaagtggccggctttaacctgctgatgaccctgcggctgtggtccagc

SEQ ID NO: 4434 - DNA, 2283 bp, synthetic construct
  source 1..2283: mol_type = other DNA
atggccttaccagtgaccgccttgctcctgccgctggccttgctgctccacgccgccaggccggaagtgcagctggttgaatctggcggaggactggttcagcctggcggatctctgagactgtcttgtgccgccagcggcttcagcttcagcgacttttggatgagctgggtccgacaggcccctggcaaaggacttgaatgggtcgccacaatcagccaggccggcagcgagaaggactacgtggactctgtgaagggcagattcaccatcagccgggacaacgccaagaagtccctgtacctccagatgaacagcctgagagccgaggacaccgccgtgtactattgtgcctctggcgtgtacagcttcgactacagaggccagggcaccctggtcacagtctcttctggtaccggcggaggcggatctggcggcggaggtagcggtggcggaggatctgaattcgacatcgtgctgacacagagccctgccaccctgtctctgagccctggcgatagagccaccatcagctgtagagccagcgagagcgtgaccatcctgggcagccacctgatctactggtatcagcagaagcccggccagccccccagactgctgattcagctggcctccaatgtgcagaccggcgtgccagccagattttccggcagcggcagcagaaccgacttcaccctgaccatcagcagcgtggaacccgaggacttcgccgtgtactactgcctccagagccggaccatccccagaacattcggccagggcaccaagctggaaatcaagagactcgagatccagaaccctgatcctgccgtgtaccagctgcgggatagcaagagcagcgacaagagcgtgtgtctgttcaccgacttcgacagccagaccaacgtgtcccagagcaaggactccgacgtgtacatcaccgataagtgcgtgctggacatgcggagcatggacttcaagagcaactccgccgtggcctggtccaacaagtccgatttcgcctgcgccaacgccttcaacaacagcattatccccgaggacacattcttcccaagccccgagagcagctgcggctttaccagcgagagctaccagcagggcgtgctgagcgccaccatcctgtacgagatcctgctgggcaaggccaccctgtacgccgtgctggtgtctgccctggtgctgatggctatggtcaagcggaaggacagccggggacgcgccaagagaagcggatctggcgtgaagcagaccctgaatttcgacctgctgaagctggctggcgacgtggaatccaacccaggccctactagtatggactggatttggcgcatccttttccttgtcggcgctgctaccggcgcgcattccttcgaacaggtgcagctggtgcagtctggccccgaagtgaagaaacccggcgagtccgtgaagatcagctgcaaggccagcggctacaccttccggcactacagcatgaactgggtcaagcaggccccaggccagggcctgaagtggatgggcagaatcaacaccgagagcggcgtgcccatctacgccgacgacttcaagggccggttcagcttcaccgtggacaccagcgccagcaccgcctacctggaaatctccagcctgaccagcgaggataccgccgtgtatttctgctccaacgactacctgtacagcctggatttctggggccagggaaccaccctgacagtgtcctctacgcgtgaggacctgaagaacgtgttcccacctgaggtggccgtgttcgagcctagcgaggccgagatcagccacacccagaaagccaccctcgtgtgcctggctaccggcttctaccccgaccatgtggaactgtcttggtgggtcaacggcaaagaggtgcacagcggcgtgtgtaccgacccccagccactgaaagaacagcccgccctgaacgacagccggtactgcctgagcagcagactgagagtgtccgccaccttctggcagaacccccggaaccacttcagatgccaggtgcagttctacggcctgagcgagaacgacgagtggacccaggacagagccaagcccgtgacccagatcgtgtctgccgaagcctggggcagagccgattgcgacgtgaagctggtggaaaagagcttcgagacagacaccaacctgaacttccagaacctgagcgtgatcggcttcagaatcctgctgctgaaagtggccggctttaacctgctgatgaccctgcggctgtggtccagc

SEQ ID NO: 4435 - DNA, 2286 bp, synthetic construct
  source 1..2286: mol_type = other DNA
atggccttaccagtgaccgccttgctcctgccgctggccttgctgctccacgccgccaggccggaagtgcagctggttgaatctggcggaggactggttcagcctggcggatctctgagactgtcttgtgccgccagcggcttcagcttcagcgacttttggatgagctgggtccgacaggcccctggcaaaggacttgaatgggtcgccacaatcagccaggccggcagcgagaaggactacgtggactctgtgaagggcagattcaccatcagccgggacaacgccaagaagtccctgtacctccagatgaacagcctgagagccgaggacaccgccgtgtactattgtgcctctggcgtgtacagcttcgactacagaggccagggcaccctggtcacagtctcttctggtaccggcggaggcggatctggcggcggaggtagcggtggcggaggatctgaattccagtctgtgctgacacagcctcctagtgtgtctggcgctcctggacagagagtgaccatcagctgtacaggcagcagcagcaatatcggagccggctttgacgtgcactggtatcagcagctgcctggcacagcccctaaactgctgatctacggcaacagcaacagacccagcggcgtgcccgatagattttccggctctaagagcggcacaagcgccagcctggctattactggactccaggccgaggacgaggccgactactactgtcagagctacgacagcagcctgagcggctacgttttcggcaccggcaccaaagtgacagtgcttggtctcgagatccagaaccctgatcctgccgtgtaccagctgcgggatagcaagagcagcgacaagagcgtgtgtctgttcaccgacttcgacagccagaccaacgtgtcccagagcaaggactccgacgtgtacatcaccgataagtgcgtgctggacatgcggagcatggacttcaagagcaactccgccgtggcctggtccaacaagtccgatttcgcctgcgccaacgccttcaacaacagcattatccccgaggacacattcttcccaagccccgagagcagctgcggctttaccagcgagagctaccagcagggcgtgctgagcgccaccatcctgtacgagatcctgctgggcaaggccaccctgtacgccgtgctggtgtctgccctggtgctgatggctatggtcaagcggaaggacagccggggacgcgccaagagaagcggatctggcgtgaagcagaccctgaatttcgacctgctgaagctggctggcgacgtggaatccaacccaggccctactagtatggactggatttggcgcatccttttccttgtcggcgctgctaccggcgcgcattccttcgaacaagttcagctggttcagagcggagccgaagtgaagaaacctggggcctctgtgaaggtgtcctgcaaggcttccggctacacctttaccgattactacatgcactgggtccgacaggctcccggccaaagacttgaatggatgggctggatcaaccccaacagcggcggcacaaattacgcccagaagttccaggaccggatcaccgtgaccagagacaccagctccaacaccggctacatggaactgacccggctgagatccgatgacaccgccgtgtactactgcgctagaagcccttactccggcgtgctggataagtggggacagggcacactggtcaccgtgtcatctacgcgtgaggacctgaagaacgtgttcccacctgaggtggccgtgttcgagcctagcgaggccgagatcagccacacccagaaagccaccctcgtgtgcctggctaccggcttctaccccgaccatgtggaactgtcttggtgggtcaacggcaaagaggtgcacagcggcgtgtgtaccgacccccagccactgaaagaacagcccgccctgaacgacagccggtactgcctgagcagcagactgagagtgtccgccaccttctggcagaacccccggaaccacttcagatgccaggtgcagttctacggcctgagcgagaacgacgagtggacccaggacagagccaagcccgtgacccagatcgtgtctgccgaagcctggggcagagccgattgcgacgtgaagctggtggaaaagagcttcgagacagacaccaacctgaacttccagaacctgagcgtgatcggcttcagaatcctgctgctgaaagtggccggctttaacctgctgatgaccctgcggctgtggtccagc

SEQ ID NO: 4436 - DNA, 2277 bp, synthetic construct
  source 1..2277: mol_type = other DNA
atggccttaccagtgaccgccttgctcctgccgctggccttgctgctccacgccgccaggccggaagtgcagctggttgaatctggcggaggactggttcagcctggcggatctctgagactgtcttgtgccgccagcggcttcagcttcagcgacttttggatgagctgggtccgacaggcccctggcaaaggacttgaatgggtcgccacaatcagccaggccggcagcgagaaggactacgtggactctgtgaagggcagattcaccatcagccgggacaacgccaagaagtccctgtacctccagatgaacagcctgagagccgaggacaccgccgtgtactattgtgcctctggcgtgtacagcttcgactacagaggccagggcaccctggtcacagtctcttctggtaccggcggaggcggatctggcggcggaggtagcggtggcggaggatctgaattccaggctgttctgacacagcctccatctgcctctggcacacctggacagagagtgaccatctcctgtagcggcagcagcagcaacatcggcagctacaccgtgtcctggtatcagcagctccctggaacagcccctaagttcctgatctacagcaacaaccagcggcctagcggcgtgcccgatagattttctggcagcaagagcggcacaagcgccagcctggctatttctggactccagtctgaggacgaggccgactactattgtgccgcctgggacgatagcctgaacggctatgtgtttggcaccggcaccaaagtgacagtgcttggtctcgagatccagaaccctgatcctgccgtgtaccagctgcgggatagcaagagcagcgacaagagcgtgtgtctgttcaccgacttcgacagccagaccaacgtgtcccagagcaaggactccgacgtgtacatcaccgataagtgcgtgctggacatgcggagcatggacttcaagagcaactccgccgtggcctggtccaacaagtccgatttcgcctgcgccaacgccttcaacaacagcattatccccgaggacacattcttcccaagccccgagagcagctgcggctttaccagcgagagctaccagcagggcgtgctgagcgccaccatcctgtacgagatcctgctgggcaaggccaccctgtacgccgtgctggtgtctgccctggtgctgatggctatggtcaagcggaaggacagccggggacgcgccaagagaagcggatctggcgtgaagcagaccctgaatttcgacctgctgaagctggctggcgacgtggaatccaacccaggccctactagtatggactggatttggcgcatccttttccttgtcggcgctgctaccggcgcgcattccttcgaagttcaactggttcagagcggagccgaagtgaagaagcctggcgagagcctgaagattagctgcaaaggcagcggctacgacttcaccacctactggatcggctgggtccgacagatgcctggcaaaggactggaatggatgggcatcatctaccccggcgacagcgacaccagatacagccctagcgttagaggccgcgtgaccatcagcgccgacaagtctatcaacaccgcctacctccagtggtccagcctggaagcctctgacaccgccatgtactactgcgccagaatgtggaccttcagccaggatggatggggccagggaacactggtcacagtgtcatctacgcgtgaggacctgaagaacgtgttcccacctgaggtggccgtgttcgagcctagcgaggccgagatcagccacacccagaaagccaccctcgtgtgcctggctaccggcttctaccccgaccatgtggaactgtcttggtgggtcaacggcaaagaggtgcacagcggcgtgtgtaccgacccccagccactgaaagaacagcccgccctgaacgacagccggtactgcctgagcagcagactgagagtgtccgccaccttctggcagaacccccggaaccacttcagatgccaggtgcagttctacggcctgagcgagaacgacgagtggacccaggacagagccaagcccgtgacccagatcgtgtctgccgaagcctggggcagagccgattgcgacgtgaagctggtggaaaagagcttcgagacagacaccaacctgaacttccagaacctgagcgtgatcggcttcagaatcctgctgctgaaagtggccggctttaacctgctgatgaccctgcggctgtggtccagc

SEQ ID NO: 4437 - DNA, 2286 bp, synthetic construct
  source 1..2286: mol_type = other DNA
atggccttaccagtgaccgccttgctcctgccgctggccttgctgctccacgccgccaggccggaagtgcagctggttgaatctggcggaggactggttcagcctggcggatctctgagactgtcttgtgccgccagcggcttcagcttcagcgacttttggatgagctgggtccgacaggcccctggcaaaggacttgaatgggtcgccacaatcagccaggccggcagcgagaaggactacgtggactctgtgaagggcagattcaccatcagccgggacaacgccaagaagtccctgtacctccagatgaacagcctgagagccgaggacaccgccgtgtactattgtgcctctggcgtgtacagcttcgactacagaggccagggcaccctggtcacagtctcttctggtaccggcggaggcggatctggcggcggaggtagcggtggcggaggatctgaattcgacatcgtgatgacccagagccccgatagcctggccgtgtctctgggagagagagccaccatcaactgcaagagcagccagagcatcctgtacagcagcaaccagaagaactacctggcctggtatcagcagaagcccggccagagccctaagctgctgatctactgggccagcaccagagaaagcggcgtgcccgatagattcagcggcagcggctctggcaccgacttcaccctgaccatcagttctcttcaggccgaggacgtggccgtgtactactgccaccagtacatcagctcctacaccttcggccagggcaccaagctggaaatcaagctcgagatccagaaccctgatcctgccgtgtaccagctgcgggatagcaagagcagcgacaagagcgtgtgtctgttcaccgacttcgacagccagaccaacgtgtcccagagcaaggactccgacgtgtacatcaccgataagtgcgtgctggacatgcggagcatggacttcaagagcaactccgccgtggcctggtccaacaagtccgatttcgcctgcgccaacgccttcaacaacagcattatccccgaggacacattcttcccaagccccgagagcagctgcggctttaccagcgagagctaccagcagggcgtgctgagcgccaccatcctgtacgagatcctgctgggcaaggccaccctgtacgccgtgctggtgtctgccctggtgctgatggctatggtcaagcggaaggacagccggggacgcgccaagagaagcggatctggcgtgaagcagaccctgaatttcgacctgctgaagctggctggcgacgtggaatccaacccaggccctactagtatggactggatttggcgcatccttttccttgtcggcgctgctaccggcgcgcattccttcgaacaggtgcagctggtgcagtctggcgctgaagtgaagaaacctggggccagcgtgaaggtgtcctgcaaggccagcggctacacctttgccagccagtggatgcactggatgagacaggcccctggacagggcctggaatggatcggctggatcaaccccggcaacgtgaacaccaagtacaacgagaagttcaagggcagagccaccctgacagtggacaccagcaccaacaccgcctacatggaactgagcagcctgcggagcgaggacaccgccgtgtattattgcgccagaagcacctggtacagacccctggattattggggccagggaacccttgtgaccgtgtcctctacgcgtgaggacctgaagaacgtgttcccacctgaggtggccgtgttcgagcctagcgaggccgagatcagccacacccagaaagccaccctcgtgtgcctggctaccggcttctaccccgaccatgtggaactgtcttggtgggtcaacggcaaagaggtgcacagcggcgtgtgtaccgacccccagccactgaaagaacagcccgccctgaacgacagccggtactgcctgagcagcagactgagagtgtccgccaccttctggcagaacccccggaaccacttcagatgccaggtgcagttctacggcctgagcgagaacgacgagtggacccaggacagagccaagcccgtgacccagatcgtgtctgccgaagcctggggcagagccgattgcgacgtgaagctggtggaaaagagcttcgagacagacaccaacctgaacttccagaacctgagcgtgatcggcttcagaatcctgctgctgaaagtggccggctttaacctgctgatgaccctgcggctgtggtccagc

SEQ ID NO: 4438 - DNA, 2286 bp, synthetic construct
  source 1..2286: mol_type = other DNA
atggccttaccagtgaccgccttgctcctgccgctggccttgctgctccacgccgccaggccggaagtgcagctggttgaatctggcggaggactggttcagcctggcggatctctgagactgtcttgtgccgccagcggcttcagcttcagcgacttttggatgagctgggtccgacaggcccctggcaaaggacttgaatgggtcgccacaatcagccaggccggcagcgagaaggactacgtggactctgtgaagggcagattcaccatcagccgggacaacgccaagaagtccctgtacctccagatgaacagcctgagagccgaggacaccgccgtgtactattgtgcctctggcgtgtacagcttcgactacagaggccagggcaccctggtcacagtctcttctggtaccggcggaggcggatctggcggcggaggtagcggtggcggaggatctgaattcgaccacatcgtgctgacccagagccctagcagcctgtctgccagcctgggcgacagagtgaccatcagctgtagagccagccaggacatcagcacctacctgaactggtatcagcagaaacccgacggcaccgtgaagctgctgatcttctacaccagcagactgcacgccggggtgcccagcagattttctggcagcggctctggcacccaccacagcctgaccatctccaacctggaacaggaagatattgctacctacttctgtcagcaaggcaacagcctgcccttcaccttcggcagcggcaccaagctggaaatcaagagactcgagatccagaaccctgatcctgccgtgtaccagctgcgggatagcaagagcagcgacaagagcgtgtgtctgttcaccgacttcgacagccagaccaacgtgtcccagagcaaggactccgacgtgtacatcaccgataagtgcgtgctggacatgcggagcatggacttcaagagcaactccgccgtggcctggtccaacaagtccgatttcgcctgcgccaacgccttcaacaacagcattatccccgaggacacattcttcccaagccccgagagcagctgcggctttaccagcgagagctaccagcagggcgtgctgagcgccaccatcctgtacgagatcctgctgggcaaggccaccctgtacgccgtgctggtgtctgccctggtgctgatggctatggtcaagcggaaggacagccggggacgcgccaagagaagcggatctggcgtgaagcagaccctgaatttcgacctgctgaagctggctggcgacgtggaatccaacccaggccctactagtatggactggatttggcgcatccttttccttgtcggcgctgctaccggcgcgcattccttcgaacaggtgcagctgaaagagagcggccctgagctggaaaagcctggggccagcgtgaagattagctgcaaggccagcggctacagcttcaccgcctacagcatgaactgggtcaagcagaacaacggcatgagcctggaatggatcggcagcatcgacccctactacggcgacaccaaatacgcccagaagttcaagggcaaggccaccctgaccgtggataaggccagcagcaccgcctacctccagctgaagtctctgaccagcgaggacagcgccgtgtactactgcgccagacggatgattaccaccggcgactggtacttcgacgtgtggggagccggaaccaccgtgacagtgtctagcacgcgtgaggacctgaagaacgtgttcccacctgaggtggccgtgttcgagcctagcgaggccgagatcagccacacccagaaagccaccctcgtgtgcctggctaccggcttctaccccgaccatgtggaactgtcttggtgggtcaacggcaaagaggtgcacagcggcgtgtgtaccgacccccagccactgaaagaacagcccgccctgaacgacagccggtactgcctgagcagcagactgagagtgtccgccaccttctggcagaacccccggaaccacttcagatgccaggtgcagttctacggcctgagcgagaacgacgagtggacccaggacagagccaagcccgtgacccagatcgtgtctgccgaagcctggggcagagccgattgcgacgtgaagctggtggaaaagagcttcgagacagacaccaacctgaacttccagaacctgagcgtgatcggcttcagaatcctgctgctgaaagtggccggctttaacctgctgatgaccctgcggctgtggtccagc

SEQ ID NO: 4439 - DNA, 2286 bp, synthetic construct; identical to SEQ ID NO: 4438
  source 1..2286: mol_type = other DNA

SEQ ID NO: 4440 - DNA, 2286 bp, synthetic construct
  source 1..2286: mol_type = other DNA
atggccttaccagtgaccgccttgctcctgccgctggccttgctgctccacgccgccaggccggaagtgcagctggttgaatctggcggaggactggttcagcctggcggatctctgagactgtcttgtgccgccagcggcttcagcttcagcgacttttggatgagctgggtccgacaggcccctggcaaaggacttgaatgggtcgccacaatcagccaggccggcagcgagaaggactacgtggactctgtgaagggcagattcaccatcagccgggacaacgccaagaagtccctgtacctccagatgaacagcctgagagccgaggacaccgccgtgtactattgtgcctctggcgtgtacagcttcgactacagaggccagggcaccctggtcacagtctcttctggtaccggcggaggcggatctggcggcggaggtagcggtggcggaggatctgaattcgacgagatcgtgctgacacagagccctgccaccctgtctctgagccctggcgaaagagccaccctgagctgtagagccagccagagcgtgtccagctacctggcctggtatcagcagaagcccggccaggctccccggctgctgatctacgatgccagcaatagagccaccggcatccccgccagattttccggctctggcagcggcaccgacttcaccctgaccatcagctccctggaacccgaggacttcgccgtgtactactgccagcagcggagcaactggcccatcacattcggccagggcacccggctggaaatcaaactcgagatccagaaccctgatcctgccgtgtaccagctgcgggatagcaagagcagcgacaagagcgtgtgtctgttcaccgacttcgacagccagaccaacgtgtcccagagcaaggactccgacgtgtacatcaccgataagtgcgtgctggacatgcggagcatggacttcaagagcaactccgccgtggcctggtccaacaagtccgatttcgcctgcgccaacgccttcaacaacagcattatccccgaggacacattcttcccaagccccgagagcagctgcggctttaccagcgagagctaccagcagggcgtgctgagcgccaccatcctgtacgagatcctgctgggcaaggccaccctgtacgccgtgctggtgtctgccctggtgctgatggctatggtcaagcggaaggacagccggggacgcgccaagagaagcggatctggcgtgaagcagaccctgaatttcgacctgctgaagctggctggcgacgtggaatccaacccaggccctactagtatggactggatttggcgcatccttttccttgtcggcgctgctaccggcgcgcattccttcgaagaagtgcagctggtggaatcaggcggcggactggtgcagcctggcagaagcctgagactgagctgtgccgccagcggcttcaccttcaacgactacgccatgcactgggtgcgccaggcccctggaaaaggactggaatgggtgtccacaatcagctggaacagcggcagcatcggctacgccgatagcgtgaagggccggttcaccatcagccgggacaacgccaagaagtccctgtacctccagatgaacagcctgcgggccgaggacacagccctgtactattgcgccaaggacatccagtacggcaactactactacggcatggacgtgtggggccagggaaccaccgtgaccgtgtcatctacgcgtgaggacctgaagaacgtgttcccacctgaggtggccgtgttcgagcctagcgaggccgagatcagccacacccagaaagccaccctcgtgtgcctggctaccggcttctaccccgaccatgtggaactgtcttggtgggtcaacggcaaagaggtgcacagcggcgtgtgtaccgacccccagccactgaaagaacagcccgccctgaacgacagccggtactgcctgagcagcagactgagagtgtccgccaccttctggcagaacccccggaaccacttcagatgccaggtgcagttctacggcctgagcgagaacgacgagtggacccaggacagagccaagcccgtgacccagatcgtgtctgccgaagcctggggcagagccgattgcgacgtgaagctggtggaaaagagcttcgagacagacaccaacctgaacttccagaacctgagcgtgatcggcttcagaatcctgctgctgaaagtggccggctttaacctgctgatgaccctgcggctgtggtccagc

SEQ ID NO: 4441 - DNA, 2292 bp, synthetic construct
  source 1..2292: mol_type = other DNA
atggccttaccagtgaccgccttgctcctgccgctggccttgctgctccacgccgccaggccggaagtgcagctggttgaatctggcggaggactggttcagcctggcggatctctgagactgtcttgtgccgccagcggcttcagcttcagcgacttttggatgagctgggtccgacaggcccctggcaaaggacttgaatgggtcgccacaatcagccaggccggcagcgagaaggactacgtggactctgtgaagggcagattcaccatcagccgggacaacgccaagaagtccctgtacctccagatgaacagcctgagagccgaggacaccgccgtgtactattgtgcctctggcgtgtacagcttcgactacagaggccagggcaccctggtcacagtctcttctggtaccggcggaggcggatctggcggcggaggtagcggtggcggaggatctgaattcgacatcgtgatgacccagacccccctgagcctgcctgtgacacctggcgagcctgccagcatctcctgcagaagcagcaagagcctgctgcacagcaacggcatcacctacctgtactggtatctgcagaaacccggccagagcccccaactgctgatctaccagatgagcaacctggtgtccggcgtgcccgacagattttctggcagcggctccggcaccgacttcaccctgaagatcagccgggtggaagccgaggacgtgggcgtgtactactgcgcccagaacctggaactgccctacacctttggcggcggaacaaaggtggaaatcaagcggctcgagatccagaaccctgatcctgccgtgtaccagctgcgggatagcaagagcagcgacaagagcgtgtgtctgttcaccgacttcgacagccagaccaacgtgtcccagagcaaggactccgacgtgtacatcaccgataagtgcgtgctggacatgcggagcatggacttcaagagcaactccgccgtggcctggtccaacaagtccgatttcgcctgcgccaacgccttcaacaacagcattatccccgaggacacattcttcccaagccccgagagcagctgcggctttaccagcgagagctaccagcagggcgtgctgagcgccaccatcctgtacgagatcctgctgggcaaggccaccctgtacgccgtgctggtgtctgccctggtgctgatggctatggtcaagcggaaggacagccggggacgcgccaagagaagcggatctggcgtgaagcagaccctgaatttcgacctgctgaagctggctggcgacgtggaatccaacccaggccctactagtatggactggatttggcgcatccttttccttgtcggcgctgctaccggcgcgcattccttcgaacaggtgcaactggtgcagagcggagccgaagtgaaaaagcccggcagcagcgtgaaggtgtcctgcaaggccagcggctacgccttcagctactcctggatcaactgggtgcgccaggcccctggacagggcctggaatggatgggcagaatcttccccggcgacggcgacaccgactacaacggcaagttcaagggcagagtgaccatcaccgccgacaagagcaccagcaccgcctacatggaactgagcagcctgcggagcgaggataccgccgtgtactattgtgccagaaacgtgttcgacggctactggctggtgtactggggccagggaacacttgtgaccgtgtccagcacgcgtgaggacctgaagaacgtgttcccacctgaggtggccgtgttcgagcctagcgaggccgagatcagccacacccagaaagccaccctcgtgtgcctggctaccggcttctaccccgaccatgtggaactgtcttggtgggtcaacggcaaagaggtgcacagcggcgtgtgtaccgacccccagccactgaaagaacagcccgccctgaacgacagccggtactgcctgagcagcagactgagagtgtccgccaccttctggcagaacccccggaaccacttcagatgccaggtgcagttctacggcctgagcgagaacgacgagtggacccaggacagagccaagcccgtgacccagatcgtgtctgccgaagcctggggcagagccgattgcgacgtgaagctggtggaaaagagcttcgagacagacaccaacctgaacttccagaacctgagcgtgatcggcttcagaatcctgctgctgaaagtggccggctttaacctgctgatgaccctgcggctgtggtccagc

SEQ ID NO: 4442 - DNA, 2295 bp, synthetic construct
  source 1..2295: mol_type = other DNA
atggccttaccagtgaccgccttgctcctgccgctggccttgctgctccacgccgccaggccggaagtgcagctggttgaatctggcggaggactggttcagcctggcggatctctgagactgtcttgtgccgccagcggcttcagcttcagcgacttttggatgagctgggtccgacaggcccctggcaaaggacttgaatgggtcgccacaatcagccaggccggcagcgagaaggactacgtggactctgtgaagggcagattcaccatcagccgggacaacgccaagaagtccctgtacctccagatgaacagcctgagagccgaggacaccgccgtgtactattgtgcctctggcgtgtacagcttcgactacagaggccagggcaccctggtcacagtctcttctggtaccggcggaggcggatctggcggcggaggtagcggtggcggaggatctgaattcgacatccagatgacccagagccccagcagcctgtctgccagcgtgggcgacagagtgaccatcacctgtcggagcagccagagcatcgtgcactccgtgggcaacaccttcctggaatggtatcagcagaagcccggcaaggcccccaagctgctgatctacaaggtgtccaacagattcagcggcgtgcccagcaggtttagcggctctggcagcggcaccgacttcaccctgaccatctctagcctccagcccgaggacttcgccacctactactgttttcaaggcagccagttcccctacaccttcggccagggaacaaaggtggaaatcaagcggctcgagatccagaaccctgatcctgccgtgtaccagctgcgggatagcaagagcagcgacaagagcgtgtgtctgttcaccgacttcgacagccagaccaacgtgtcccagagcaaggactccgacgtgtacatcaccgataagtgcgtgctggacatgcggagcatggacttcaagagcaactccgccgtggcctggtccaacaagtccgatttcgcctgcgccaacgccttcaacaacagcattatccccgaggacacattcttcccaagccccgagagcagctgcggctttaccagcgagagctaccagcagggcgtgctgagcgccaccatcctgtacgagatcctgctgggcaaggccaccctgtacgccgtgctggtgtctgccctggtgctgatggctatggtcaagcggaaggacagccggggacgcgccaagagaagcggatctggcgtgaagcagaccctgaatttcgacctgctgaagctggctggcgacgtggaatccaacccaggccctactagtatggactggatttggcgcatccttttccttgtcggcgctgctaccggcgcgcattccttcgaagaagtgcaactggtggaaagcggaggcggcctggtgcagcctggcggatctctgagactgagctgtgccgccagcggctacgagttcagccggtcctggatgaactgggtgcgccaggcccctggcaagggactggaatgggtgggaagaatctaccccggcgacggcgacaccaactacagcggcaagttcaagggccggttcaccatcagcgccgacaccagcaagaacaccgcctacctccagatgaacagcctgcgggccgaggataccgccgtgtactactgtgccagagatggcagctcctgggactggtacttcgacgtgtggggacagggaacccttgtgaccgtgtccagcacgcgtgaggacctgaagaacgtgttcccacctgaggtggccgtgttcgagcctagcgaggccgagatcagccacacccagaaagccaccctcgtgtgcctggctaccggcttctaccccgaccatgtggaactgtcttggtgggtcaacggcaaagaggtgcacagcggcgtgtgtaccgacccccagccactgaaagaacagcccgccctgaacgacagccggtactgcctgagcagcagactgagagtgtccgccaccttctggcagaacccccggaaccacttcagatgccaggtgcagttctacggcctgagcgagaacgacgagtggacccaggacagagccaagcccgtgacccagatcgtgtctgccgaagcctggggcagagccgattgcgacgtgaagctggtggaaaagagcttcgagacagacaccaacctgaacttccagaacctgagcgtgatcggcttcagaatcctgctgctgaaagtggccggctttaacctgctgatgaccctgcggctgtggtccagc

SEQ ID NO: 4443 - DNA, 2289 bp, synthetic construct
  source 1..2289: mol_type = other DNA
atggccttaccagtgaccgccttgctcctgccgctggccttgctgctccacgccgccaggccggaagtgcagctggttgaatctggcggaggactggttcagcctggcggatctctgagactgtcttgtgccgccagcggcttcagcttcagcgacttttggatgagctgggtccgacaggcccctggcaaaggacttgaatgggtcgccacaatcagccaggccggcagcgagaaggactacgtggactctgtgaagggcagattcaccatcagccgggacaacgccaagaagtccctgtacctccagatgaacagcctgagagccgaggacaccgccgtgtactattgtgcctctggcgtgtacagcttcgactacagaggccagggcaccctggtcacagtctcttctggtaccggcggaggcggatctggcggcggaggtagcggtggcggaggatctgaattcgacatccagatgacccagagccccagcagcctgtctgccagcgtgggcgacagagtgaccatcacctgtagagccagccagaccatctggtcctacctgaactggtatcagcagaggcccggcaaggcccccaacctgctgatctatgccgccagctctctccagagcggcgtgcccagcagattttccggcagaggcagcggcaccgacttcaccctgaccatcagttccttgcaggccgaggacttcgccacctactactgccagcagagctacagcatcccccagattttcggccagggcaccaagctggaaatcaagctcgagatccagaaccctgatcctgccgtgtaccagctgcgggatagcaagagcagcgacaagagcgtgtgtctgttcaccgacttcgacagccagaccaacgtgtcccagagcaaggactccgacgtgtacatcaccgataagtgcgtgctggacatgcggagcatggacttcaagagcaactccgccgtggcctggtccaacaagtccgatttcgcctgcgccaacgccttcaacaacagcattatccccgaggacacattcttcccaagccccgagagcagctgcggctttaccagcgagagctaccagcagggcgtgctgagcgccaccatcctgtacgagatcctgctgggcaaggccaccctgtacgccgtgctggtgtctgccctggtgctgatggctatggtcaagcggaaggacagccggggacgcgccaagagaagcggatctggcgtgaagcagaccctgaatttcgacctgctgaagctggctggcgacgtggaatccaacccaggccctactagtatggactggatttggcgcatccttttccttgtcggcgctgctaccggcgcgcattccttcgaacaggtgcagctccagcagtctggacccggcctcgtgaagcctagccagacactgagcctgacctgcgccatcagcggcgatagcgtgtccagcaatagcgccgcctggaactggatcagacagtccccctctcggggcctggaatggctgggccggacctactaccgcagcaagtggtacaacgactacgccgtgtccgtgaagtcccggatcaccatcaaccccgacaccagcaagaaccagttctccttgcaactgaacagcgtgacccccgaggacaccgccgtgtactactgcgccagagaagtgaccggcgacctggaagatgccttcgacatctggggccagggaacaatggtcacagtgtccagcacgcgtgaggacctgaagaacgtgttcccacctgaggtggccgtgttcgagcctagcgaggccgagatcagccacacccagaaagccaccctcgtgtgcctggctaccggcttctaccccgaccatgtggaactgtcttggtgggtcaacggcaaagaggtgcacagcggcgtgtgtaccgacccccagccactgaaagaacagcccgccctgaacgacagccggtactgcctgagcagcagactgagagtgtccgccaccttctggcagaacccccggaaccacttcagatgccaggtgcagttctacggcctgagcgagaacgacgagtggacccaggacagagccaagcccgtgacccagatcgtgtctgccgaagcctggggcagagccgattgcgacgtgaagctggtggaaaagagcttcgagacagacaccaacctgaacttccagaacctgagcgtgatcggcttcagaatcctgctgctgaaagtggccggctttaacctgctgatgaccctgcggctgtggtccagc

SEQ ID NO: 4444 - DNA, 2268 bp, synthetic construct
  source 1..2268: mol_type = other DNA
atggccttaccagtgaccgccttgctcctgccgctggccttgctgctccacgccgccaggccggaagtgcagctggttgaatctggcggaggactggttcagcctggcggatctctgagactgtcttgtgccgccagcggcttcagcttcagcgacttttggatgagctgggtccgacaggcccctggcaaaggacttgaatgggtcgccacaatcagccaggccggcagcgagaaggactacgtggactctgtgaagggcagattcaccatcagccgggacaacgccaagaagtccctgtacctccagatgaacagcctgagagccgaggacaccgccgtgtactattgtgcctctggcgtgtacagcttcgactacagaggccagggcaccctggtcacagtctcttctggtaccggcggaggcggatctggcggcggaggtagcggtggcggaggatctgaattcgacatccagatgacccagagccccgccaccatcgagaacacaagcctgtctgccagcgtgggcgacagagtgaccatcacctgtagagccagccagggcatcagctcttggctgacctggtatcagcagaagcccgagaaggcccccaagagcctgatctacgccgccagctctctgcagtctggcgtgcccagcagattttccggcagcggctctggcaccgacttcaccctgacaatcagcagcctgcagcccgaggacttcgccacctactactgccagcagtacgacagctaccccatcaccttcggccagggcacccggctggaaatcaagctcgagatccagaaccctgatcctgccgtgtaccagctgcgggatagcaagagcagcgacaagagcgtgtgtctgttcaccgacttcgacagccagaccaacgtgtcccagagcaaggactccgacgtgtacatcaccgataagtgcgtgctggacatgcggagcatggacttcaagagcaactccgccgtggcctggtccaacaagtccgatttcgcctgcgccaacgccttcaacaacagcattatccccgaggacacattcttcccaagccccgagagcagctgcggctttaccagcgagagctaccagcagggcgtgctgagcgccaccatcctgtacgagatcctgctgggcaaggccaccctgtacgccgtgctggtgtctgccctggtgctgatggctatggtcaagcggaaggacagccggggacgcgccaagagaagcggatctggcgtgaagcagaccctgaatttcgacctgctgaagctggctggcgacgtggaatccaacccaggccctactagtatggactggatttggcgcatccttttccttgtcggcgctgctaccggcgcgcattccttcgaacaggtgcaactgcagcagtggggagccggactgctgaagcctagcgagacactgagcctgacctgcgccgtgtacggcggcagcttcagcgcctactattggagctggatcagacagccccctggcaagggcctggaatggatcggcgacatcaatcacggcggaggcaccaactacaaccccagcctgaagtcccgcgtgaccatctccgtggacaccagcaagaaccagttctccctgaagctgaacagcgtgacagccgccgacacagccgtgtactactgtgccagcctgaccgcctattggggccagggatctcttgtgaccgtgtccagcacgcgtgaggacctgaagaacgtgttcccacctgaggtggccgtgttcgagcctagcgaggccgagatcagccacacccagaaagccaccctcgtgtgcctggctaccggcttctaccccgaccatgtggaactgtcttggtgggtcaacggcaaagaggtgcacagcggcgtgtgtaccgacccccagccactgaaagaacagcccgccctgaacgacagccggtactgcctgagcagcagactgagagtgtccgccaccttctggcagaacccccggaaccacttcagatgccaggtgcagttctacggcctgagcgagaacgacgagtggacccaggacagagccaagcccgtgacccagatcgtgtctgccgaagcctggggcagagccgattgcgacgtgaagctggtggaaaagagcttcgagacagacaccaacctgaacttccagaacctgagcgtgatcggcttcagaatcctgctgctgaaagtggccggctttaacctgctgatgaccctgcggctgtggtccagc

SEQ ID NO: 4445 - DNA, 2283 bp, synthetic construct
  source 1..2283: mol_type = other DNA
atggccttaccagtgaccgccttgctcctgccgctggccttgctgctccacgccgccaggccggaagtgcagctggttgaatctggcggaggactggttcagcctggcggatctctgagactgtcttgtgccgccagcggcttcagcttcagcgacttttggatgagctgggtccgacaggcccctggcaaaggacttgaatgggtcgccacaatcagccaggccggcagcgagaaggactacgtggactctgtgaagggcagattcaccatcagccgggacaacgccaagaagtccctgtacctccagatgaacagcctgagagccgaggacaccgccgtgtactattgtgcctctggcgtgtacagcttcgactacagaggccagggcaccctggtcacagtctcttctggtaccggcggaggcggatctggcggcggaggtagcggtggcggaggatctgaattcgacgagatcgtgctgacccagagccctgatagcctggccgtgtctctgggcgagagagccaccatcaactgcaaggccagccagagcgtggacttcgacggcgacagctacctgaactggtatcagcagaagcccggccagccccccaaggtgctgatctatgccgccagcacactgcagagcggcgtgcccagcagattttctggcagcggctccggcaccgacttcaccctgaccatcaacagcctggaagccgaggacgccgccacctactactgccagcagagcaacgaggacccctggacctttggcggcggaacaaaggtggaaatcaagctcgagatccagaaccctgatcctgccgtgtaccagctgcgggatagcaagagcagcgacaagagcgtgtgtctgttcaccgacttcgacagccagaccaacgtgtcccagagcaaggactccgacgtgtacatcaccgataagtgcgtgctggacatgcggagcatggacttcaagagcaactccgccgtggcctggtccaacaagtccgatttcgcctgcgccaacgccttcaacaacagcattatccccgaggacacattcttcccaagccccgagagcagctgcggctttaccagcgagagctaccagcagggcgtgctgagcgccaccatcctgtacgagatcctgctgggcaaggccaccctgtacgccgtgctggtgtctgccctggtgctgatggctatggtcaagcggaaggacagccggggacgcgccaagagaagcggatctggcgtgaagcagaccctgaatttcgacctgctgaagctggctggcgacgtggaatccaacccaggccctactagtatggactggatttggcgcatccttttccttgtcggcgctgctaccggcgcgcattccttcgaacaggtgcaactggtgcagtccggcgctgaagtgaagaaacctggggccagcgtgaaggtgtcctgcaaggtgtccggctacacctttaccgactactacattacctgggtgcgccaggcccctggacaggccctggaatggatgggctggatctaccccggcagcggcaacaccaagtacagccagaagttccagggcagattcgtgttcagcgtggacaccagcgccagcaccgcctacctgcaactgtctagcctgaaggccgaagataccgccgtgtactactgcgccaactacggcaactattggttcgcctattggggccagggaacccttgtgaccgtgtcctctacgcgtgaggacctgaagaacgtgttcccacctgaggtggccgtgttcgagcctagcgaggccgagatcagccacacccagaaagccaccctcgtgtgcctggctaccggcttctaccccgaccatgtggaactgtcttggtgggtcaacggcaaagaggtgcacagcggcgtgtgtaccgacccccagccactgaaagaacagcccgccctgaacgacagccggtactgcctgagcagcagactgagagtgtccgccaccttctggcagaacccccggaaccacttcagatgccaggtgcagttctacggcctgagcgagaacgacgagtggacccaggacagagccaagcccgtgacccagatcgtgtctgccgaagcctggggcagagccgattgcgacgtgaagctggtggaaaagagcttcgagacagacaccaacctgaacttccagaacctgagcgtgatcggcttcagaatcctgctgctgaaagtggccggctttaacctgctgatgaccctgcggctgtggtccagc

SEQ ID NO: 4446 - DNA, 2274 bp, synthetic construct
  source 1..2274: mol_type = other DNA
atggccttaccagtgaccgccttgctcctgccgctggccttgctgctccacgccgccaggccggaagtgcagctggttgaatctggcggaggactggttcagcctggcggatctctgagactgtcttgtgccgccagcggcttcagcttcagcgacttttggatgagctgggtccgacaggcccctggcaaaggacttgaatgggtcgccacaatcagccaggccggcagcgagaaggactacgtggactctgtgaagggcagattcaccatcagccgggacaacgccaagaagtccctgtacctccagatgaacagcctgagagccgaggacaccgccgtgtactattgtgcctctggcgtgtacagcttcgactacagaggccagggcaccctggtcacagtctcttctggtaccggcggaggcggatctggcggcggaggtagcggtggcggaggatctgaattcgacatccagatgacccagagccccagcagcctgtctgccagcgtgggcgacagagtgaccatcacctgtagagccagccagggcatcagctcttggctggcctggtatcagcagaagcccgagaaggcccccaagagcctgatctacgccgcctctagtctccagagcggcgtgcccagcagattttctggcagcggctccggcaccgacttcaccctgacaatcagctccctccagcccgaggacttcgccacctactactgccagcagtacaacagctaccctcccacctttggcggaggcaccaaggtggaaatcaagctcgagatccagaaccctgatcctgccgtgtaccagctgcgggatagcaagagcagcgacaagagcgtgtgtctgttcaccgacttcgacagccagaccaacgtgtcccagagcaaggactccgacgtgtacatcaccgataagtgcgtgctggacatgcggagcatggacttcaagagcaactccgccgtggcctggtccaacaagtccgatttcgcctgcgccaacgccttcaacaacagcattatccccgaggacacattcttcccaagccccgagagcagctgcggctttaccagcgagagctaccagcagggcgtgctgagcgccaccatcctgtacgagatcctgctgggcaaggccaccctgtacgccgtgctggtgtctgccctggtgctgatggctatggtcaagcggaaggacagccggggacgcgccaagagaagcggatctggcgtgaagcagaccctgaatttcgacctgctgaagctggctggcgacgtggaatccaacccaggccctactagtatggactggatttggcgcatccttttccttgtcggcgctgctaccggcgcgcattccttcgaagaagtgcaactggtgcagtctggcggagggctggtgcatcctgggggaagcctgagactgagctgtgccggctctggcttcgccttcagcagcagcaccatgcactggatcagacaggcccctggcaagggcctggaatggatcagcctgatcggaagcggagggggcatctactacggcgacagcgtgaagggccggttcaccatcagccgggacaacgccaagaacagcctgtacctccagatgaactccctgcgggccgaggacatggccgtgtactattgtgtgcggggctacttcgactgggtggactacttcgattactggggccagggcaccctcgtgaccgtgtcatctacgcgtgaggacctgaagaacgtgttcccacctgaggtggccgtgttcgagcctagcgaggccgagatcagccacacccagaaagccaccctcgtgtgcctggctaccggcttctaccccgaccatgtggaactgtcttggtgggtcaacggcaaagaggtgcacagcggcgtgtgtaccgacccccagccactgaaagaacagcccgccctgaacgacagccggtactgcctgagcagcagactgagagtgtccgccaccttctggcagaacccccggaaccacttcagatgccaggtgcagttctacggcctgagcgagaacgacgagtggacccaggacagagccaagcccgtgacccagatcgtgtctgccgaagcctggggcagagccgattgcgacgtgaagctggtggaaaagagcttcgagacagacaccaacctgaacttccagaacctgagcgtgatcggcttcagaatcctgctgctgaaagtggccggctttaacctgctgatgaccctgcggctgtggtccagc

SEQ ID NO: 4447 - DNA, 2304 bp, synthetic construct
  source 1..2304: mol_type = other DNA
atggccttaccagtgaccgccttgctcctgccgctggccttgctgctccacgccgccaggccggaagtgcagctggttgaatctggcggaggactggttcagcctggcggatctctgagactgtcttgtgccgccagcggcttcagcttcagcgacttttggatgagctgggtccgacaggcccctggcaaaggacttgaatgggtcgccacaatcagccaggccggcagcgagaaggactacgtggactctgtgaagggcagattcaccatcagccgggacaacgccaagaagtccctgtacctccagatgaacagcctgagagccgaggacaccgccgtgtactattgtgcctctggcgtgtacagcttcgactacagaggccagggcaccctggtcacagtctcttctggtaccggcggaggcggatctggcggcggaggtagcggtggcggaggatctgaattcgacgacatcgtgatgacacagtcaccagatagcctcaccgtctccctgggggagcggaccaccattaattgtaaatccagccaaagcgtgctggactcaagcaagaacaagaatagcctcgcctggtatcagcagaagcccggtcagcctccaaagctgctgctttcttgggcctccaccagagagtccgggattcctgataggtttagtggttcaggctccggcacagattttactctgaccattgattctctccagccagaggattctgcaacttattactgccagcaaagcgcccactttcctataacttttggccagggaacccgacttgaaatcaagctcgagatccagaaccctgatcctgccgtgtaccagctgcgggatagcaagagcagcgacaagagcgtgtgtctgttcaccgacttcgacagccagaccaacgtgtcccagagcaaggactccgacgtgtacatcaccgataagtgcgtgctggacatgcggagcatggacttcaagagcaactccgccgtggcctggtccaacaagtccgatttcgcctgcgccaacgccttcaacaacagcattatccccgaggacacattcttcccaagccccgagagcagctgcggctttaccagcgagagctaccagcagggcgtgctgagcgccaccatcctgtacgagatcctgctgggcaaggccaccctgtacgccgtgctggtgtctgccctggtgctgatggctatggtcaagcggaaggacagccggggacgcgccaagagaagcggatctggcgtgaagcagaccctgaatttcgacctgctgaagctggctggcgacgtggaatccaacccaggccctactagtatggactggatttggcgcatccttttccttgtcggcgctgctaccggcgcgcattccttcgaacaggtgcagctggtgcagagcggtgccgaagtgaagaaaccaggtgcatccgttaaagtttcatgtaaggctagtggatataccttcaccaattacggaatgaactgggtgaaacaggcccctggccagggactgaagtggatggggtggattaacacctacaccggggagccgacttatgcagacgactttaaggggcgggtcacgatgacctccgacacctccaccagtaccgcctacctggagctgcacaaccttaggtcagacgataccgccgtgtattactgtgcccgatggtcttggtccgacggatactatgtctacttcgactattggggccaggggaccacagttaccgtgtcctctacgcgtgaggacctgaagaacgtgttcccacctgaggtggccgtgttcgagcctagcgaggccgagatcagccacacccagaaagccaccctcgtgtgcctggctaccggcttctaccccgaccatgtggaactgtcttggtgggtcaacggcaaagaggtgcacagcggcgtgtgtaccgacccccagccactgaaagaacagcccgccctgaacgacagccggtactgcctgagcagcagactgagagtgtccgccaccttctggcagaacccccggaaccacttcagatgccaggtgcagttctacggcctgagcgagaacgacgagtggacccaggacagagccaagcccgtgacccagatcgtgtctgccgaagcctggggcagagccgattgcgacgtgaagctggtggaaaagagcttcgagacagacaccaacctgaacttccagaacctgagcgtgatcggcttcagaatcctgctgctgaaagtggccggctttaacctgctgatgaccctgcggctgtggtccagc

SEQ ID NO: 4448 - DNA, 2292 bp, synthetic construct
  source 1..2292: mol_type = other DNA
atggccttaccagtgaccgccttgctcctgccgctggccttgctgctccacgccgccaggccggaagtgcagctggttgaatctggcggaggactggttcagcctggcggatctctgagactgtcttgtgccgccagcggcttcagcttcagcgacttttggatgagctgggtccgacaggcccctggcaaaggacttgaatgggtcgccacaatcagccaggccggcagcgagaaggactacgtggactctgtgaagggcagattcaccatcagccgggacaacgccaagaagtccctgtacctccagatgaacagcctgagagccgaggacaccgccgtgtactattgtgcctctggcgtgtacagcttcgactacagaggccagggcaccctggtcacagtctcttctggtaccggcggaggcggatctggcggcggaggtagcggtggcggaggatctgaattcgacgagatcgtgctgacacagagccctggaagcctggccgtgtctcctggcgagcgcgtgacaatgagctgcaagagcagccagagcgtgttcttcagcagctcccagaagaactacctggcctggtatcagcagatccccggccagagccccagactgctgatctactgggccagcaccagagaaagcggcgtgcccgatagattcaccggcagcggctctggcaccgacttcaccctgacaatcagcagcgtgcagcccgaggacctggctatctactactgccaccagtacctgagcagccggaccttcggccagggcaccaagctggaaatcaagagactcgagatccagaaccctgatcctgccgtgtaccagctgcgggatagcaagagcagcgacaagagcgtgtgtctgttcaccgacttcgacagccagaccaacgtgtcccagagcaaggactccgacgtgtacatcaccgataagtgcgtgctggacatgcggagcatggacttcaagagcaactccgccgtggcctggtccaacaagtccgatttcgcctgcgccaacgccttcaacaacagcattatccccgaggacacattcttcccaagccccgagagcagctgcggctttaccagcgagagctaccagcagggcgtgctgagcgccaccatcctgtacgagatcctgctgggcaaggccaccctgtacgccgtgctggtgtctgccctggtgctgatggctatggtcaagcggaaggacagccggggacgcgccaagagaagcggatctggcgtgaagcagaccctgaatttcgacctgctgaagctggctggcgacgtggaatccaacccaggccctactagtatggactggatttggcgcatccttttccttgtcggcgctgctaccggcgcgcattccttcgaacaggtgcaactgcagcagcctggcgctgaggtcgtgaagccaggcgcttccgtgaagatgtcctgcaaggccagcggctacaccttcaccagctactacatccactggatcaagcagacccctggacagggcctggaatgggtgggagtgatctaccccggcaacgacgacatcagctacaaccagaagttccagggcaaggccaccctgaccgccgacaagtctagcaccaccgcctacatgcaactgtccagcctgaccagcgaggacagcgccgtgtactactgcgccagagaagtgcggctgcggtacttcgatgtgtggggccagggaaccaccgtgaccgtgtcatctacgcgtgaggacctgaagaacgtgttcccacctgaggtggccgtgttcgagcctagcgaggccgagatcagccacacccagaaagccaccctcgtgtgcctggctaccggcttctaccccgaccatgtggaactgtcttggtgggtcaacggcaaagaggtgcacagcggcgtgtgtaccgacccccagccactgaaagaacagcccgccctgaacgacagccggtactgcctgagcagcagactgagagtgtccgccaccttctggcagaacccccggaaccacttcagatgccaggtgcagttctacggcctgagcgagaacgacgagtggacccaggacagagccaagcccgtgacccagatcgtgtctgccgaagcctggggcagagccgattgcgacgtgaagctggtggaaaagagcttcgagacagacaccaacctgaacttccagaacctgagcgtgatcggcttcagaatcctgctgctgaaagtggccggctttaacctgctgatgaccctgcggctgtggtccagc

SEQ ID NO: 4449 - DNA, 2304 bp, synthetic construct
  source 1..2304: mol_type = other DNA
atggccttaccagtgaccgccttgctcctgccgctggccttgctgctccacgccgccaggccggaagtgcagctggttgaatctggcggaggactggttcagcctggcggatctctgagactgtcttgtgccgccagcggcttcagcttcagcgacttttggatgagctgggtccgacaggcccctggcaaaggacttgaatgggtcgccacaatcagccaggccggcagcgagaaggactacgtggactctgtgaagggcagattcaccatcagccgggacaacgccaagaagtccctgtacctccagatgaacagcctgagagccgaggacaccgccgtgtactattgtgcctctggcgtgtacagcttcgactacagaggccagggcaccctggtcacagtctcttctggtaccggcggaggcggatctggcggcggaggtagcggtggcggaggatctgaattcgatgtgctgctgacccagagccctctgagcctgcctgtgacactgggacagcctgccagcatctcctgtcggagcagccagaccatcgtgcacagcaacggcaacacctacctggaatggttccagcagcggccaggccagagccccagactgctgatctaccaggtgtccaacagattcagcggcgtgcccgacagattctccggcagcggctctggcaccgacttcaccctgaagatcagccgggtggaagccgaggacgtgggcgtgtactactgttttcaaggcagccacgtgccccggacctttggcggaggaacaaaggtggaaatcaagagagccctcgagatccagaaccctgatcctgccgtgtaccagctgcgggatagcaagagcagcgacaagagcgtgtgtctgttcaccgacttcgacagccagaccaacgtgtcccagagcaaggactccgacgtgtacatcaccgataagtgcgtgctggacatgcggagcatggacttcaagagcaactccgccgtggcctggtccaacaagtccgatttcgcctgcgccaacgccttcaacaacagcattatccccgaggacacattcttcccaagccccgagagcagctgcggctttaccagcgagagctaccagcagggcgtgctgagcgccaccatcctgtacgagatcctgctgggcaaggccaccctgtacgccgtgctggtgtctgccctggtgctgatggctatggtcaagcggaaggacagccggggacgcgccaagagaagcggatctggcgtgaagcagaccctgaatttcgacctgctgaagctggctggcgacgtggaatccaacccaggccctactagtatggactggatttggcgcatccttttccttgtcggcgctgctaccggcgcgcattccttcgaacagatccaactggtgcagagcggcagcgagctgaagaaacctggggccagcgtgaaggtgtcctgcaaggccagcggctacacctttaccaactacggcatgaactgggtgcgccaggcccctggacagggcctgaaatggatgggctggatcaacaccaacaccggcgagcctaagtacgccgaagagttcaagggcagattcgccctgagcctggacaccagcgtgtccacagcctacctccagatcaacagcctgaaggccgaggataccgccgtgtacttctgcgccagaggctacggcaactacgccagaggggcttggctggcctattggggccagggaacactcgtgaccgtgtcctctacgcgtgaggacctgaagaacgtgttcccacctgaggtggccgtgttcgagcctagcgaggccgagatcagccacacccagaaagccaccctcgtgtgcctggctaccggcttctaccccgaccatgtggaactgtcttggtgggtcaacggcaaagaggtgcacagcggcgtgtgtaccgacccccagccactgaaagaacagcccgccctgaacgacagccggtactgcctgagcagcagactgagagtgtccgccaccttctggcagaacccccggaaccacttcagatgccaggtgcagttctacggcctgagcgagaacgacgagtggacccaggacagagccaagcccgtgacccagatcgtgtctgccgaagcctggggcagagccgattgcgacgtgaagctggtggaaaagagcttcgagacagacaccaacctgaacttccagaacctgagcgtgatcggcttcagaatcctgctgctgaaagtggccggctttaacctgctgatgaccctgcggctgtggtccagc

SEQ ID NO: 4450 - DNA, 2259 bp, synthetic construct
  source 1..2259: mol_type = other DNA
atggccttaccagtgaccgccttgctcctgccgctggccttgctgctccacgccgccaggccggaagtgcagctggttgaatctggcggaggactggttcagcctggcggatctctgagactgtcttgtgccgccagcggcttcagcttcagcgacttttggatgagctgggtccgacaggcccctggcaaaggacttgaatgggtcgccacaatcagccaggccggcagcgagaaggactacgtggactctgtgaagggcagattcaccatcagccgggacaacgccaagaagtccctgtacctccagatgaacagcctgagagccgaggacaccgccgtgtactattgtgcctctggcgtgtacagcttcgactacagaggccagggcaccctggtcacagtctcttctggtaccggcggaggcggatctggcggcggaggtagcggtggcggaggatctgaattcgacgagatcgtgctgacacagagccctgccacactctctctgagccctggcgaaagagccaccctgagctgtagcgccagcagcagcatcaactacatctactggctccagcagaagcccggccaggcccccagaatcctgatctacctgaccagcaacctggcctccggcgtgccagccagattttctggcagcggctccggcaccgacttcaccctgacaatcagcagcctggaacccgaggacttcgccgtgtactactgcctccagtggtccagcaaccccctgacctttggcggaggcaccaaggtggaaatcaagctcgagatccagaaccctgatcctgccgtgtaccagctgcgggatagcaagagcagcgacaagagcgtgtgtctgttcaccgacttcgacagccagaccaacgtgtcccagagcaaggactccgacgtgtacatcaccgataagtgcgtgctggacatgcggagcatggacttcaagagcaactccgccgtggcctggtccaacaagtccgatttcgcctgcgccaacgccttcaacaacagcattatccccgaggacacattcttcccaagccccgagagcagctgcggctttaccagcgagagctaccagcagggcgtgctgagcgccaccatcctgtacgagatcctgctgggcaaggccaccctgtacgccgtgctggtgtctgccctggtgctgatggctatggtcaagcggaaggacagccggggacgcgccaagagaagcggatctggcgtgaagcagaccctgaatttcgacctgctgaagctggctggcgacgtggaatccaacccaggccctactagtatggactggatttggcgcatccttttccttgtcggcgctgctaccggcgcgcattccttcgaagaagtgcaactggtggaaagcgggggaggacttgtgaagcctggcggctctctgagactgagctgtgccgcctctggcttcaccttcagcagctacgacatgagctgggtgcgccaggctcctggcaagggactggaatgggtgtccaccatcagcagcggcggcagctacacctactacctggacagcatcaagggccggttcaccatctccagagacaacgccaagaacagcctgtacctccagatgaactccctgcgggccgaggacacagccgtgtattattgcgccagacagggcctggattactggggcagaggcacccttgtgaccgtgtcctctacgcgtgaggacctgaagaacgtgttcccacctgaggtggccgtgttcgagcctagcgaggccgagatcagccacacccagaaagccaccctcgtgtgcctggctaccggcttctaccccgaccatgtggaactgtcttggtgggtcaacggcaaagaggtgcacagcggcgtgtgtaccgacccccagccactgaaagaacagcccgccctgaacgacagccggtactgcctgagcagcagactgagagtgtccgccaccttctggcagaacccccggaaccacttcagatgccaggtgcagttctacggcctgagcgagaacgacgagtggacccaggacagagccaagcccgtgacccagatcgtgtctgccgaagcctggggcagagccgattgcgacgtgaagctggtggaaaagagcttcgagacagacaccaacctgaacttccagaacctgagcgtgatcggcttcagaatcctgctgctgaaagtggccggctttaacctgctgatgaccctgcggctgtggtccagc

SEQ ID NO: 4451 - DNA, 2286 bp, synthetic construct
  source 1..2286: mol_type = other DNA
atggccttaccagtgaccgccttgctcctgccgctggccttgctgctccacgccgccaggccggaagtgcagctggttgaatctggcggaggactggttcagcctggcggatctctgagactgtcttgtgccgccagcggcttcagcttcagcgacttttggatgagctgggtccgacaggcccctggcaaaggacttgaatgggtcgccacaatcagccaggccggcagcgagaaggactacgtggactctgtgaagggcagattcaccatcagccgggacaacgccaagaagtccctgtacctccagatgaacagcctgagagccgaggacaccgccgtgtactattgtgcctctggcgtgtacagcttcgactacagaggccagggcaccctggtcacagtctcttctggtaccggcggaggcggatctggcggcggaggtagcggtggcggaggatctgaattcgacatcgtgatgacccagagccccgatagcctggccgtgtctctgggagagagagccaccatcaactgccgggccagcaagagcgtgtccaccagcggctacagcttcatgcactggtatcagcagaagcccggccagccccccaagctgctgatctacctggcctccaacctggaaagcggcgtgcccgatagattcagcggcagcggctctggcaccgacttcaccctgaccatcagttctcttcaggccgaggacgtggccgtgtactactgccagcacagcagagaggtgccctggacattcggccagggcacaaaggtggaaatcaagcggctcgagatccagaaccctgatcctgccgtgtaccagctgcgggatagcaagagcagcgacaagagcgtgtgtctgttcaccgacttcgacagccagaccaacgtgtcccagagcaaggactccgacgtgtacatcaccgataagtgcgtgctggacatgcggagcatggacttcaagagcaactccgccgtggcctggtccaacaagtccgatttcgcctgcgccaacgccttcaacaacagcattatccccgaggacacattcttcccaagccccgagagcagctgcggctttaccagcgagagctaccagcagggcgtgctgagcgccaccatcctgtacgagatcctgctgggcaaggccaccctgtacgccgtgctggtgtctgccctggtgctgatggctatggtcaagcggaaggacagccggggacgcgccaagagaagcggatctggcgtgaagcagaccctgaatttcgacctgctgaagctggctggcgacgtggaatccaacccaggccctactagtatggactggatttggcgcatccttttccttgtcggcgctgctaccggcgcgcattccttcgaacaggtgcagctggtgcagtctggggccgaagtgaagaaacctggggccagcgtgaaggtgtcctgcaaggccagcggatacacctttaccaactacggcatgaactgggtgcgccaggcccctggacagggcctggaatggatgggctggatcaacacctacaccggcgagcccacatacgccgacgccttcaagggcagattcgccttcagcctggacaccagcacctccaccgcctacctccagatcaacagcctgcggagcgacgacaccgccgtgtattattgcgccagagattacggcgactacgggatggactattggggccagggaaccaccgtgaccgtgtcctctacgcgtgaggacctgaagaacgtgttcccacctgaggtggccgtgttcgagcctagcgaggccgagatcagccacacccagaaagccaccctcgtgtgcctggctaccggcttctaccccgaccatgtggaactgtcttggtgggtcaacggcaaagaggtgcacagcggcgtgtgtaccgacccccagccactgaaagaacagcccgccctgaacgacagccggtactgcctgagcagcagactgagagtgtccgccaccttctggcagaacccccggaaccacttcagatgccaggtgcagttctacggcctgagcgagaacgacgagtggacccaggacagagccaagcccgtgacccagatcgtgtctgccgaagcctggggcagagccgattgcgacgtgaagctggtggaaaagagcttcgagacagacaccaacctgaacttccagaacctgagcgtgatcggcttcagaatcctgctgctgaaagtggccggctttaacctgctgatgaccctgcggctgtggtccagc

SEQ ID NO: 4452 - DNA, 2274 bp, synthetic construct
  source 1..2274: mol_type = other DNA
atggccttaccagtgaccgccttgctcctgccgctggccttgctgctccacgccgccaggccggaagtgcagctggttgaatctggcggaggactggttcagcctggcggatctctgagactgtcttgtgccgccagcggcttcagcttcagcgacttttggatgagctgggtccgacaggcccctggcaaaggacttgaatgggtcgccacaatcagccaggccggcagcgagaaggactacgtggactctgtgaagggcagattcaccatcagccgggacaacgccaagaagtccctgtacctccagatgaacagcctgagagccgaggacaccgccgtgtactattgtgcctctggcgtgtacagcttcgactacagaggccagggcaccctggtcacagtctcttctggtaccggcggaggcggatctggcggcggaggtagcggtggcggaggatctgaattcgacatcgtgatgacccagacccccctgaccctgagcgtgacaatcggacagcctgccagcatctcctgcaagagcagccagagcctgctggacagcgacggcaagacctacctgaactggctgctgcagaggccaggccagagccccgagagactgatctacctggtgtccaagctggactccggcgtgcccgatagattcacaggcagcggctccggcaccgacttcaccctgaagatcagccgggtggaagccgaggacctgggcgtgtactgttgttggcagggcacccacttcccttacaccttcggcggagggaccaaggtggaaatcaagggcctcgagatccagaaccctgatcctgccgtgtaccagctgcgggatagcaagagcagcgacaagagcgtgtgtctgttcaccgacttcgacagccagaccaacgtgtcccagagcaaggactccgacgtgtacatcaccgataagtgcgtgctggacatgcggagcatggacttcaagagcaactccgccgtggcctggtccaacaagtccgatttcgcctgcgccaacgccttcaacaacagcattatccccgaggacacattcttcccaagccccgagagcagctgcggctttaccagcgagagctaccagcagggcgtgctgagcgccaccatcctgtacgagatcctgctgggcaaggccaccctgtacgccgtgctggtgtctgccctggtgctgatggctatggtcaagcggaaggacagccggggacgcgccaagagaagcggatctggcgtgaagcagaccctgaatttcgacctgctgaagctggctggcgacgtggaatccaacccaggccctactagtatggactggatttggcgcatccttttccttgtcggcgctgctaccggcgcgcattccttcgaacaggtgcaactgcagcagcctggcgctgaacttgtgcggccaggcgcctctgtgaagctgagctgtaaagccagcggctacaccttcaccagctactggatgaactgggtcaagcagcgcccaggccagggcctggaatggatcggaatgatcgaccccagcgacagcgagacacactacaaccacatcttcaaggacaaggccaccctgaccgtggacaagtccagcagcacagcctacctgcaactgtccagcctgaccagcgaggacagcgccgtgtactactgcgcccggaacctgtatctgtggggccagggaacaagcgtgaccgtgtctagcacgcgtgaggacctgaagaacgtgttcccacctgaggtggccgtgttcgagcctagcgaggccgagatcagccacacccagaaagccaccctcgtgtgcctggctaccggcttctaccccgaccatgtggaactgtcttggtgggtcaacggcaaagaggtgcacagcggcgtgtgtaccgacccccagccactgaaagaacagcccgccctgaacgacagccggtactgcctgagcagcagactgagagtgtccgccaccttctggcagaacccccggaaccacttcagatgccaggtgcagttctacggcctgagcgagaacgacgagtggacccaggacagagccaagcccgtgacccagatcgtgtctgccgaagcctggggcagagccgattgcgacgtgaagctggtggaaaagagcttcgagacagacaccaacctgaacttccagaacctgagcgtgatcggcttcagaatcctgctgctgaaagtggccggctttaacctgctgatgaccctgcggctgtggtccagc

SEQ ID NO: 4453 - DNA, 2298 bp, synthetic construct
  source 1..2298: mol_type = other DNA
atggccttaccagtgaccgccttgctcctgccgctggccttgctgctccacgccgccaggccggaagtgcagctggttgaatctggcggaggactggttcagcctggcggatctctgagactgtcttgtgccgccagcggcttcagcttcagcgacttttggatgagctgggtccgacaggcccctggcaaaggacttgaatgggtcgccacaatcagccaggccggcagcgagaaggactacgtggactctgtgaagggcagattcaccatcagccgggacaacgccaagaagtccctgtacctccagatgaacagcctgagagccgaggacaccgccgtgtactattgtgcctctggcgtgtacagcttcgactacagaggccagggcaccctggtcacagtctcttctggtaccggcggaggcggatctggcggcggaggtagcggtggcggaggatctgaattcgacatcgtgatgacccagagccccgatagcctggccgtgtctctgggagagagagccaccatcaactgcgagagcagccagagcctgctgaacagcggcaaccagaagaactacctgacctggtatcagcagaagcccggccagccccccaagcccctgatctattgggccagcaccagagaaagcggcgtgcccgatagattcagcggcagcggaagcggcaccgacttcaccctgaccatcagttctcttcaggccgaggacgtggccgtgtactactgccagaacgactacagctacccctacaccttcggccagggcaccaagctggaaatcaagagactcgagatccagaaccctgatcctgccgtgtaccagctgcgggatagcaagagcagcgacaagagcgtgtgtctgttcaccgacttcgacagccagaccaacgtgtcccagagcaaggactccgacgtgtacatcaccgataagtgcgtgctggacatgcggagcatggacttcaagagcaactccgccgtggcctggtccaacaagtccgatttcgcctgcgccaacgccttcaacaacagcattatccccgaggacacattcttcccaagccccgagagcagctgcggctttaccagcgagagctaccagcagggcgtgctgagcgccaccatcctgtacgagatcctgctgggcaaggccaccctgtacgccgtgctggtgtctgccctggtgctgatggctatggtcaagcggaaggacagccggggacgcgccaagagaagcggatctggcgtgaagcagaccctgaatttcgacctgctgaagctggctggcgacgtggaatccaacccaggccctactagtatggactggatttggcgcatccttttccttgtcggcgctgctaccggcgcgcattccttcgaagaagtgcagctggtgcagtctggggccgaagtgaagaagcctggcgagagcctgaagatcagctgcaagggcagcggctacagcttcaccgactactacatgaagtgggccagacagatgcccggcaagggcctggaatggatgggcgacatcatccccagcaacggggccaccttctacaaccagaaattcaagggccaagtgaccatctccgccgacaagagcatcagcaccacctacctccagtggtccagcctgaaggccagcgacaccgccatgtactattgcgccagaagccatctgctgcgggccagttggttcgcctattggggccagggaacaatggtcacagtgtccagcacgcgtgaggacctgaagaacgtgttcccacctgaggtggccgtgttcgagcctagcgaggccgagatcagccacacccagaaagccaccctcgtgtgcctggctaccggcttctaccccgaccatgtggaactgtcttggtgggtcaacggcaaagaggtgcacagcggcgtgtgtaccgacccccagccactgaaagaacagcccgccctgaacgacagccggtactgcctgagcagcagactgagagtgtccgccaccttctggcagaacccccggaaccacttcagatgccaggtgcagttctacggcctgagcgagaacgacgagtggacccaggacagagccaagcccgtgacccagatcgtgtctgccgaagcctggggcagagccgattgcgacgtgaagctggtggaaaagagcttcgagacagacaccaacctgaacttccagaacctgagcgtgatcggcttcagaatcctgctgctgaaagtggccggctttaacctgctgatgaccctgcggctgtggtccagc

SEQ ID NO: 4454 - DNA, 2283 bp, synthetic construct
  source 1..2283: mol_type = other DNA
atggccttaccagtgaccgccttgctcctgccgctggccttgctgctccacgccgccaggccggaagtgcagctggttgaatctggcggaggactggttcagcctggcggatctctgagactgtcttgtgccgccagcggcttcagcttcagcgacttttggatgagctgggtccgacaggcccctggcaaaggacttgaatgggtcgccacaatcagccaggccggcagcgagaaggactacgtggactctgtgaagggcagattcaccatcagccgggacaacgccaagaagtccctgtacctccagatgaacagcctgagagccgaggacaccgccgtgtactattgtgcctctggcgtgtacagcttcgactacagaggccagggcaccctggtcacagtctcttctggtaccggcggaggcggatctggcggcggaggtagcggtggcggaggatctgaattcgacatccagatgacccagtctaccagttccctgagtgcatccctcggagacagggtgacgatcagttgcagcgcaagccaagggatcaataactatctgaactggtatcagcagaaaccggacggaacagtcgaactcctgatttattacaccagcacccttcagagtggcgtcccttcccggttcagtggctccggaagcgggaccgattactccctgaccatttctaatctggagccagaggacataggaacgtattattgccagcagtatagtaaactgccacgaacttttggaggggggacgaaactggagatcaaactcgagatccagaaccctgatcctgccgtgtaccagctgcgggatagcaagagcagcgacaagagcgtgtgtctgttcaccgacttcgacagccagaccaacgtgtcccagagcaaggactccgacgtgtacatcaccgataagtgcgtgctggacatgcggagcatggacttcaagagcaactccgccgtggcctggtccaacaagtccgatttcgcctgcgccaacgccttcaacaacagcattatccccgaggacacattcttcccaagccccgagagcagctgcggctttaccagcgagagctaccagcagggcgtgctgagcgccaccatcctgtacgagatcctgctgggcaaggccaccctgtacgccgtgctggtgtctgccctggtgctgatggctatggtcaagcggaaggacagccggggacgcgccaagagaagcggatctggcgtgaagcagaccctgaatttcgacctgctgaagctggctggcgacgtggaatccaacccaggccctactagtatggactggatttggcgcatccttttccttgtcggcgctgctaccggcgcgcattccttcgaacaggtgcaactccagcagtccggaagcgagcttatgatgccaggggcatcagtgaagatcagctgcaaggctactggctacaccttctctaattactggatagagtgggttaaacaaaggccagggcacggcctggaatggatcggcgagatcctgcctgggacaggccgaaccatttataacgagaagttcaaaggcaaggctactttcaccgcagatataagctctaatacagtgcaaatgcagctctcttccctgacaagtgaggatagtgccgtgtattattgcgcacgaagagattactatggaaatttttattacgctatggattattggggtcaaggaacaagtgtgaccgttagcagcacgcgtgaggacctgaagaacgtgttcccacctgaggtggccgtgttcgagcctagcgaggccgagatcagccacacccagaaagccaccctcgtgtgcctggctaccggcttctaccccgaccatgtggaactgtcttggtgggtcaacggcaaagaggtgcacagcggcgtgtgtaccgacccccagccactgaaagaacagcccgccctgaacgacagccggtactgcctgagcagcagactgagagtgtccgccaccttctggcagaacccccggaaccacttcagatgccaggtgcagttctacggcctgagcgagaacgacgagtggacccaggacagagccaagcccgtgacccagatcgtgtctgccgaagcctggggcagagccgattgcgacgtgaagctggtggaaaagagcttcgagacagacaccaacctgaacttccagaacctgagcgtgatcggcttcagaatcctgctgctgaaagtggccggctttaacctgctgatgaccctgcggctgtggtccagc

SEQ ID NO: 4455 - DNA, 2268 bp, synthetic construct
  source 1..2268: mol_type = other DNA
atggccttaccagtgaccgccttgctcctgccgctggccttgctgctccacgccgccaggccggaagtgcagctggttgaatctggcggaggactggttcagcctggcggatctctgagactgtcttgtgccgccagcggcttcagcttcagcgacttttggatgagctgggtccgacaggcccctggcaaaggacttgaatgggtcgccacaatcagccaggccggcagcgagaaggactacgtggactctgtgaagggcagattcaccatcagccgggacaacgccaagaagtccctgtacctccagatgaacagcctgagagccgaggacaccgccgtgtactattgtgcctctggcgtgtacagcttcgactacagaggccagggcaccctggtcacagtctcttctggtaccggcggaggcggatctggcggcggaggtagcggtggcggaggatctgaattcgacatccagatgacccagagccctgccagcctgtccgtgtctgtgggcgagacagtgaccatcacctgtcgggccagcgagaacatctacagcaacctggcctggtatcagcagaagcagggcaagagcccccaactgctggtgtacgccgccaccaatctggccgatggcgtgcccagcagattttccggctctggcagcggcacccagtacagcctgaagatcaacagcctccagagcgaggacttcggcagctactactgccagcacttctggggcacctggacctttggaggaggcaccaccctggaaatcaagctcgagatccagaaccctgatcctgccgtgtaccagctgcgggatagcaagagcagcgacaagagcgtgtgtctgttcaccgacttcgacagccagaccaacgtgtcccagagcaaggactccgacgtgtacatcaccgataagtgcgtgctggacatgcggagcatggacttcaagagcaactccgccgtggcctggtccaacaagtccgatttcgcctgcgccaacgccttcaacaacagcattatccccgaggacacattcttcccaagccccgagagcagctgcggctttaccagcgagagctaccagcagggcgtgctgagcgccaccatcctgtacgagatcctgctgggcaaggccaccctgtacgccgtgctggtgtctgccctggtgctgatggctatggtcaagcggaaggacagccggggacgcgccaagagaagcggatctggcgtgaagcagaccctgaatttcgacctgctgaagctggctggcgacgtggaatccaacccaggccctactagtatggactggatttggcgcatccttttccttgtcggcgctgctaccggcgcgcattccttcgaagaagtgcaactccagcagagcggccctgagcttgtgaagcctggcgcttccgtgaagatgagctgcaaggccagcggctacaccttcaccgactactacatgaagtggatgaagcagagccacggcaagtccctggaatggatcggcgacatcaaccccaacaacggcggcaccacctacaaccagaagttcaagggcaaggccaccctgaccgtggacaagagcagcagcaccgcctacatgcaactgaacagcctgaccagcgaggacagcgccgtgtactactgcgccagagactacggctacggctatttcgactactggggccagggcacaaccctgacagtgtcctctacgcgtgaggacctgaagaacgtgttcccacctgaggtggccgtgttcgagcctagcgaggccgagatcagccacacccagaaagccaccctcgtgtgcctggctaccggcttctaccccgaccatgtggaactgtcttggtgggtcaacggcaaagaggtgcacagcggcgtgtgtaccgacccccagccactgaaagaacagcccgccctgaacgacagccggtactgcctgagcagcagactgagagtgtccgccaccttctggcagaacccccggaaccacttcagatgccaggtgcagttctacggcctgagcgagaacgacgagtggacccaggacagagccaagcccgtgacccagatcgtgtctgccgaagcctggggcagagccgattgcgacgtgaagctggtggaaaagagcttcgagacagacaccaacctgaacttccagaacctgagcgtgatcggcttcagaatcctgctgctgaaagtggccggctttaacctgctgatgaccctgcggctgtggtccagc

SEQ ID NO: 4456 - DNA, 2277 bp, synthetic construct
  source 1..2277: mol_type = other DNA
atggccttaccagtgaccgccttgctcctgccgctggccttgctgctccacgccgccaggccggaagtgcagctggttgaatctggcggaggactggttcagcctggcggatctctgagactgtcttgtgccgccagcggcttcagcttcagcgacttttggatgagctgggtccgacaggcccctggcaaaggacttgaatgggtcgccacaatcagccaggccggcagcgagaaggactacgtggactctgtgaagggcagattcaccatcagccgggacaacgccaagaagtccctgtacctccagatgaacagcctgagagccgaggacaccgccgtgtactattgtgcctctggcgtgtacagcttcgactacagaggccagggcaccctggtcacagtctcttctggtaccggcggaggcggatctggcggcggaggtagcggtggcggaggatctgaattcgagatcgtgctgacacagagccctggcaccctgagcctgtctccaggcgaaagagccacactgagctgtcgggcctctcagagcgtgggaggctacctggcttggtatcagcagaagccaggccaggcccccagactgctgatctacgacgccagcaatcgggccacaggcatccccgccagattttctggcagcggctccggcaccgacttcaccctgacaatcagcagcctggaacccgaggacttcgccgtgtactactgccagcagcggaacaactggccccccatgtacacattcggccagggcaccaagctggaaatcaagagactcgagatccagaaccctgatcctgccgtgtaccagctgcgggatagcaagagcagcgacaagagcgtgtgtctgttcaccgacttcgacagccagaccaacgtgtcccagagcaaggactccgacgtgtacatcaccgataagtgcgtgctggacatgcggagcatggacttcaagagcaactccgccgtggcctggtccaacaagtccgatttcgcctgcgccaacgccttcaacaacagcattatccccgaggacacattcttcccaagccccgagagcagctgcggctttaccagcgagagctaccagcagggcgtgctgagcgccaccatcctgtacgagatcctgctgggcaaggccaccctgtacgccgtgctggtgtctgccctggtgctgatggctatggtcaagcggaaggacagccggggacgcgccaagagaagcggatctggcgtgaagcagaccctgaatttcgacctgctgaagctggctggcgacgtggaatccaacccaggccctactagtatggactggatttggcgcatccttttccttgtcggcgctgctaccggcgcgcattccttcgaacaggtgcaactggtgcagagcggagccgaagtgaagaaacccggcagcagcgtgaaggtgtcctgcaaggcttccggcggcaccttcagcagctacgccatttcttgggtgcgccaggctcctggacagggcctggaatggatgggcggcatcatccctatcctgggcaccgccaactacgcccagaaattccagggcagagtgaccatcaccgccgacgagagcaccagcaccgcctacatggaactgagcagcctgcggagcgaggacacagccgtgtattattgcgccagatggggcggaggggccttcgacatttggggccagggaacaatggtcaccgtgtccagcacgcgtgaggacctgaagaacgtgttcccacctgaggtggccgtgttcgagcctagcgaggccgagatcagccacacccagaaagccaccctcgtgtgcctggctaccggcttctaccccgaccatgtggaactgtcttggtgggtcaacggcaaagaggtgcacagcggcgtgtgtaccgacccccagccactgaaagaacagcccgccctgaacgacagccggtactgcctgagcagcagactgagagtgtccgccaccttctggcagaacccccggaaccacttcagatgccaggtgcagttctacggcctgagcgagaacgacgagtggacccaggacagagccaagcccgtgacccagatcgtgtctgccgaagcctggggcagagccgattgcgacgtgaagctggtggaaaagagcttcgagacagacaccaacctgaacttccagaacctgagcgtgatcggcttcagaatcctgctgctgaaagtggccggctttaacctgctgatgaccctgcggctgtggtccagc

SEQ ID NO: 4457 - DNA, 2262 bp, synthetic construct
  source 1..2262: mol_type = other DNA
atggccttaccagtgaccgccttgctcctgccgctggccttgctgctccacgccgccaggccggaagtgcagctggttgaatctggcggaggactggttcagcctggcggatctctgagactgtcttgtgccgccagcggcttcagcttcagcgacttttggatgagctgggtccgacaggcccctggcaaaggacttgaatgggtcgccacaatcagccaggccggcagcgagaaggactacgtggactctgtgaagggcagattcaccatcagccgggacaacgccaagaagtccctgtacctccagatgaacagcctgagagccgaggacaccgccgtgtactattgtgcctctggcgtgtacagcttcgactacagaggccagggcaccctggtcacagtctcttctggtaccggcggaggcggatctggcggcggaggtagcggtggcggaggatctgaattccagatcgtgctgacacagagccctgccctgatgagcgccagccctggcgagaaagtgaccatgacctgtagcgccagcagcagcgtgcgctacatgtactggtatcagcagaagcccagaagcagccccaagccctggattcacctgaccagcaatctggcctctggcgtgcccgctagattttccggctctggcagcggcaccagctacagcctgaccatcagcagcatggaagccgaggacgccgccacctactactgccagcagtggtccagccaccccttcacatttggctccggcaccaagctggaaatcaagctcgagatccagaaccctgatcctgccgtgtaccagctgcgggatagcaagagcagcgacaagagcgtgtgtctgttcaccgacttcgacagccagaccaacgtgtcccagagcaaggactccgacgtgtacatcaccgataagtgcgtgctggacatgcggagcatggacttcaagagcaactccgccgtggcctggtccaacaagtccgatttcgcctgcgccaacgccttcaacaacagcattatccccgaggacacattcttcccaagccccgagagcagctgcggctttaccagcgagagctaccagcagggcgtgctgagcgccaccatcctgtacgagatcctgctgggcaaggccaccctgtacgccgtgctggtgtctgccctggtgctgatggctatggtcaagcggaaggacagccggggacgcgccaagagaagcggatctggcgtgaagcagaccctgaatttcgacctgctgaagctggctggcgacgtggaatccaacccaggccctactagtatggactggatttggcgcatccttttccttgtcggcgctgctaccggcgcgcattccttcgaagatgtgcaactccaggaaagcggccctggccttgtgaagcctagccagagcctgtccctgacctgtaccgtgaccggcttcagcatcaccagcgactactcttggaactggatcagacagttccctggcaacaaactggaatggatgggctacatcagctactccggccacacctcctacaaccccagcctggaaagccggatctccatcaccagagacaccagcaagaaccagttcttcttgcaactgaacagcgtgaccaccgaggataccgccacatattactgtaccagaggcaactgggacgtggtgtactggggccagggcacacttgtgaccgtgtctgctacgcgtgaggacctgaagaacgtgttcccacctgaggtggccgtgttcgagcctagcgaggccgagatcagccacacccagaaagccaccctcgtgtgcctggctaccggcttctaccccgaccatgtggaactgtcttggtgggtcaacggcaaagaggtgcacagcggcgtgtgtaccgacccccagccactgaaagaacagcccgccctgaacgacagccggtactgcctgagcagcagactgagagtgtccgccaccttctggcagaacccccggaaccacttcagatgccaggtgcagttctacggcctgagcgagaacgacgagtggacccaggacagagccaagcccgtgacccagatcgtgtctgccgaagcctggggcagagccgattgcgacgtgaagctggtggaaaagagcttcgagacagacaccaacctgaacttccagaacctgagcgtgatcggcttcagaatcctgctgctgaaagtggccggctttaacctgctgatgaccctgcggctgtggtccagc

SEQ ID NO: 4458 - DNA, 2292 bp, synthetic construct
  source 1..2292: mol_type = other DNA
atggccttaccagtgaccgccttgctcctgccgctggccttgctgctccacgccgccaggccggaagtgcagctggttgaatctggcggaggactggttcagcctggcggatctctgagactgtcttgtgccgccagcggcttcagcttcagcgacttttggatgagctgggtccgacaggcccctggcaaaggacttgaatgggtcgccacaatcagccaggccggcagcgagaaggactacgtggactctgtgaagggcagattcaccatcagccgggacaacgccaagaagtccctgtacctccagatgaacagcctgagagccgaggacaccgccgtgtactattgtgcctctggcgtgtacagcttcgactacagaggccagggcaccctggtcacagtctcttctggtaccggcggaggcggatctggcggcggaggtagcggtggcggaggatctgaattcgacgtcgtgatgacccagagccctctgagcctgcctgtgacactgggacagcctgccagcatctcctgtcggagcagccagagcatcgtgcacagcgacggcaacacctacctggaatggtatcagcagcggccaggccagagccccagacggctgatctacaaggtgtccaacagattcagcggcgtgcccgacagattctccggcagcggctctggcaccgacttcaccctgaagatcagcagagtggaagccgaggacgtgggcgtgtactactgttttcaaggcagccacgccccctggacctttggcggaggaacaaaggtggaaatcaagctcgagatccagaaccctgatcctgccgtgtaccagctgcgggatagcaagagcagcgacaagagcgtgtgtctgttcaccgacttcgacagccagaccaacgtgtcccagagcaaggactccgacgtgtacatcaccgataagtgcgtgctggacatgcggagcatggacttcaagagcaactccgccgtggcctggtccaacaagtccgatttcgcctgcgccaacgccttcaacaacagcattatccccgaggacacattcttcccaagccccgagagcagctgcggctttaccagcgagagctaccagcagggcgtgctgagcgccaccatcctgtacgagatcctgctgggcaaggccaccctgtacgccgtgctggtgtctgccctggtgctgatggctatggtcaagcggaaggacagccggggacgcgccaagagaagcggatctggcgtgaagcagaccctgaatttcgacctgctgaagctggctggcgacgtggaatccaacccaggccctactagtatggactggatttggcgcatccttttccttgtcggcgctgctaccggcgcgcattccttcgaagaagtgcaactggtggaatcaggcggcggactggtgcagcctggcggatctctgagactgagctgtgccgccagcggcttcaccttcagcagctacggaatgcactgggtgcgccaggcccctggcaaaggactggaatgggtggcctacatcaccaccagaagcagcaccatctactacgccgacagcgtgaagggccggttcaccatctccagagacaacgccaagaacagcctgtacctccagatgaactccctgcgggccgaggacaccgccgtgtactattgcaccagagagcccctgaccggctactacgctatggactattggggccagggcaccagcgtgaccgtgtctagtacgcgtgaggacctgaagaacgtgttcccacctgaggtggccgtgttcgagcctagcgaggccgagatcagccacacccagaaagccaccctcgtgtgcctggctaccggcttctaccccgaccatgtggaactgtcttggtgggtcaacggcaaagaggtgcacagcggcgtgtgtaccgacccccagccactgaaagaacagcccgccctgaacgacagccggtactgcctgagcagcagactgagagtgtccgccaccttctggcagaacccccggaaccacttcagatgccaggtgcagttctacggcctgagcgagaacgacgagtggacccaggacagagccaagcccgtgacccagatcgtgtctgccgaagcctggggcagagccgattgcgacgtgaagctggtggaaaagagcttcgagacagacaccaacctgaacttccagaacctgagcgtgatcggcttcagaatcctgctgctgaaagtggccggctttaacctgctgatgaccctgcggctgtggtccagc

SEQ ID NO: 4459 - DNA, 2268 bp, synthetic construct
  source 1..2268: mol_type = other DNA
atggccttaccagtgaccgccttgctcctgccgctggccttgctgctccacgccgccaggccggaagtgcagctggttgaatctggcggaggactggttcagcctggcggatctctgagactgtcttgtgccgccagcggcttcagcttcagcgacttttggatgagctgggtccgacaggcccctggcaaaggacttgaatgggtcgccacaatcagccaggccggcagcgagaaggactacgtggactctgtgaagggcagattcaccatcagccgggacaacgccaagaagtccctgtacctccagatgaacagcctgagagccgaggacaccgccgtgtactattgtgcctctggcgtgtacagcttcgactacagaggccagggcaccctggtcacagtctcttctggtaccggcggaggcggatctggcggcggaggtagcggtggcggaggatctgaattcgacatccagatgacccagagccccagcagcctgtctgccagcgtgggcgacagagtgaccatcacctgtagagccagccagagcatcagcctgtggctgaactggtatcagcagaagcccggcaaggcccccaagctgctgatctacgccgccagcacactccagagcggcgtgccaagcagattttccggcagcggctccggcaccgacttcaccctgacaatcagctccctccagcccgaggacttcgccacctactactgccagcagtactacaccagcccctacaccttcggccagggcaccaaggtggaaatcaagagactcgagatccagaaccctgatcctgccgtgtaccagctgcgggatagcaagagcagcgacaagagcgtgtgtctgttcaccgacttcgacagccagaccaacgtgtcccagagcaaggactccgacgtgtacatcaccgataagtgcgtgctggacatgcggagcatggacttcaagagcaactccgccgtggcctggtccaacaagtccgatttcgcctgcgccaacgccttcaacaacagcattatccccgaggacacattcttcccaagccccgagagcagctgcggctttaccagcgagagctaccagcagggcgtgctgagcgccaccatcctgtacgagatcctgctgggcaaggccaccctgtacgccgtgctggtgtctgccctggtgctgatggctatggtcaagcggaaggacagccggggacgcgccaagagaagcggatctggcgtgaagcagaccctgaatttcgacctgctgaagctggctggcgacgtggaatccaacccaggccctactagtatggactggatttggcgcatccttttccttgtcggcgctgctaccggcgcgcattccttcgaacaggtgcaactgctggaatctggcggcggactggtgcagcctggcggatctctgagactgagctgtgccgccagcggcttcaccttcagcagctacgccatgagctgggtgcgccaggcccctggaaaaggactggaatgggtgtccgtgatccggtccagcggcagcagcacctattacgccgatagcgtgaagggccggttcaccatcagccgggacaacagcaagaacaccctgtacctccagatgaacagcctgcgggccgaggacaccgccgtgtactattgtgctaggggaggcggctacttcgactactggggccagggaacactcgtgaccgtgtcctctacgcgtgaggacctgaagaacgtgttcccacctgaggtggccgtgttcgagcctagcgaggccgagatcagccacacccagaaagccaccctcgtgtgcctggctaccggcttctaccccgaccatgtggaactgtcttggtgggtcaacggcaaagaggtgcacagcggcgtgtgtaccgacccccagccactgaaagaacagcccgccctgaacgacagccggtactgcctgagcagcagactgagagtgtccgccaccttctggcagaacccccggaaccacttcagatgccaggtgcagttctacggcctgagcgagaacgacgagtggacccaggacagagccaagcccgtgacccagatcgtgtctgccgaagcctggggcagagccgattgcgacgtgaagctggtggaaaagagcttcgagacagacaccaacctgaacttccagaacctgagcgtgatcggcttcagaatcctgctgctgaaagtggccggctttaacctgctgatgaccctgcggctgtggtccagc

SEQ ID NO: 4460 - DNA, 2277 bp, synthetic construct
  source 1..2277: mol_type = other DNA
atggccttaccagtgaccgccttgctcctgccgctggccttgctgctccacgccgccaggccggaagtgcagctggttgaatctggcggaggactggttcagcctggcggatctctgagactgtcttgtgccgccagcggcttcagcttcagcgacttttggatgagctgggtccgacaggcccctggcaaaggacttgaatgggtcgccacaatcagccaggccggcagcgagaaggactacgtggactctgtgaagggcagattcaccatcagccgggacaacgccaagaagtccctgtacctccagatgaacagcctgagagccgaggacaccgccgtgtactattgtgcctctggcgtgtacagcttcgactacagaggccagggcaccctggtcacagtctcttctggtaccggcggaggcggatctggcggcggaggtagcggtggcggaggatctgaattcgacatccagatgacccagagccccagcagcctgtctgccagcgtgggcgacagagtgaccatcacctgtagagccagccagagcatcagcagctacctgaactggtatcagcagaagcccggcaaggcccccaaactgctgatctacgccgtgtccacactccagagcggcgtgcccagcagattttctggcagcggctccggcaccgacttcaccctgacaatcagctccctccagcccgaggacttcgccacctactactgtcagcagagcggcaccttccctcccaccacatttggacagggcaccaaggtggaaatcaagagactcgagatccagaaccctgatcctgccgtgtaccagctgcgggatagcaagagcagcgacaagagcgtgtgtctgttcaccgacttcgacagccagaccaacgtgtcccagagcaaggactccgacgtgtacatcaccgataagtgcgtgctggacatgcggagcatggacttcaagagcaactccgccgtggcctggtccaacaagtccgatttcgcctgcgccaacgccttcaacaacagcattatccccgaggacacattcttcccaagccccgagagcagctgcggctttaccagcgagagctaccagcagggcgtgctgagcgccaccatcctgtacgagatcctgctgggcaaggccaccctgtacgccgtgctggtgtctgccctggtgctgatggctatggtcaagcggaaggacagccggggacgcgccaagagaagcggatctggcgtgaagcagaccctgaatttcgacctgctgaagctggctggcgacgtggaatccaacccaggccctactagtatggactggatttggcgcatccttttccttgtcggcgctgctaccggcgcgcattccttcgaacaggtgcaactgctggaatctggcggcggactggtgcagcctggcggatctctgagactgagctgtgccgccagcggcttcaccttcagcagccacggaatgcactgggtgcgccaggcccctggaaagggactggaatgggtgtccgtgatctccggcagcggcagcaataccggctacgccgatagcgtgaagggccggttcaccatcagccgggacaacagcaagaacaccctgtacctccagatgaacagcctgcgggccgaggacaccgccgtgtactattgtgccagacagtggggcagctacgccttcgattcttggggccagggcaccctcgtgaccgtgtcatctacgcgtgaggacctgaagaacgtgttcccacctgaggtggccgtgttcgagcctagcgaggccgagatcagccacacccagaaagccaccctcgtgtgcctggctaccggcttctaccccgaccatgtggaactgtcttggtgggtcaacggcaaagaggtgcacagcggcgtgtgtaccgacccccagccactgaaagaacagcccgccctgaacgacagccggtactgcctgagcagcagactgagagtgtccgccaccttctggcagaacccccggaaccacttcagatgccaggtgcagttctacggcctgagcgagaacgacgagtggacccaggacagagccaagcccgtgacccagatcgtgtctgccgaagcctggggcagagccgattgcgacgtgaagctggtggaaaagagcttcgagacagacaccaacctgaacttccagaacctgagcgtgatcggcttcagaatcctgctgctgaaagtggccggctttaacctgctgatgaccctgcggctgtggtccagc

SEQ ID NO: 4461 - DNA, 2307 bp, synthetic construct
  source 1..2307: mol_type = other DNA
atggccttaccagtgaccgccttgctcctgccgctggccttgctgctccacgccgccaggccggaagtgcagctggttgaatctggcggaggactggttcagcctggcggatctctgagactgtcttgtgccgccagcggcttcagcttcagcgacttttggatgagctgggtccgacaggcccctggcaaaggacttgaatgggtcgccacaatcagccaggccggcagcgagaaggactacgtggactctgtgaagggcagattcaccatcagccgggacaacgccaagaagtccctgtacctccagatgaacagcctgagagccgaggacaccgccgtgtactattgtgcctctggcgtgtacagcttcgactacagaggccagggcaccctggtcacagtctcttctggtaccggcggaggcggatctggcggcggaggtagcggtggcggaggatctgaattcgacatcgtgatgagccagagccctagcagcctggccgtgtccgtgggcgagaaagtgaccatgagctgcaagagcagccagtccctgctgcacagcagcaaccagaagaactacctggcctggtatcagcagaagcccggccagtcccccaaggtgctgatctactgggccagcaccagagaaagcggcgtgcccgatagattcaccggcagcggctctggcaccgacttcaccctgaccatcaccagcgtgaagtccgaggacctggctgtgtactactgccagcagtattacagctacccctggaccttcggcggaggcacccggctggaaatcaaaagactcgagatccagaaccctgatcctgccgtgtaccagctgcgggatagcaagagcagcgacaagagcgtgtgtctgttcaccgacttcgacagccagaccaacgtgtcccagagcaaggactccgacgtgtacatcaccgataagtgcgtgctggacatgcggagcatggacttcaagagcaactccgccgtggcctggtccaacaagtccgatttcgcctgcgccaacgccttcaacaacagcattatccccgaggacacattcttcccaagccccgagagcagctgcggctttaccagcgagagctaccagcagggcgtgctgagcgccaccatcctgtacgagatcctgctgggcaaggccaccctgtacgccgtgctggtgtctgccctggtgctgatggctatggtcaagcggaaggacagccggggacgcgccaagagaagcggatctggcgtgaagcagaccctgaatttcgacctgctgaagctggctggcgacgtggaatccaacccaggccctactagtatggactggatttggcgcatccttttccttgtcggcgctgctaccggcgcgcattccttcgaagaagtgcaactccagcagagcgtggccgagcttgtgaagcctggcgcttccgtgaagatgtcctgcaaggtgtccggctacaccctgacagaccacaccatccactggatgaagcagcggcctgagcagggcctggaatggatcggctacatctaccccagggacggcatcaccggctacaacgagaagttcaagggcaaggccacactgaccgccgacaccagcagcagcacagcctacatgcaactgaacagcctgaccagcgaggacagcgccgtgtacttctgtgccagatggggctacagctacagaaactacgcctactactacgactactggggccagggcacaaccctgaccgtgtctagtacgcgtgaggacctgaagaacgtgttcccacctgaggtggccgtgttcgagcctagcgaggccgagatcagccacacccagaaagccaccctcgtgtgcctggctaccggcttctaccccgaccatgtggaactgtcttggtgggtcaacggcaaagaggtgcacagcggcgtgtgtaccgacccccagccactgaaagaacagcccgccctgaacgacagccggtactgcctgagcagcagactgagagtgtccgccaccttctggcagaacccccggaaccacttcagatgccaggtgcagttctacggcctgagcgagaacgacgagtggacccaggacagagccaagcccgtgacccagatcgtgtctgccgaagcctggggcagagccgattgcgacgtgaagctggtggaaaagagcttcgagacagacaccaacctgaacttccagaacctgagcgtgatcggcttcagaatcctgctgctgaaagtggccggctttaacctgctgatgaccctgcggctgtggtccagc

SEQ ID NO: 4462 - DNA, 2298 bp, synthetic construct
  source 1..2298: mol_type = other DNA
atggccttaccagtgaccgccttgctcctgccgctggccttgctgctccacgccgccaggccggaagtgcagctggttgaatctggcggaggactggttcagcctggcggatctctgagactgtcttgtgccgccagcggcttcagcttcagcgacttttggatgagctgggtccgacaggcccctggcaaaggacttgaatgggtcgccacaatcagccaggccggcagcgagaaggactacgtggactctgtgaagggcagattcaccatcagccgggacaacgccaagaagtccctgtacctccagatgaacagcctgagagccgaggacaccgccgtgtactattgtgcctctggcgtgtacagcttcgactacagaggccagggcaccctggtcacagtctcttctggtaccggcggaggcggatctggcggcggaggtagcggtggcggaggatctgaattcgagatcgtgctgacacagagccctggcaccctgagcctgtctccaggcgaaagagccacactgagctgtcgggccagccagagcgtgtccagctcttacctggcctggtatcagcagaagcccggccaggctccccggctgctgatctacggaacaagcagcagagccaccggcatccccgacagattttctggcagcggctccggcaccgacttcaccctgacaatcagcagactggaacccgaggacttcgccgtgtactactgccagcagtacggcagcagccccttcacctttggcggaggcaccaaggtggaaatcaagagactcgagatccagaaccctgatcctgccgtgtaccagctgcgggatagcaagagcagcgacaagagcgtgtgtctgttcaccgacttcgacagccagaccaacgtgtcccagagcaaggactccgacgtgtacatcaccgataagtgcgtgctggacatgcggagcatggacttcaagagcaactccgccgtggcctggtccaacaagtccgatttcgcctgcgccaacgccttcaacaacagcattatccccgaggacacattcttcccaagccccgagagcagctgcggctttaccagcgagagctaccagcagggcgtgctgagcgccaccatcctgtacgagatcctgctgggcaaggccaccctgtacgccgtgctggtgtctgccctggtgctgatggctatggtcaagcggaaggacagccggggacgcgccaagagaagcggatctggcgtgaagcagaccctgaatttcgacctgctgaagctggctggcgacgtggaatccaacccaggccctactagtatggactggatttggcgcatccttttccttgtcggcgctgctaccggcgcgcattccttcgaacaggtgcaactccaggaatctggccccggactggctaagcccagcgagacactgagcctgacctgtaccgtgtccggcgacagcatcaccagctactactggtcctggatcagacagccccctggcaagggcctggaatggatcggctacatctactacagcggcagcaccaactacaaccccagcctgaagtccagagtgaccatcagcgtggacaccagcaagaaccagttctccctgaagctgagcagcgtgacagccgccgacaccgccgtgtattattgcgccagagatcagcggagaatcgccgctgccggcacccacttttacggcatggatgtgtggggccagggcaccaccgtgaccgtgtcatctacgcgtgaggacctgaagaacgtgttcccacctgaggtggccgtgttcgagcctagcgaggccgagatcagccacacccagaaagccaccctcgtgtgcctggctaccggcttctaccccgaccatgtggaactgtcttggtgggtcaacggcaaagaggtgcacagcggcgtgtgtaccgacccccagccactgaaagaacagcccgccctgaacgacagccggtactgcctgagcagcagactgagagtgtccgccaccttctggcagaacccccggaaccacttcagatgccaggtgcagttctacggcctgagcgagaacgacgagtggacccaggacagagccaagcccgtgacccagatcgtgtctgccgaagcctggggcagagccgattgcgacgtgaagctggtggaaaagagcttcgagacagacaccaacctgaacttccagaacctgagcgtgatcggcttcagaatcctgctgctgaaagtggccggctttaacctgctgatgaccctgcggctgtggtccagc

SEQ ID NO: 4463 - DNA, 2274 bp, synthetic construct
  source 1..2274: mol_type = other DNA
atggccttaccagtgaccgccttgctcctgccgctggccttgctgctccacgccgccaggccggaagtgcagctggttgaatctggcggaggactggttcagcctggcggatctctgagactgtcttgtgccgccagcggcttcagcttcagcgacttttggatgagctgggtccgacaggcccctggcaaaggacttgaatgggtcgccacaatcagccaggccggcagcgagaaggactacgtggactctgtgaagggcagattcaccatcagccgggacaacgccaagaagtccctgtacctccagatgaacagcctgagagccgaggacaccgccgtgtactattgtgcctctggcgtgtacagcttcgactacagaggccagggcaccctggtcacagtctcttctggtaccggcggaggcggatctggcggcggaggtagcggtggcggaggatctgaattcgacatcctgctgacccagagccccgtgatcctgtccgtgtctcctggcgagagagtgtccttcagctgtcgggccagccagagcatcggcaccaacatccactggtatcagcagcggaccaacggcagccccagactgctgattaagtacgccagcgagtccatcagcggcatccccagcagattttccggcagcggctccggcaccgacttcaccctgagcatcaacagcgtggaaagcgaggacattgccgactactactgccagcagaacaacaactggcccaccaccttcggagccggcaccaagctggaactgaagctcgagatccagaaccctgatcctgccgtgtaccagctgcgggatagcaagagcagcgacaagagcgtgtgtctgttcaccgacttcgacagccagaccaacgtgtcccagagcaaggactccgacgtgtacatcaccgataagtgcgtgctggacatgcggagcatggacttcaagagcaactccgccgtggcctggtccaacaagtccgatttcgcctgcgccaacgccttcaacaacagcattatccccgaggacacattcttcccaagccccgagagcagctgcggctttaccagcgagagctaccagcagggcgtgctgagcgccaccatcctgtacgagatcctgctgggcaaggccaccctgtacgccgtgctggtgtctgccctggtgctgatggctatggtcaagcggaaggacagccggggacgcgccaagagaagcggatctggcgtgaagcagaccctgaatttcgacctgctgaagctggctggcgacgtggaatccaacccaggccctactagtatggactggatttggcgcatccttttccttgtcggcgctgctaccggcgcgcattccttcgaacaggtgcagctgaagcagagcggacctggcctggtgcagcctagccagagcctgtccatcacctgtaccgtgtccggcttcagcctgaccaactacggcgtgcactgggtgcgccagagccctggaaaaggactggaatggctgggagtgatttggagcggcggcaacaccgactacaacacccccttcaccagcagactgtctatcaacaaggacaacagcaagagccaggtgttcttcaagatgaacagcctccagagcaacgacaccgccatctactactgtgctagagccctgacctactatgactacgagttcgcctactggggccagggcacactcgtgacagtgtctgctacgcgtgaggacctgaagaacgtgttcccacctgaggtggccgtgttcgagcctagcgaggccgagatcagccacacccagaaagccaccctcgtgtgcctggctaccggcttctaccccgaccatgtggaactgtcttggtgggtcaacggcaaagaggtgcacagcggcgtgtgtaccgacccccagccactgaaagaacagcccgccctgaacgacagccggtactgcctgagcagcagactgagagtgtccgccaccttctggcagaacccccggaaccacttcagatgccaggtgcagttctacggcctgagcgagaacgacgagtggacccaggacagagccaagcccgtgacccagatcgtgtctgccgaagcctggggcagagccgattgcgacgtgaagctggtggaaaagagcttcgagacagacaccaacctgaacttccagaacctgagcgtgatcggcttcagaatcctgctgctgaaagtggccggctttaacctgctgatgaccctgcggctgtggtccagc

SEQ ID NO: 4464 - DNA, 2253 bp, synthetic construct
  source 1..2253: mol_type = other DNA
atggccttaccagtgaccgccttgctcctgccgctggccttgctgctccacgccgccaggccggaagtgcagctggttgaatctggcggaggactggttcagcctggcggatctctgagactgtcttgtgccgccagcggcttcagcttcagcgacttttggatgagctgggtccgacaggcccctggcaaaggacttgaatgggtcgccacaatcagccaggccggcagcgagaaggactacgtggactctgtgaagggcagattcaccatcagccgggacaacgccaagaagtccctgtacctccagatgaacagcctgagagccgaggacaccgccgtgtactattgtgcctctggcgtgtacagcttcgactacagaggccagggcaccctggtcacagtctcttctggtaccggcggaggcggatctggcggcggaggtagcggtggcggaggatctgaattcatgacccagagccccaagttcctgctggtgtctgccggcgacagagtgaccctgacatgcaaggccagccagagcgtgaacaacgacgtgtactggtatcagcaggaacccggccagtcccccaagctgctgatctactgggccagcaccagagaaagcggcgtgcccgatagattcaccggcagcggctctggcaccgacttcaccctgacaatcagcagcgtgcaggccgaggacctggccgtgtactactgcaagcagagctacaacctgtacaccttcggcggaggcaccaagctggaaatcaagagactcgagatccagaaccctgatcctgccgtgtaccagctgcgggatagcaagagcagcgacaagagcgtgtgtctgttcaccgacttcgacagccagaccaacgtgtcccagagcaaggactccgacgtgtacatcaccgataagtgcgtgctggacatgcggagcatggacttcaagagcaactccgccgtggcctggtccaacaagtccgatttcgcctgcgccaacgccttcaacaacagcattatccccgaggacacattcttcccaagccccgagagcagctgcggctttaccagcgagagctaccagcagggcgtgctgagcgccaccatcctgtacgagatcctgctgggcaaggccaccctgtacgccgtgctggtgtctgccctggtgctgatggctatggtcaagcggaaggacagccggggacgcgccaagagaagcggatctggcgtgaagcagaccctgaatttcgacctgctgaagctggctggcgacgtggaatccaacccaggccctactagtatggactggatttggcgcatccttttccttgtcggcgctgctaccggcgcgcattccttcgaagaatctggaagaggactggtgcagcctggcggcagcagaaagctgtcttgtgccgccagcggcttcaccttcagcaccagcggaatgcactgggtgcgccaggcccctgagaagggactggaatgggtggcctacatcagctccggcagcaccaccatctaccacgccgataccgtgaagggccggttcaccatcagccgggacaaccccaagaataccctgttcctccagatgaccagcctgcggagcgaggacaccgccatgtactattgctgcgccagaagcggccagttcggcaactacttcgactactggggccagggcaccaccctgaccgtgtcatctacgcgtgaggacctgaagaacgtgttcccacctgaggtggccgtgttcgagcctagcgaggccgagatcagccacacccagaaagccaccctcgtgtgcctggctaccggcttctaccccgaccatgtggaactgtcttggtgggtcaacggcaaagaggtgcacagcggcgtgtgtaccgacccccagccactgaaagaacagcccgccctgaacgacagccggtactgcctgagcagcagactgagagtgtccgccaccttctggcagaacccccggaaccacttcagatgccaggtgcagttctacggcctgagcgagaacgacgagtggacccaggacagagccaagcccgtgacccagatcgtgtctgccgaagcctggggcagagccgattgcgacgtgaagctggtggaaaagagcttcgagacagacaccaacctgaacttccagaacctgagcgtgatcggcttcagaatcctgctgctgaaagtggccggctttaacctgctgatgaccctgcggctgtggtccagc

SEQ ID NO: 4465 - DNA, 2268 bp, synthetic construct
  source 1..2268: mol_type = other DNA
atggccttaccagtgaccgccttgctcctgccgctggccttgctgctccacgccgccaggccggaagtgcagctggttgaatctggcggaggactggttcagcctggcggatctctgagactgtcttgtgccgccagcggcttcagcttcagcgacttttggatgagctgggtccgacaggcccctggcaaaggacttgaatgggtcgccacaatcagccaggccggcagcgagaaggactacgtggactctgtgaagggcagattcaccatcagccgggacaacgccaagaagtccctgtacctccagatgaacagcctgagagccgaggacaccgccgtgtactattgtgcctctggcgtgtacagcttcgactacagaggccagggcaccctggtcacagtctcttctggtaccggcggaggcggatctggcggcggaggtagcggtggcggaggatctgaattccagagcccatctagcctggctgtgtctgccggcgagaaagtgaccatgagctgcaagagcagccagagcctgctgaacagccggacccggaagaactacctggcctggtatcagcagaagcccggccagagccccaagctgctgatctactgggccagcaccagagaaagcggcgtgcccgatagattcaccggctctggcagcggcaccgacttcaccctgacaatcagcagcgtgcaggccgaggacctggccgtgtactactgcaagcagagcaacctgtacaccttcggcggaggcaccaagctggaaatcaagctcgagatccagaaccctgatcctgccgtgtaccagctgcgggatagcaagagcagcgacaagagcgtgtgtctgttcaccgacttcgacagccagaccaacgtgtcccagagcaaggactccgacgtgtacatcaccgataagtgcgtgctggacatgcggagcatggacttcaagagcaactccgccgtggcctggtccaacaagtccgatttcgcctgcgccaacgccttcaacaacagcattatccccgaggacacattcttcccaagccccgagagcagctgcggctttaccagcgagagctaccagcagggcgtgctgagcgccaccatcctgtacgagatcctgctgggcaaggccaccctgtacgccgtgctggtgtctgccctggtgctgatggctatggtcaagcggaaggacagccggggacgcgccaagagaagcggatctggcgtgaagcagaccctgaatttcgacctgctgaagctggctggcgacgtggaatccaacccaggccctactagtatggactggatttggcgcatccttttccttgtcggcgctgctaccggcgcgcattccttcgaacaggtgcagctggaagagtctggacccgagcttgtgaagcctggggccagcgtgaagctgtcctgtaaagccagcggctacaccttcaccgagtacatcatccactgggtcaagcagcggagcggccagggcctggaatggatcggctggttttaccctggctccggcagcatcaagtacaacgagaagttcaaggacaaggccaccctgaccgccgacaagtccagcagcaccgtgtacatggaactgagcggcctgaccagcgaggacagcgccgtgtatttctgcgccagacacgacggctacagctacttcgactattggggccagggcaccacactgaccgtgtcctctacgcgtgaggacctgaagaacgtgttcccacctgaggtggccgtgttcgagcctagcgaggccgagatcagccacacccagaaagccaccctcgtgtgcctggctaccggcttctaccccgaccatgtggaactgtcttggtgggtcaacggcaaagaggtgcacagcggcgtgtgtaccgacccccagccactgaaagaacagcccgccctgaacgacagccggtactgcctgagcagcagactgagagtgtccgccaccttctggcagaacccccggaaccacttcagatgccaggtgcagttctacggcctgagcgagaacgacgagtggacccaggacagagccaagcccgtgacccagatcgtgtctgccgaagcctggggcagagccgattgcgacgtgaagctggtggaaaagagcttcgagacagacaccaacctgaacttccagaacctgagcgtgatcggcttcagaatcctgctgctgaaagtggccggctttaacctgctgatgaccctgcggctgtggtccagc

SEQ ID NO: 4466 - DNA, 2277 bp, synthetic construct
  source 1..2277: mol_type = other DNA
atggccttaccagtgaccgccttgctcctgccgctggccttgctgctccacgccgccaggccggaagtgcagctggttgaatctggcggaggactggttcagcctggcggatctctgagactgtcttgtgccgccagcggcttcagcttcagcgacttttggatgagctgggtccgacaggcccctggcaaaggacttgaatgggtcgccacaatcagccaggccggcagcgagaaggactacgtggactctgtgaagggcagattcaccatcagccgggacaacgccaagaagtccctgtacctccagatgaacagcctgagagccgaggacaccgccgtgtactattgtgcctctggcgtgtacagcttcgactacagaggccagggcaccctggtcacagtctcttctggtaccggcggaggcggatctggcggcggaggtagcggtggcggaggatctgaattcgacatccagatgacccagagccccagcagcctgtctgcctctctgggcgagagagtgtccctgacctgtcgggccacacaggaactgagcggctacctgtcttggctgcagcagaagcccgacggcaccatcaagcggctgatctacgccgccagcaccctggatagcggcgtgcccaagagattcagcggcaacagaagcggcagcgactacagcctgaccatcagctccctggaaagcgaggacttcgccgactactactgcctgcagtacgccatctacccctacaccttcggcggaggcaccaagctggaaatcaagctcgagatccagaaccctgatcctgccgtgtaccagctgcgggatagcaagagcagcgacaagagcgtgtgtctgttcaccgacttcgacagccagaccaacgtgtcccagagcaaggactccgacgtgtacatcaccgataagtgcgtgctggacatgcggagcatggacttcaagagcaactccgccgtggcctggtccaacaagtccgatttcgcctgcgccaacgccttcaacaacagcattatccccgaggacacattcttcccaagccccgagagcagctgcggctttaccagcgagagctaccagcagggcgtgctgagcgccaccatcctgtacgagatcctgctgggcaaggccaccctgtacgccgtgctggtgtctgccctggtgctgatggctatggtcaagcggaaggacagccggggacgcgccaagagaagcggatctggcgtgaagcagaccctgaatttcgacctgctgaagctggctggcgacgtggaatccaacccaggccctactagtatggactggatttggcgcatccttttccttgtcggcgctgctaccggcgcgcattccttcgaagaggtgcaactgcagcagtctggccccgagcttgtgaagcctggcgcctccgtgaagatgagctgcaaggccagcggctacacctttaccagctacttcatccactgggtcaagcagaaacccggccagggcctggaatggatcggcttcatcaacccttacaacgacggcagcaagtacaacgagaagttcaagggcaaggccaccctgaccagcgacaagagcagcagcaccgcctacatggaactgtccagcctgacatccgaggacagcgccgtgtactactgcaccagggacgacggctactacggctacgccatggactactggggccagggaacaagcgtcaccgtgtcctctacgcgtgaggacctgaagaacgtgttcccacctgaggtggccgtgttcgagcctagcgaggccgagatcagccacacccagaaagccaccctcgtgtgcctggctaccggcttctaccccgaccatgtggaactgtcttggtgggtcaacggcaaagaggtgcacagcggcgtgtgtaccgacccccagccactgaaagaacagcccgccctgaacgacagccggtactgcctgagcagcagactgagagtgtccgccaccttctggcagaacccccggaaccacttcagatgccaggtgcagttctacggcctgagcgagaacgacgagtggacccaggacagagccaagcccgtgacccagatcgtgtctgccgaagcctggggcagagccgattgcgacgtgaagctggtggaaaagagcttcgagacagacaccaacctgaacttccagaacctgagcgtgatcggcttcagaatcctgctgctgaaagtggccggctttaacctgctgatgaccctgcggctgtggtccagc

SEQ ID NO: 4467 - DNA, 2292 bp, synthetic construct
  source 1..2292: mol_type = other DNA
atggccttaccagtgaccgccttgctcctgccgctggccttgctgctccacgccgccaggccggaagtgcagctggttgaatctggcggaggactggttcagcctggcggatctctgagactgtcttgtgccgccagcggcttcagcttcagcgacttttggatgagctgggtccgacaggcccctggcaaaggacttgaatgggtcgccacaatcagccaggccggcagcgagaaggactacgtggactctgtgaagggcagattcaccatcagccgggacaacgccaagaagtccctgtacctccagatgaacagcctgagagccgaggacaccgccgtgtactattgtgcctctggcgtgtacagcttcgactacagaggccagggcaccctggtcacagtctcttctggtaccggcggaggcggatctggcggcggaggtagcggtggcggaggatctgaattcgacaccatcgtgctgacacagagccctgcttccctggccgtgtccctgggacagagagccaccatctcttgcagagccagcgagagcgtggacagctacggcaacagcttcatgcactggtatcagcagaagcccggccagccccccaagctgctgatctacctggcctccaacctggaaagcggcgtgcccgccagattttctggcagcggcagcagaaccgacttcaccctgaccatcgaccccgtggaagccgatgatgccgccacctactactgccagcagaacaactacgacccctggaccttcggcggaggcaccaagctggaaatcaagctcgagatccagaaccctgatcctgccgtgtaccagctgcgggatagcaagagcagcgacaagagcgtgtgtctgttcaccgacttcgacagccagaccaacgtgtcccagagcaaggactccgacgtgtacatcaccgataagtgcgtgctggacatgcggagcatggacttcaagagcaactccgccgtggcctggtccaacaagtccgatttcgcctgcgccaacgccttcaacaacagcattatccccgaggacacattcttcccaagccccgagagcagctgcggctttaccagcgagagctaccagcagggcgtgctgagcgccaccatcctgtacgagatcctgctgggcaaggccaccctgtacgccgtgctggtgtctgccctggtgctgatggctatggtcaagcggaaggacagccggggacgcgccaagagaagcggatctggcgtgaagcagaccctgaatttcgacctgctgaagctggctggcgacgtggaatccaacccaggccctactagtatggactggatttggcgcatccttttccttgtcggcgctgctaccggcgcgcattccttcgaagaagtgcaactccagcagagcggccctgagcttgtgaagcctggcgcttccgtgaagatgagctgcaaggccagcggctacaccttcaccagctacgtgatgcactgggtcaagcagaaacctggacagggcctggaatggatcggctacatcaacccctacaacgacggcaccaagtacaacgagaagttcaagggcaaggccaccctgacaagcgacaccagcagcagcaccgcctacatggaactgaacagcctgaccagcgaggacagcgccgtgtacttctgcgccagacccatctacttcgacaacgactacttcgattactggggccagggcaccaccctgaaggtgtcctctacgcgtgaggacctgaagaacgtgttcccacctgaggtggccgtgttcgagcctagcgaggccgagatcagccacacccagaaagccaccctcgtgtgcctggctaccggcttctaccccgaccatgtggaactgtcttggtgggtcaacggcaaagaggtgcacagcggcgtgtgtaccgacccccagccactgaaagaacagcccgccctgaacgacagccggtactgcctgagcagcagactgagagtgtccgccaccttctggcagaacccccggaaccacttcagatgccaggtgcagttctacggcctgagcgagaacgacgagtggacccaggacagagccaagcccgtgacccagatcgtgtctgccgaagcctggggcagagccgattgcgacgtgaagctggtggaaaagagcttcgagacagacaccaacctgaacttccagaacctgagcgtgatcggcttcagaatcctgctgctgaaagtggccggctttaacctgctgatgaccctgcggctgtggtccagc

SEQ ID NO: 4468 - DNA, 2277 bp, synthetic construct
  source 1..2277: mol_type = other DNA
atggccttaccagtgaccgccttgctcctgccgctggccttgctgctccacgccgccaggccggaagtgcagctggttgaatctggcggaggactggttcagcctggcggatctctgagactgtcttgtgccgccagcggcttcagcttcagcgacttttggatgagctgggtccgacaggcccctggcaaaggacttgaatgggtcgccacaatcagccaggccggcagcgagaaggactacgtggactctgtgaagggcagattcaccatcagccgggacaacgccaagaagtccctgtacctccagatgaacagcctgagagccgaggacaccgccgtgtactattgtgcctctggcgtgtacagcttcgactacagaggccagggcaccctggtcacagtctcttctggtaccggcggaggcggatctggcggcggaggtagcggtggcggaggatctgaattcgacatccagatgacccagagccccagcagcctgtctgccagcgtgggcgacagagtgaccatcacatgcaaggccagccaggacgtgggaatcgccgtggcctggtatcagcagaaacccggcaaggtgcccaagctgctgatctactgggccagcaccagacacaccggcgtgcccgatagattttccggcagcggctccggcaccgacttcaccctgacaatcagctccctccagcccgaggacgtggcaacctactactgccagcagtacagcagctacccctacaccttcggccagggcaccaaggtggaaatcaagagactcgagatccagaaccctgatcctgccgtgtaccagctgcgggatagcaagagcagcgacaagagcgtgtgtctgttcaccgacttcgacagccagaccaacgtgtcccagagcaaggactccgacgtgtacatcaccgataagtgcgtgctggacatgcggagcatggacttcaagagcaactccgccgtggcctggtccaacaagtccgatttcgcctgcgccaacgccttcaacaacagcattatccccgaggacacattcttcccaagccccgagagcagctgcggctttaccagcgagagctaccagcagggcgtgctgagcgccaccatcctgtacgagatcctgctgggcaaggccaccctgtacgccgtgctggtgtctgccctggtgctgatggctatggtcaagcggaaggacagccggggacgcgccaagagaagcggatctggcgtgaagcagaccctgaatttcgacctgctgaagctggctggcgacgtggaatccaacccaggccctactagtatggactggatttggcgcatccttttccttgtcggcgctgctaccggcgcgcattccttcgaagaagtgcaactggtggaatcaggcggcggactggtgcagcctggcggatctctgagactgagctgtgccgccagcggcttcgacttcagccggtactggatgagctgggtgcgccaggcccctggcaaaggactggaatggatcggcgagatcaaccccgacagcagcaccatcaactacgcccccagcctgaaggacaagttcatcatcagccgggacaacgccaagaacagcctgtacctccagatgaactccctgcgggccgaggacaccgccgtgtactattgcgccagacccgacggcaactactggtacttcgacgtgtggggccagggaaccctcgtgaccgtgtcatctacgcgtgaggacctgaagaacgtgttcccacctgaggtggccgtgttcgagcctagcgaggccgagatcagccacacccagaaagccaccctcgtgtgcctggctaccggcttctaccccgaccatgtggaactgtcttggtgggtcaacggcaaagaggtgcacagcggcgtgtgtaccgacccccagccactgaaagaacagcccgccctgaacgacagccggtactgcctgagcagcagactgagagtgtccgccaccttctggcagaacccccggaaccacttcagatgccaggtgcagttctacggcctgagcgagaacgacgagtggacccaggacagagccaagcccgtgacccagatcgtgtctgccgaagcctggggcagagccgattgcgacgtgaagctggtggaaaagagcttcgagacagacaccaacctgaacttccagaacctgagcgtgatcggcttcagaatcctgctgctgaaagtggccggctttaacctgctgatgaccctgcggctgtggtccagc

SEQ ID NO: 4469 - DNA, 2277 bp, synthetic construct
  source 1..2277: mol_type = other DNA
atggccttaccagtgaccgccttgctcctgccgctggccttgctgctccacgccgccaggccggaagtgcagctggttgaatctggcggaggactggttcagcctggcggatctctgagactgtcttgtgccgccagcggcttcagcttcagcgacttttggatgagctgggtccgacaggcccctggcaaaggacttgaatgggtcgccacaatcagccaggccggcagcgagaaggactacgtggactctgtgaagggcagattcaccatcagccgggacaacgccaagaagtccctgtacctccagatgaacagcctgagagccgaggacaccgccgtgtactattgtgcctctggcgtgtacagcttcgactacagaggccagggcaccctggtcacagtctcttctggtaccggcggaggcggatctggcggcggaggtagcggtggcggaggatctgaattcgacatcgtgatgacccagagccagaagagcatgagcaccagcgtgggcgacagagtgagcatcacctgcaaggccagccaggacgtgatcaccggcgtggcctggtaccagcagaagcccggccagagccccaagctgctgatctacagcgccagctacagatacaccggcgtgcccgacagattcaccggcagcggcagcggcaccgacttcaccttcaccatcagcaacgtgcaggccgaggacctggccgtgtactactgccagcagcactacagcacccccctgaccttcggcgccggcaccaagctggagctgaagctcgagatccagaaccctgatcctgccgtgtaccagctgcgggatagcaagagcagcgacaagagcgtgtgtctgttcaccgacttcgacagccagaccaacgtgtcccagagcaaggactccgacgtgtacatcaccgataagtgcgtgctggacatgcggagcatggacttcaagagcaactccgccgtggcctggtccaacaagtccgatttcgcctgcgccaacgccttcaacaacagcattatccccgaggacacattcttcccaagccccgagagcagctgcggctttaccagcgagagctaccagcagggcgtgctgagcgccaccatcctgtacgagatcctgctgggcaaggccaccctgtacgccgtgctggtgtctgccctggtgctgatggctatggtcaagcggaaggacagccggggacgcgccaagagaagcggatctggcgtgaagcagaccctgaatttcgacctgctgaagctggctggcgacgtggaatccaacccaggccctactagtatggactggatttggcgcatccttttccttgtcggcgctgctaccggcgcgcattccttcgaacaggtgcagctgcagcagcccggcgccgagctggtgagacccggcgccagcgtgaagctgagctgcaaggccagcggctacagcttcaccacctactggatgaactgggtgaagcagagacccggccagggcctggagtggatcggcatgatccaccccagcgacagcgagaccagactgaaccagaagttcaaggacaaggccaccctgaccgtggacaagagcagcagcaccgcctacatgcagctgagcagccccaccagcgaggacagcgccgtgtactactgcgccagaagcaccatgatcgccaccagagccatggactactggggccagggcaccagcgtgaccgtgagcagcacgcgtgaggacctgaagaacgtgttcccacctgaggtggccgtgttcgagcctagcgaggccgagatcagccacacccagaaagccaccctcgtgtgcctggctaccggcttctaccccgaccatgtggaactgtcttggtgggtcaacggcaaagaggtgcacagcggcgtgtgtaccgacccccagccactgaaagaacagcccgccctgaacgacagccggtactgcctgagcagcagactgagagtgtccgccaccttctggcagaacccccggaaccacttcagatgccaggtgcagttctacggcctgagcgagaacgacgagtggacccaggacagagccaagcccgtgacccagatcgtgtctgccgaagcctggggcagagccgattgcgacgtgaagctggtggaaaagagcttcgagacagacaccaacctgaacttccagaacctgagcgtgatcggcttcagaatcctgctgctgaaagtggccggctttaacctgctgatgaccctgcggctgtggtccagc

SEQ ID NO: 4470 - DNA, 2295 bp, synthetic construct
  source 1..2295: mol_type = other DNA
atggccttaccagtgaccgccttgctcctgccgctggccttgctgctccacgccgccaggccggaagtgcagctggttgaatctggcggaggactggttcagcctggcggatctctgagactgtcttgtgccgccagcggcttcagcttcagcgacttttggatgagctgggtccgacaggcccctggcaaaggacttgaatgggtcgccacaatcagccaggccggcagcgagaaggactacgtggactctgtgaagggcagattcaccatcagccgggacaacgccaagaagtccctgtacctccagatgaacagcctgagagccgaggacaccgccgtgtactattgtgcctctggcgtgtacagcttcgactacagaggccagggcaccctggtcacagtctcttctggtaccggcggaggcggatctggcggcggaggtagcggtggcggaggatctgaattccagagcgtgctgacacagcctccatccgtgtctggcgctccaggccagagagtgaccatctcctgtaccggcagcggcagcaacatcggagccccctacgacgtgtcctggtatcagcaactgcctggcaccgcccccaagctgctgatctaccacaacaacaagcggcccagcggcgtgcccgatagattcagcggctctaagagcggcaccagcgccagcctggctatcactggactccaggccgaggacgaggccgactactactgtgccacagtggaagccggcctgagcggctctgtgtttggcggcggaacaaagctgaccgtgctgggagctctcgagatccagaaccctgatcctgccgtgtaccagctgcgggatagcaagagcagcgacaagagcgtgtgtctgttcaccgacttcgacagccagaccaacgtgtcccagagcaaggactccgacgtgtacatcaccgataagtgcgtgctggacatgcggagcatggacttcaagagcaactccgccgtggcctggtccaacaagtccgatttcgcctgcgccaacgccttcaacaacagcattatccccgaggacacattcttcccaagccccgagagcagctgcggctttaccagcgagagctaccagcagggcgtgctgagcgccaccatcctgtacgagatcctgctgggcaaggccaccctgtacgccgtgctggtgtctgccctggtgctgatggctatggtcaagcggaaggacagccggggacgcgccaagagaagcggatctggcgtgaagcagaccctgaatttcgacctgctgaagctggctggcgacgtggaatccaacccaggccctactagtatggactggatttggcgcatccttttccttgtcggcgctgctaccggcgcgcattccttcgaacaggtgcaactggtgcagagcggagccgaagtgaagaaacctggggccagcgtgaaggtgtcctgcaaggtgtccggctacaccctgaccgagctgagcattcactgggtgcgccaggcccctggcaagggactggaatggatgggcggcttcgaccccgaagagaacgagatcgtgtacgcccagcggttccagggcagagtgacaatgaccgaggacaccagcaccgacaccgcctacatggaactgagcagcctgcggagcgaggataccgccgtgtactactgcgccatcgtgggcagcttcagccctctgacactgggcctgtggggccagggaactatggtcaccgtgtccagcacgcgtgaggacctgaagaacgtgttcccacctgaggtggccgtgttcgagcctagcgaggccgagatcagccacacccagaaagccaccctcgtgtgcctggctaccggcttctaccccgaccatgtggaactgtcttggtgggtcaacggcaaagaggtgcacagcggcgtgtgtaccgacccccagccactgaaagaacagcccgccctgaacgacagccggtactgcctgagcagcagactgagagtgtccgccaccttctggcagaacccccggaaccacttcagatgccaggtgcagttctacggcctgagcgagaacgacgagtggacccaggacagagccaagcccgtgacccagatcgtgtctgccgaagcctggggcagagccgattgcgacgtgaagctggtggaaaagagcttcgagacagacaccaacctgaacttccagaacctgagcgtgatcggcttcagaatcctgctgctgaaagtggccggctttaacctgctgatgaccctgcggctgtggtccagc

SEQ ID NO: 4471 - DNA, 2295 bp, synthetic construct
  source 1..2295: mol_type = other DNA
atggccttaccagtgaccgccttgctcctgccgctggccttgctgctccacgccgccaggccggaagtgcagctggttgaatctggcggaggactggttcagcctggcggatctctgagactgtcttgtgccgccagcggcttcagcttcagcgacttttggatgagctgggtccgacaggcccctggcaaaggacttgaatgggtcgccacaatcagccaggccggcagcgagaaggactacgtggactctgtgaagggcagattcaccatcagccgggacaacgccaagaagtccctgtacctccagatgaacagcctgagagccgaggacaccgccgtgtactattgtgcctctggcgtgtacagcttcgactacagaggccagggcaccctggtcacagtctcttctggtaccggcggaggcggatctggcggcggaggtagcggtggcggaggatctgaattccagagcgtgctgacacagcctccatccgtgtctggcgctccaggccagagagtgaccatctcctgtaccggcagcggcagcaacatcggagccccctacgacgtgtcctggtatcagcaactgcctggcaccgcccccaagctgctgatctaccacaacaacaagcggcccagcggcgtgcccgatagattcagcggctctaagagcggcaccagcgccagcctggctatcactggactccaggccgaggacgaggccgactactactgccagagctacgacagcagcagcatcagcaccatcttcggcggaggcaccaagctgacagtgctgggagctctcgagatccagaaccctgatcctgccgtgtaccagctgcgggatagcaagagcagcgacaagagcgtgtgtctgttcaccgacttcgacagccagaccaacgtgtcccagagcaaggactccgacgtgtacatcaccgataagtgcgtgctggacatgcggagcatggacttcaagagcaactccgccgtggcctggtccaacaagtccgatttcgcctgcgccaacgccttcaacaacagcattatccccgaggacacattcttcccaagccccgagagcagctgcggctttaccagcgagagctaccagcagggcgtgctgagcgccaccatcctgtacgagatcctgctgggcaaggccaccctgtacgccgtgctggtgtctgccctggtgctgatggctatggtcaagcggaaggacagccggggacgcgccaagagaagcggatctggcgtgaagcagaccctgaatttcgacctgctgaagctggctggcgacgtggaatccaacccaggccctactagtatggactggatttggcgcatccttttccttgtcggcgctgctaccggcgcgcattccttcgaacaggtgcaactggtgcagagcggagccgaagtgaagaaacctggggccagcgtgaaggtgtcctgcaaggtgtccggctacaccctgaccgagctgagcattcactgggtgcgccaggcccctggcaagggactggaatggatgggcggcttcgaccccgaagagaacgagatcgtgtacgcccagcggttccagggcagagtgacaatgaccgaggacaccagcaccgacaccgcctacatggaactgagcagcctgcggagcgaggataccgccgtgtactactgtgccatcgtgggcagcttcagcggaatcgcctacagaccttggggccagggcacaatggtcaccgtgtctagcacgcgtgaggacctgaagaacgtgttcccacctgaggtggccgtgttcgagcctagcgaggccgagatcagccacacccagaaagccaccctcgtgtgcctggctaccggcttctaccccgaccatgtggaactgtcttggtgggtcaacggcaaagaggtgcacagcggcgtgtgtaccgacccccagccactgaaagaacagcccgccctgaacgacagccggtactgcctgagcagcagactgagagtgtccgccaccttctggcagaacccccggaaccacttcagatgccaggtgcagttctacggcctgagcgagaacgacgagtggacccaggacagagccaagcccgtgacccagatcgtgtctgccgaagcctggggcagagccgattgcgacgtgaagctggtggaaaagagcttcgagacagacaccaacctgaacttccagaacctgagcgtgatcggcttcagaatcctgctgctgaaagtggccggctttaacctgctgatgaccctgcggctgtggtccagc

SEQ ID NO: 4472 - DNA, 2259 bp, synthetic construct
  source 1..2259: mol_type = other DNA
atggccttaccagtgaccgccttgctcctgccgctggccttgctgctccacgccgccaggccggaagtgcagctggttgaatctggcggaggactggttcagcctggcggatctctgagactgtcttgtgccgccagcggcttcagcttcagcgacttttggatgagctgggtccgacaggcccctggcaaaggacttgaatgggtcgccacaatcagccaggccggcagcgagaaggactacgtggactctgtgaagggcagattcaccatcagccgggacaacgccaagaagtccctgtacctccagatgaacagcctgagagccgaggacaccgccgtgtactattgtgcctctggcgtgtacagcttcgactacagaggccagggcaccctggtcacagtctcttctggtaccggcggaggcggatctggcggcggaggtagcggtggcggaggatctgaattcgacatccagatgacccagagccccagcagcctgtctgccagcgtgggcgacagagtgaccatcacctgtagagccagccagggcatcagaaacaacctggcctggtatcagcagaagcccggcaaggcccccaagcggctgatctacgccgccagcaatctccagagcggcgtgcccagcagattcacaggctctggcagcggcaccgagttcaccctgatcgtgtctagcctccagcccgaggacttcgccacctactactgcctccagcaccacagctaccccctgacatctggcggaggcaccaaggtggaactcgagatccagaaccctgatcctgccgtgtaccagctgcgggatagcaagagcagcgacaagagcgtgtgtctgttcaccgacttcgacagccagaccaacgtgtcccagagcaaggactccgacgtgtacatcaccgataagtgcgtgctggacatgcggagcatggacttcaagagcaactccgccgtggcctggtccaacaagtccgatttcgcctgcgccaacgccttcaacaacagcattatccccgaggacacattcttcccaagccccgagagcagctgcggctttaccagcgagagctaccagcagggcgtgctgagcgccaccatcctgtacgagatcctgctgggcaaggccaccctgtacgccgtgctggtgtctgccctggtgctgatggctatggtcaagcggaaggacagccggggacgcgccaagagaagcggatctggcgtgaagcagaccctgaatttcgacctgctgaagctggctggcgacgtggaatccaacccaggccctactagtatggactggatttggcgcatccttttccttgtcggcgctgctaccggcgcgcattccttcgaagaggtgcaggtgctggaaagtggcggaggactggtgcagcctggcggctctctgagactgtcttgtgccgccagcggcttcaccttcagcagctacgccatgagctgggtgcgccaggcccctggaaaaggactggaatgggtgtccgccatcagcggctctggcgggtctaccaactacgccgatagcgtgaagggccggttcaccatcagccgggacaacagcaagaacaccctgtacctccagatgaacagcctgcgggccgaggacaccgccgtgtattattgtgccggcagcagcgggtggagcgagtattggggacagggcaccctcgtgaccgtgtcctctacgcgtgaggacctgaagaacgtgttcccacctgaggtggccgtgttcgagcctagcgaggccgagatcagccacacccagaaagccaccctcgtgtgcctggctaccggcttctaccccgaccatgtggaactgtcttggtgggtcaacggcaaagaggtgcacagcggcgtgtgtaccgacccccagccactgaaagaacagcccgccctgaacgacagccggtactgcctgagcagcagactgagagtgtccgccaccttctggcagaacccccggaaccacttcagatgccaggtgcagttctacggcctgagcgagaacgacgagtggacccaggacagagccaagcccgtgacccagatcgtgtctgccgaagcctggggcagagccgattgcgacgtgaagctggtggaaaagagcttcgagacagacaccaacctgaacttccagaacctgagcgtgatcggcttcagaatcctgctgctgaaagtggccggctttaacctgctgatgaccctgcggctgtggtccagc

SEQ ID NO: 4473 - DNA, 2277 bp, synthetic construct
  source 1..2277: mol_type = other DNA
atggccttaccagtgaccgccttgctcctgccgctggccttgctgctccacgccgccaggccggaagtgcagctggttgaatctggcggaggactggttcagcctggcggatctctgagactgtcttgtgccgccagcggcttcagcttcagcgacttttggatgagctgggtccgacaggcccctggcaaaggacttgaatgggtcgccacaatcagccaggccggcagcgagaaggactacgtggactctgtgaagggcagattcaccatcagccgggacaacgccaagaagtccctgtacctccagatgaacagcctgagagccgaggacaccgccgtgtactattgtgcctctggcgtgtacagcttcgactacagaggccagggcaccctggtcacagtctcttctggtaccggcggaggcggatctggcggcggaggtagcggtggcggaggatctgaattcgacgagatccagctggtgcagagcggagccgaagtgaagaagcctggcgagagcctgcggatcagctgcaagggcagcggcttcaacatcgaggactactacatccactgggtgcgccagatgcccggcaagggcctggaatggatgggcagaatcgaccccgagaacgacgagactaagtacggccccatcttccagggccacgtgaccatcagcgccgacaccagcatcaacaccgtgtacctccagtggtccagcctgaaggccagcgacaccgccatgtactactgcgcctttagaggcggcgtgtactggggccagggcaccacagtgacagtgtctagcctcgagatccagaaccctgatcctgccgtgtaccagctgcgggatagcaagagcagcgacaagagcgtgtgtctgttcaccgacttcgacagccagaccaacgtgtcccagagcaaggactccgacgtgtacatcaccgataagtgcgtgctggacatgcggagcatggacttcaagagcaactccgccgtggcctggtccaacaagtccgatttcgcctgcgccaacgccttcaacaacagcattatccccgaggacacattcttcccaagccccgagagcagctgcggctttaccagcgagagctaccagcagggcgtgctgagcgccaccatcctgtacgagatcctgctgggcaaggccaccctgtacgccgtgctggtgtctgccctggtgctgatggctatggtcaagcggaaggacagccggggacgcgccaagagaagcggatctggcgtgaagcagaccctgaatttcgacctgctgaagctggctggcgacgtggaatccaacccaggccctactagtatggactggatttggcgcatccttttccttgtcggcgctgctaccggcgcgcattccttcgaagatgtcgtgatgacccagagccccgacagcctggctgtgtctctgggagagagagccaccatcaactgcaagtccagccagtccctgctggacagcgacggcaagacctacctgaactggctccagcagaagcccggccagccccccaagagactgatctccctggtgtccaagctggactccggcgtgcccgatagattttccggctctggcagcggcaccgacttcaccctgacaatcagctcccttcaggccgaggacgtggccgtgtactattgctggcagggcacacacttccccggcacctttggcggaggcaccaaggtggaaatcaagacgcgtgaggacctgaagaacgtgttcccacctgaggtggccgtgttcgagcctagcgaggccgagatcagccacacccagaaagccaccctcgtgtgcctggctaccggcttctaccccgaccatgtggaactgtcttggtgggtcaacggcaaagaggtgcacagcggcgtgtgtaccgacccccagccactgaaagaacagcccgccctgaacgacagccggtactgcctgagcagcagactgagagtgtccgccaccttctggcagaacccccggaaccacttcagatgccaggtgcagttctacggcctgagcgagaacgacgagtggacccaggacagagccaagcccgtgacccagatcgtgtctgccgaagcctggggcagagccgattgcgacgtgaagctggtggaaaagagcttcgagacagacaccaacctgaacttccagaacctgagcgtgatcggcttcagaatcctgctgctgaaagtggccggctttaacctgctgatgaccctgcggctgtggtccagc

SEQ ID NO: 4474 - DNA, 2298 bp, synthetic construct
  source 1..2298: mol_type = other DNA
atggccttaccagtgaccgccttgctcctgccgctggccttgctgctccacgccgccaggccggaagtgcagctggttgaatctggcggaggactggttcagcctggcggatctctgagactgtcttgtgccgccagcggcttcagcttcagcgacttttggatgagctgggtccgacaggcccctggcaaaggacttgaatgggtcgccacaatcagccaggccggcagcgagaaggactacgtggactctgtgaagggcagattcaccatcagccgggacaacgccaagaagtccctgtacctccagatgaacagcctgagagccgaggacaccgccgtgtactattgtgcctctggcgtgtacagcttcgactacagaggccagggcaccctggtcacagtctcttctggtaccggcggaggcggatctggcggcggaggtagcggtggcggaggatctgaattcgacgagcttgtgatgacccagagccccagcagcctgacagtgacagccggcgagaaagtgaccatgagctgcaagagcagccagagcctgctgaacagcggcaaccagaagaactacctgacctggtatcagcagaagcccggccagccccccaagctgctgatctactgggccagcaccagagaaagcggcgtgcccgatagattcaccggctctggcagcggcaccgacttcaccctgacaatcagcagcgtgcaggccgaggacctggccgtgtactactgccagaacgactacagctaccccctgaccttcggagccggcaccaagctggaaatcaagctcgagatccagaaccctgatcctgccgtgtaccagctgcgggatagcaagagcagcgacaagagcgtgtgtctgttcaccgacttcgacagccagaccaacgtgtcccagagcaaggactccgacgtgtacatcaccgataagtgcgtgctggacatgcggagcatggacttcaagagcaactccgccgtggcctggtccaacaagtccgatttcgcctgcgccaacgccttcaacaacagcattatccccgaggacacattcttcccaagccccgagagcagctgcggctttaccagcgagagctaccagcagggcgtgctgagcgccaccatcctgtacgagatcctgctgggcaaggccaccctgtacgccgtgctggtgtctgccctggtgctgatggctatggtcaagcggaaggacagccggggacgcgccaagagaagcggatctggcgtgaagcagaccctgaatttcgacctgctgaagctggctggcgacgtggaatccaacccaggccctactagtatggactggatttggcgcatccttttccttgtcggcgctgctaccggcgcgcattccttcgaagaagtgcagctgctggaacagtctggcgccgaacttgtgcggcctggcaccagcgtgaagatcagctgtaaagccagcggctacgccttcaccaactactggctgggctgggtcaagcagaggcctggacacggcctggaatggatcggcgacatctttcccggctccggcaacatccactacaacgagaagttcaagggcaaggccaccctgaccgccgacaagtctagcagcaccgcctacatgcagctgtccagcctgacctttgaggacagcgccgtgtatttctgtgcccggctgcggaactgggacgagcccatggattattggggccagggcaccaccgtgaccgtgtctagtacgcgtgaggacctgaagaacgtgttcccacctgaggtggccgtgttcgagcctagcgaggccgagatcagccacacccagaaagccaccctcgtgtgcctggctaccggcttctaccccgaccatgtggaactgtcttggtgggtcaacggcaaagaggtgcacagcggcgtgtgtaccgacccccagccactgaaagaacagcccgccctgaacgacagccggtactgcctgagcagcagactgagagtgtccgccaccttctggcagaacccccggaaccacttcagatgccaggtgcagttctacggcctgagcgagaacgacgagtggacccaggacagagccaagcccgtgacccagatcgtgtctgccgaagcctggggcagagccgattgcgacgtgaagctggtggaaaagagcttcgagacagacaccaacctgaacttccagaacctgagcgtgatcggcttcagaatcctgctgctgaaagtggccggctttaacctgctgatgaccctgcggctgtggtccagc

SEQ ID NO: 4475 - DNA, 2301 bp, synthetic construct
  source 1..2301: mol_type = other DNA
atggccttaccagtgaccgccttgctcctgccgctggccttgctgctccacgccgccaggccggaagtgcagctggttgaatctggcggaggactggttcagcctggcggatctctgagactgtcttgtgccgccagcggcttcagcttcagcgacttttggatgagctgggtccgacaggcccctggcaaaggacttgaatgggtcgccacaatcagccaggccggcagcgagaaggactacgtggactctgtgaagggcagattcaccatcagccgggacaacgccaagaagtccctgtacctccagatgaacagcctgagagccgaggacaccgccgtgtactattgtgcctctggcgtgtacagcttcgactacagaggccagggcaccctggtcacagtctcttctggtaccggcggaggcggatctggcggcggaggtagcggtggcggaggatctgaattcgacgagctgcagatgacccagagccctagcagcctgtctgccagcgtgggcgacagagtgaccatcacctgtagagccagccagagcatcagcagctacctgaactggtatcagcagaagcccggccagccccccaaactgctgatctactgggccagcaccagagaaagcggcgtgcccgatagattcagcggcagcgagagcggcaccaactacaccctgaccatcagctccctgcagcccgaggacttcgccacctacttttgccagcagagcgacagcctgcccatcacctttggacagggcacccggctggacattcagctcgagatccagaaccctgatcctgccgtgtaccagctgcgggatagcaagagcagcgacaagagcgtgtgtctgttcaccgacttcgacagccagaccaacgtgtcccagagcaaggactccgacgtgtacatcaccgataagtgcgtgctggacatgcggagcatggacttcaagagcaactccgccgtggcctggtccaacaagtccgatttcgcctgcgccaacgccttcaacaacagcattatccccgaggacacattcttcccaagccccgagagcagctgcggctttaccagcgagagctaccagcagggcgtgctgagcgccaccatcctgtacgagatcctgctgggcaaggccaccctgtacgccgtgctggtgtctgccctggtgctgatggctatggtcaagcggaaggacagccggggacgcgccaagagaagcggatctggcgtgaagcagaccctgaatttcgacctgctgaagctggctggcgacgtggaatccaacccaggccctactagtatggactggatttggcgcatccttttccttgtcggcgctgctaccggcgcgcattccttcgaagaggtgcaactgctggaatctgggggcggagtggtgcagcctggcagaagcctgagactgagctgtgccgccagcggcttcaccttcagctcctacggaatgcactgggtgcgccaggcccctggcaaaggactggaatgggtggccgtgatctcctacgacggcagcaacaagtactacgccgacagcgtgaagggccggttcaccatcagccgggacaacagcaagaacaccctgtacctgcagatgaacagcctgcgggccgaggacaccgccgtgtactactgcgccaaggatatgggctggggcagcggctggcggccttactactactacggcatggacgtgtggggccagggcaccaccgtgacagtgtcatctacgcgtgaggacctgaagaacgtgttcccacctgaggtggccgtgttcgagcctagcgaggccgagatcagccacacccagaaagccaccctcgtgtgcctggctaccggcttctaccccgaccatgtggaactgtcttggtgggtcaacggcaaagaggtgcacagcggcgtgtgtaccgacccccagccactgaaagaacagcccgccctgaacgacagccggtactgcctgagcagcagactgagagtgtccgccaccttctggcagaacccccggaaccacttcagatgccaggtgcagttctacggcctgagcgagaacgacgagtggacccaggacagagccaagcccgtgacccagatcgtgtctgccgaagcctggggcagagccgattgcgacgtgaagctggtggaaaagagcttcgagacagacaccaacctgaacttccagaacctgagcgtgatcggcttcagaatcctgctgctgaaagtggccggctttaacctgctgatgaccctgcggctgtggtccagc

SEQ ID NO: 4476 - DNA, 2292 bp, synthetic construct
  source 1..2292: mol_type = other DNA
atggccttaccagtgaccgccttgctcctgccgctggccttgctgctccacgccgccaggccggaagtgcagctggttgaatctggcggaggactggttcagcctggcggatctctgagactgtcttgtgccgccagcggcttcagcttcagcgacttttggatgagctgggtccgacaggcccctggcaaaggacttgaatgggtcgccacaatcagccaggccggcagcgagaaggactacgtggactctgtgaagggcagattcaccatcagccgggacaacgccaagaagtccctgtacctccagatgaacagcctgagagccgaggacaccgccgtgtactattgtgcctctggcgtgtacagcttcgactacagaggccagggcaccctggtcacagtctcttctggtaccggcggaggcggatctggcggcggaggtagcggtggcggaggatctgaattcgacgacatccaaatgacacagagtccttctagtttgagtgcgagcgtgggggacagggtgaccattacctgcagggccagccagagcataagctcataccttaattggtaccagcaaaaaccaggtaaggcccctaagctcctgatctacgcggcctcttcacttcaatctggggtcccttcccgcttcagtggctccggcagcggcaccgacttcacgctcactatatcaagtctgcagcctgaggatctcgccacctattactgtcaacaaagttattccacccctttcacctttggaccgggcacgaaagtggatattaagctcgagatccagaaccctgatcctgccgtgtaccagctgcgggatagcaagagcagcgacaagagcgtgtgtctgttcaccgacttcgacagccagaccaacgtgtcccagagcaaggactccgacgtgtacatcaccgataagtgcgtgctggacatgcggagcatggacttcaagagcaactccgccgtggcctggtccaacaagtccgatttcgcctgcgccaacgccttcaacaacagcattatccccgaggacacattcttcccaagccccgagagcagctgcggctttaccagcgagagctaccagcagggcgtgctgagcgccaccatcctgtacgagatcctgctgggcaaggccaccctgtacgccgtgctggtgtctgccctggtgctgatggctatggtcaagcggaaggacagccggggacgcgccaagagaagcggatctggcgtgaagcagaccctgaatttcgacctgctgaagctggctggcgacgtggaatccaacccaggccctactagtatggactggatttggcgcatccttttccttgtcggcgctgctaccggcgcgcattccttcgaagtgcacgaggtccagcttgtgcagtccggggcagaggtcaagaagcctggttctagcgtaaaagtgagttgcaaagcctcaggtgggacattttcatcctacgcgatcagttgggttagacaggctcctggtcaagggctggaatggatgggcggaattattccaatcttcggaacagcgaattacgcgcagaagttccagggtagagtaaccatcactgctgacaagtccacctccaccgcatacatggaattgtctagtctccggagcgaggatacggcggtgtattattgtgctacgttcgccctgtttggcttccgcgaacaggctttcgacatctgggggcagggcacgacagtcacggttagtagtacgcgtgaggacctgaagaacgtgttcccacctgaggtggccgtgttcgagcctagcgaggccgagatcagccacacccagaaagccaccctcgtgtgcctggctaccggcttctaccccgaccatgtggaactgtcttggtgggtcaacggcaaagaggtgcacagcggcgtgtgtaccgacccccagccactgaaagaacagcccgccctgaacgacagccggtactgcctgagcagcagactgagagtgtccgccaccttctggcagaacccccggaaccacttcagatgccaggtgcagttctacggcctgagcgagaacgacgagtggacccaggacagagccaagcccgtgacccagatcgtgtctgccgaagcctggggcagagccgattgcgacgtgaagctggtggaaaagagcttcgagacagacaccaacctgaacttccagaacctgagcgtgatcggcttcagaatcctgctgctgaaagtggccggctttaacctgctgatgaccctgcggctgtggtccagc

SEQ ID NO: 4477 - DNA, 2286 bp, synthetic construct
  source 1..2286: mol_type = other DNA
atggccttaccagtgaccgccttgctcctgccgctggccttgctgctccacgccgccaggccggaagtgcagctggttgaatctggcggaggactggttcagcctggcggatctctgagactgtcttgtgccgccagcggcttcagcttcagcgacttttggatgagctgggtccgacaggcccctggcaaaggacttgaatgggtcgccacaatcagccaggccggcagcgagaaggactacgtggactctgtgaagggcagattcaccatcagccgggacaacgccaagaagtccctgtacctccagatgaacagcctgagagccgaggacaccgccgtgtactattgtgcctctggcgtgtacagcttcgactacagaggccagggcaccctggtcacagtctcttctggtaccggcggaggcggatctggcggcggaggtagcggtggcggaggatctgaattcgacatcgtgctgacccagagccctctgagcctggccgtgtctctgggacagcctgccatcatcagctgcaaggccagccagagcgtgtcctttgccggcacctctctgatgcactggtatcaccagaagcccggccagcagcccagactgctgatctacagagccagcaacctggaagccggcgtgcccgatagattttccggcagcggcagcaagaccgacttcaccctgaccatcagccccgtggaagccgaagatgccgccacctactactgccagcagagcagagagtacccctacaccttcggcggaggcaccaagctggaaatcaagaggctcgagatccagaaccctgatcctgccgtgtaccagctgcgggatagcaagagcagcgacaagagcgtgtgtctgttcaccgacttcgacagccagaccaacgtgtcccagagcaaggactccgacgtgtacatcaccgataagtgcgtgctggacatgcggagcatggacttcaagagcaactccgccgtggcctggtccaacaagtccgatttcgcctgcgccaacgccttcaacaacagcattatccccgaggacacattcttcccaagccccgagagcagctgcggctttaccagcgagagctaccagcagggcgtgctgagcgccaccatcctgtacgagatcctgctgggcaaggccaccctgtacgccgtgctggtgtctgccctggtgctgatggctatggtcaagcggaaggacagccggggacgcgccaagagaagcggatctggcgtgaagcagaccctgaatttcgacctgctgaagctggctggcgacgtggaatccaacccaggccctactagtatggactggatttggcgcatccttttccttgtcggcgctgctaccggcgcgcattccttcgaacaggtccaactggtgcagagcggagccgaggtcgtgaagcctggcgcttccgtgaagattagctgcaaagccagcggctacacctttaccggctactttatgaactgggtcaagcagagccctggccagagcctggaatggatcggcagaatccacccctacgacggcgacaccttctacaaccagaagttccagggcaaggccaccctgacagtggacaagagcagcaacaccgcccacatggaactgctgagcctgaccagcgaggacttcgccgtgtactactgcaccagatacgacggcagccgggctatggactattggggccagggcaccaccgtgaccgtgtctagtacgcgtgaggacctgaagaacgtgttcccacctgaggtggccgtgttcgagcctagcgaggccgagatcagccacacccagaaagccaccctcgtgtgcctggctaccggcttctaccccgaccatgtggaactgtcttggtgggtcaacggcaaagaggtgcacagcggcgtgtgtaccgacccccagccactgaaagaacagcccgccctgaacgacagccggtactgcctgagcagcagactgagagtgtccgccaccttctggcagaacccccggaaccacttcagatgccaggtgcagttctacggcctgagcgagaacgacgagtggacccaggacagagccaagcccgtgacccagatcgtgtctgccgaagcctggggcagagccgattgcgacgtgaagctggtggaaaagagcttcgagacagacaccaacctgaacttccagaacctgagcgtgatcggcttcagaatcctgctgctgaaagtggccggctttaacctgctgatgaccctgcggctgtggtccagc

SEQ ID NO: 4478 - DNA, 2277 bp, synthetic construct
  source 1..2277: mol_type = other DNA
atggccttaccagtgaccgccttgctcctgccgctggccttgctgctccacgccgccaggccggaagtgcagctggttgaatctggcggaggactggttcagcctggcggatctctgagactgtcttgtgccgccagcggcttcagcttcagcgacttttggatgagctgggtccgacaggcccctggcaaaggacttgaatgggtcgccacaatcagccaggccggcagcgagaaggactacgtggactctgtgaagggcagattcaccatcagccgggacaacgccaagaagtccctgtacctccagatgaacagcctgagagccgaggacaccgccgtgtactattgtgcctctggcgtgtacagcttcgactacagaggccagggcaccctggtcacagtctcttctggtaccggcggaggcggatctggcggcggaggtagcggtggcggaggatctgaattcgacgacgttgtgatgacccagacccccctgagcctgcctgtgacacctggcgaacctgccagcatcagctgtcggagcagccagagcctggtgcacagaaacggcaacacctacctgcactggtatctccagaagcccggccagagccccaagctgctgatccacaaggtgtccaacagattcagcggcgtgcccgacagattctccggcagcggctctggcaccgacttcaccctgaagatcagccgggtggaagccgaggacctgggcgtgtacttctgtagccagagcacccatgtgccccccctgacatttggagccggcaccaagctggaactgaagctcgagatccagaaccctgatcctgccgtgtaccagctgcgggatagcaagagcagcgacaagagcgtgtgtctgttcaccgacttcgacagccagaccaacgtgtcccagagcaaggactccgacgtgtacatcaccgataagtgcgtgctggacatgcggagcatggacttcaagagcaactccgccgtggcctggtccaacaagtccgatttcgcctgcgccaacgccttcaacaacagcattatccccgaggacacattcttcccaagccccgagagcagctgcggctttaccagcgagagctaccagcagggcgtgctgagcgccaccatcctgtacgagatcctgctgggcaaggccaccctgtacgccgtgctggtgtctgccctggtgctgatggctatggtcaagcggaaggacagccggggacgcgccaagagaagcggatctggcgtgaagcagaccctgaatttcgacctgctgaagctggctggcgacgtggaatccaacccaggccctactagtatggactggatttggcgcatccttttccttgtcggcgctgctaccggcgcgcattccttcgaagaagtgcagctggtgcagtctggcgctgaggtggaaaagcctggggccagcgtgaagattagctgcaaggccagcggcagcagcttcaccggctacaacatgaactgggtgcgccagaacatcggcaagagcctggaatggatcggagccatcgacccctactacggcggcaccagctacaaccagaagttcaagggcagagccaccctgaccgtggacaagagcaccagcaccgcctacatgcacctgaagtccctgcggagcgaggacaccgccgtgtactactgtgtgtccggcatggaatattggggccagggcaccagcgtgaccgtgtctagtacgcgtgaggacctgaagaacgtgttcccacctgaggtggccgtgttcgagcctagcgaggccgagatcagccacacccagaaagccaccctcgtgtgcctggctaccggcttctaccccgaccatgtggaactgtcttggtgggtcaacggcaaagaggtgcacagcggcgtgtgtaccgacccccagccactgaaagaacagcccgccctgaacgacagccggtactgcctgagcagcagactgagagtgtccgccaccttctggcagaacccccggaaccacttcagatgccaggtgcagttctacggcctgagcgagaacgacgagtggacccaggacagagccaagcccgtgacccagatcgtgtctgccgaagcctggggcagagccgattgcgacgtgaagctggtggaaaagagcttcgagacagacaccaacctgaacttccagaacctgagcgtgatcggcttcagaatcctgctgctgaaagtggccggctttaacctgctgatgaccctgcggctgtggtccagc

SEQ ID NO: 4479 - DNA, 2271 bp, synthetic construct
  source 1..2271: mol_type = other DNA
atggccttaccagtgaccgccttgctcctgccgctggccttgctgctccacgccgccaggccggaagtgcagctggttgaatctggcggaggactggttcagcctggcggatctctgagactgtcttgtgccgccagcggcttcagcttcagcgacttttggatgagctgggtccgacaggcccctggcaaaggacttgaatgggtcgccacaatcagccaggccggcagcgagaaggactacgtggactctgtgaagggcagattcaccatcagccgggacaacgccaagaagtccctgtacctccagatgaacagcctgagagccgaggacaccgccgtgtactattgtgcctctggcgtgtacagcttcgactacagaggccagggcaccctggtcacagtctcttctggtaccggcggaggcggatctggcggcggaggtagcggtggcggaggatctgaattcgacgagatcgtgatgacccagacccctgccaccctgtctgtgtctgccggcgagagagtgaccattacctgcaaggccagccagagcgtgtccaacgacgtgacctggtatcagcagaagcccggccaggcccccagactgctgatctacagcgccagcaacagatacagcggcgtgcccgccagattttccggcagcggctacggcaccgagttcaccttcaccatcagcagcgtgcagagcgaggacttcgccgtgtacttctgtcagcaagactacagcagcttcggccagggcaccaagctggaaatcaagaggctcgagatccagaaccctgatcctgccgtgtaccagctgcgggatagcaagagcagcgacaagagcgtgtgtctgttcaccgacttcgacagccagaccaacgtgtcccagagcaaggactccgacgtgtacatcaccgataagtgcgtgctggacatgcggagcatggacttcaagagcaactccgccgtggcctggtccaacaagtccgatttcgcctgcgccaacgccttcaacaacagcattatccccgaggacacattcttcccaagccccgagagcagctgcggctttaccagcgagagctaccagcagggcgtgctgagcgccaccatcctgtacgagatcctgctgggcaaggccaccctgtacgccgtgctggtgtctgccctggtgctgatggctatggtcaagcggaaggacagccggggacgcgccaagagaagcggatctggcgtgaagcagaccctgaatttcgacctgctgaagctggctggcgacgtggaatccaacccaggccctactagtatggactggatttggcgcatccttttccttgtcggcgctgctaccggcgcgcattccttcgaacaggtgcagctggtggaatctggacctggcgtggtgcagcctggcagaagcctgagaatcagctgtgccgtgtccggcttcagcgtgaccaactacggcgtgcactgggtgcgccagccacctggaaaaggactggaatggctgggcgtgatctgggctggcggcatcaccaactacaacagcgccttcatgtcccggctgaccatctccaaggacaacagcaagaacaccgtgtacctccagatgaacagcctgcgggccgaggacaccgccatgtactactgtgcttccagaggcggccactacggctacgccctggattattggggccagggaaccctcgtgaccgtgtcctctacgcgtgaggacctgaagaacgtgttcccacctgaggtggccgtgttcgagcctagcgaggccgagatcagccacacccagaaagccaccctcgtgtgcctggctaccggcttctaccccgaccatgtggaactgtcttggtgggtcaacggcaaagaggtgcacagcggcgtgtgtaccgacccccagccactgaaagaacagcccgccctgaacgacagccggtactgcctgagcagcagactgagagtgtccgccaccttctggcagaacccccggaaccacttcagatgccaggtgcagttctacggcctgagcgagaacgacgagtggacccaggacagagccaagcccgtgacccagatcgtgtctgccgaagcctggggcagagccgattgcgacgtgaagctggtggaaaagagcttcgagacagacaccaacctgaacttccagaacctgagcgtgatcggcttcagaatcctgctgctgaaagtggccggctttaacctgctgatgaccctgcggctgtggtccagc

SEQ ID NO: 4480 - DNA, 2277 bp, synthetic construct
  source 1..2277: mol_type = other DNA
atggccttaccagtgaccgccttgctcctgccgctggccttgctgctccacgccgccaggccggaagtgcagctggttgaatctggcggaggactggttcagcctggcggatctctgagactgtcttgtgccgccagcggcttcagcttcagcgacttttggatgagctgggtccgacaggcccctggcaaaggacttgaatgggtcgccacaatcagccaggccggcagcgagaaggactacgtggactctgtgaagggcagattcaccatcagccgggacaacgccaagaagtccctgtacctccagatgaacagcctgagagccgaggacaccgccgtgtactattgtgcctctggcgtgtacagcttcgactacagaggccagggcaccctggtcacagtctcttctggtaccggcggaggcggatctggcggcggaggtagcggtggcggaggatctgaattcgacatccagatgacccagaccgccagcagcctgcctgcctctctgggcgacagagtgaccatctcctgtagcgccagccaggacatcagcaactacctgaactggtatcagcagaaacccgacggcaccgtgaagctgctgatcttctacagcagcaacctgcacagcggcgtgcccagcagattttctggcggcggaagcggcaccgactacagcctgaccatcagcaatctggaacccgaggacattgccacctacttttgccaccagtacagcaagctgccctggacctttggcggaggcaccaagctggaaatcaagagactcgagatccagaaccctgatcctgccgtgtaccagctgcgggatagcaagagcagcgacaagagcgtgtgtctgttcaccgacttcgacagccagaccaacgtgtcccagagcaaggactccgacgtgtacatcaccgataagtgcgtgctggacatgcggagcatggacttcaagagcaactccgccgtggcctggtccaacaagtccgatttcgcctgcgccaacgccttcaacaacagcattatccccgaggacacattcttcccaagccccgagagcagctgcggctttaccagcgagagctaccagcagggcgtgctgagcgccaccatcctgtacgagatcctgctgggcaaggccaccctgtacgccgtgctggtgtctgccctggtgctgatggctatggtcaagcggaaggacagccggggacgcgccaagagaagcggatctggcgtgaagcagaccctgaatttcgacctgctgaagctggctggcgacgtggaatccaacccaggccctactagtatggactggatttggcgcatccttttccttgtcggcgctgctaccggcgcgcattccttcgaagaagtgaccctggtggaaagcggcggagacttcgtgaagcctggcggctctctgaaggtgtcctgtgccgccagcggcttcgcctttagccactacgccatgagctgggtgcgccagacccctgccaagagactggaatgggtggcctacatcagcagcggcggctccggcacctactactccgatagcgtgaagggccggttcaccatcagccgggacaacgccaagaacaccctgtacctccagatgcggagcctgcggagcgaggacagcgccatgtatttctgcaccagagtgaagctgggcacctattacttcgactcttggggccagggcaccaccctgaccgtgtcatctacgcgtgaggacctgaagaacgtgttcccacctgaggtggccgtgttcgagcctagcgaggccgagatcagccacacccagaaagccaccctcgtgtgcctggctaccggcttctaccccgaccatgtggaactgtcttggtgggtcaacggcaaagaggtgcacagcggcgtgtgtaccgacccccagccactgaaagaacagcccgccctgaacgacagccggtactgcctgagcagcagactgagagtgtccgccaccttctggcagaacccccggaaccacttcagatgccaggtgcagttctacggcctgagcgagaacgacgagtggacccaggacagagccaagcccgtgacccagatcgtgtctgccgaagcctggggcagagccgattgcgacgtgaagctggtggaaaagagcttcgagacagacaccaacctgaacttccagaacctgagcgtgatcggcttcagaatcctgctgctgaaagtggccggctttaacctgctgatgaccctgcggctgtggtccagc

SEQ ID NO: 4481 - DNA, 2283 bp, synthetic construct
  source 1..2283: mol_type = other DNA
atggccttaccagtgaccgccttgctcctgccgctggccttgctgctccacgccgccaggccggaagtgcagctggttgaatctggcggaggactggttcagcctggcggatctctgagactgtcttgtgccgccagcggcttcagcttcagcgacttttggatgagctgggtccgacaggcccctggcaaaggacttgaatgggtcgccacaatcagccaggccggcagcgagaaggactacgtggactctgtgaagggcagattcaccatcagccgggacaacgccaagaagtccctgtacctccagatgaacagcctgagagccgaggacaccgccgtgtactattgtgcctctggcgtgtacagcttcgactacagaggccagggcaccctggtcacagtctcttctggtaccggcggaggcggatctggcggcggaggtagcggtggcggaggatctgaattccagttcgtgctgacccagagcccttctgcctctgctgccctgggagcctctgccaagctgacctgtacactgagcagcgcccacaagacctacaccatcgactggtatcagcagcagaagggaaaggcccccagatacctgatccaagtgaagtccgacggcacctacacaaaggccaccggcgtgcccgatagattcagcggcagtagcagcggagccgatagatacctgattatccccagcgtgcaggccgacgacgaggccgattactactgcggcaccgattacaccggcggctacgtgttcggcggaggcacacaactgaccgtgacactcgagatccagaaccctgatcctgccgtgtaccagctgcgggatagcaagagcagcgacaagagcgtgtgtctgttcaccgacttcgacagccagaccaacgtgtcccagagcaaggactccgacgtgtacatcaccgataagtgcgtgctggacatgcggagcatggacttcaagagcaactccgccgtggcctggtccaacaagtccgatttcgcctgcgccaacgccttcaacaacagcattatccccgaggacacattcttcccaagccccgagagcagctgcggctttaccagcgagagctaccagcagggcgtgctgagcgccaccatcctgtacgagatcctgctgggcaaggccaccctgtacgccgtgctggtgtctgccctggtgctgatggctatggtcaagcggaaggacagccggggacgcgccaagagaagcggatctggcgtgaagcagaccctgaatttcgacctgctgaagctggctggcgacgtggaatccaacccaggccctactagtatggactggatttggcgcatccttttccttgtcggcgctgctaccggcgcgcattccttcgaagagcaactgaaagagtctggcggcggactgttcaagcccaccgataccctgaccctgacctgcaccgtgtccggcttcagcctgagctactacggcgtgaactgggtgcgccaggcccctggcaatggcctggaatggatcggcacaatcggcggcagcggcgacacctactatgcctcttgggccaagtccagaagcaccatcatcagaaacaccaacgagaacaccgtgaccctgaagatgaccagcctgacagccgccgacaccgccacctacttttgcgtcagatacgccaacatcggctacgagtatttcaacgtgtggggacccggcaccctcgtgaccgtgtcatctacgcgtgaggacctgaagaacgtgttcccacctgaggtggccgtgttcgagcctagcgaggccgagatcagccacacccagaaagccaccctcgtgtgcctggctaccggcttctaccccgaccatgtggaactgtcttggtgggtcaacggcaaagaggtgcacagcggcgtgtgtaccgacccccagccactgaaagaacagcccgccctgaacgacagccggtactgcctgagcagcagactgagagtgtccgccaccttctggcagaacccccggaaccacttcagatgccaggtgcagttctacggcctgagcgagaacgacgagtggacccaggacagagccaagcccgtgacccagatcgtgtctgccgaagcctggggcagagccgattgcgacgtgaagctggtggaaaagagcttcgagacagacaccaacctgaacttccagaacctgagcgtgatcggcttcagaatcctgctgctgaaagtggccggctttaacctgctgatgaccctgcggctgtggtccagc

SEQ ID NO: 4482 - DNA, 2298 bp, synthetic construct
  source 1..2298: mol_type = other DNA
atggccttaccagtgaccgccttgctcctgccgctggccttgctgctccacgccgccaggccggaagtgcagctggttgaatctggcggaggactggttcagcctggcggatctctgagactgtcttgtgccgccagcggcttcagcttcagcgacttttggatgagctgggtccgacaggcccctggcaaaggacttgaatgggtcgccacaatcagccaggccggcagcgagaaggactacgtggactctgtgaagggcagattcaccatcagccgggacaacgccaagaagtccctgtacctccagatgaacagcctgagagccgaggacaccgccgtgtactattgtgcctctggcgtgtacagcttcgactacagaggccagggcaccctggtcacagtctcttctggtaccggcggaggcggatctggcggcggaggtagcggtggcggaggatctgaattccagttcgtgctgacccagagcccttctgtgtctgccgccctgggagcctctgccaagctgacctgtacactgagcagcgcccacaagacctacaccatcgactggtatcagcagcagcagggcgaggcccccagatacctgatgcaagtgaagtccgacggcagctacaccaagggcaccggcgtgcccgatagattcagcggcagtagcagcggagccgatagatacctgattatccccagcgtgcaggccgacgacgaggccggatatgtgtgcggcgctgacgacaatggcggctacgtgttcggcggaggcacccaactgacagtgacactcgagatccagaaccctgatcctgccgtgtaccagctgcgggatagcaagagcagcgacaagagcgtgtgtctgttcaccgacttcgacagccagaccaacgtgtcccagagcaaggactccgacgtgtacatcaccgataagtgcgtgctggacatgcggagcatggacttcaagagcaactccgccgtggcctggtccaacaagtccgatttcgcctgcgccaacgccttcaacaacagcattatccccgaggacacattcttcccaagccccgagagcagctgcggctttaccagcgagagctaccagcagggcgtgctgagcgccaccatcctgtacgagatcctgctgggcaaggccaccctgtacgccgtgctggtgtctgccctggtgctgatggctatggtcaagcggaaggacagccggggacgcgccaagagaagcggatctggcgtgaagcagaccctgaatttcgacctgctgaagctggctggcgacgtggaatccaacccaggccctactagtatggactggatttggcgcatccttttccttgtcggcgctgctaccggcgcgcattccttcgaacagagcgtgaaagagtctgagggcggcctgttcaagcccaccgataccctgaccctgacctgcaccgtgtccggcttcagcctgagcagacacgccctgacatgggtgcgccaggcccctggaaatggcctggaatggatcggagccatcgacaacgccggcaccacctactatgcctcttgggccaagtccagaagcaccatcacccggaacaccgacctgcacaccgtgaccctgaagatgaccagcctgaccgccagcgacaccgccacctacttttgcgccagagtgttctacgacatcaacagcggctactacctggacggcatggacctgtggggacctggcacacttgtgaccgtgtccagcacgcgtgaggacctgaagaacgtgttcccacctgaggtggccgtgttcgagcctagcgaggccgagatcagccacacccagaaagccaccctcgtgtgcctggctaccggcttctaccccgaccatgtggaactgtcttggtgggtcaacggcaaagaggtgcacagcggcgtgtgtaccgacccccagccactgaaagaacagcccgccctgaacgacagccggtactgcctgagcagcagactgagagtgtccgccaccttctggcagaacccccggaaccacttcagatgccaggtgcagttctacggcctgagcgagaacgacgagtggacccaggacagagccaagcccgtgacccagatcgtgtctgccgaagcctggggcagagccgattgcgacgtgaagctggtggaaaagagcttcgagacagacaccaacctgaacttccagaacctgagcgtgatcggcttcagaatcctgctgctgaaagtggccggctttaacctgctgatgaccctgcggctgtggtccagc

SEQ ID NO: 4483 - DNA, 2280 bp, synthetic construct
  source 1..2280: mol_type = other DNA
atggccttaccagtgaccgccttgctcctgccgctggccttgctgctccacgccgccaggccggaagtgcagctggttgaatctggcggaggactggttcagcctggcggatctctgagactgtcttgtgccgccagcggcttcagcttcagcgacttttggatgagctgggtccgacaggcccctggcaaaggacttgaatgggtcgccacaatcagccaggccggcagcgagaaggactacgtggactctgtgaagggcagattcaccatcagccgggacaacgccaagaagtccctgtacctccagatgaacagcctgagagccgaggacaccgccgtgtactattgtgcctctggcgtgtacagcttcgactacagaggccagggcaccctggtcacagtctcttctggtaccggcggaggcggatctggcggcggaggtagcggtggcggaggatctgaattcgacatccagatgacccagagccccagcagcctgtctgccagcgtgggcgacagagtgaccatcacctgtagagccagccagggcatcagctcttggctggcctggtatcagcagaagcccgagaaggcccccaagagcctgatctacgccgcctctagtctccagagcggcgtgcccagcagattttctggcagcggctccggcaccgacttcaccctgacaatcagctccctccagcccgaggacttcgccacctactactgccagcagtacaacagctacccccccacctttggcggaggcaccaaggtggaaatcaagctcgagatccagaaccctgatcctgccgtgtaccagctgcgggatagcaagagcagcgacaagagcgtgtgtctgttcaccgacttcgacagccagaccaacgtgtcccagagcaaggactccgacgtgtacatcaccgataagtgcgtgctggacatgcggagcatggacttcaagagcaactccgccgtggcctggtccaacaagtccgatttcgcctgcgccaacgccttcaacaacagcattatccccgaggacacattcttcccaagccccgagagcagctgcggctttaccagcgagagctaccagcagggcgtgctgagcgccaccatcctgtacgagatcctgctgggcaaggccaccctgtacgccgtgctggtgtctgccctggtgctgatggctatggtcaagcggaaggacagccggggacgcgccaagagaagcggatctggcgtgaagcagaccctgaatttcgacctgctgaagctggctggcgacgtggaatccaacccaggccctactagtatggactggatttggcgcatccttttccttgtcggcgctgctaccggcgcgcattccttcgaagaagtgcaactggtggaatcaggcggcggactggtgcagcctggcgagtctctgagactgagctgtgtggcctccggcttcaccttcagccggtacaagatgaactgggtgcgccaggcccctggcaagggactggaatgggtgtcctacatcagccgcagcggcagagacatctactacgccgacagcgtgaagggccggttcaccatcagcagagacaacgccaagaacagcctgtacctccagatgaactccctgcgggacgaggacaccgccgtgtactactgtgccggaaccgtgaccacctattactacttcggcatggacgtgtggggccacggcaccaccgtgacagtgtcatctacgcgtgaggacctgaagaacgtgttcccacctgaggtggccgtgttcgagcctagcgaggccgagatcagccacacccagaaagccaccctcgtgtgcctggctaccggcttctaccccgaccatgtggaactgtcttggtgggtcaacggcaaagaggtgcacagcggcgtgtgtaccgacccccagccactgaaagaacagcccgccctgaacgacagccggtactgcctgagcagcagactgagagtgtccgccaccttctggcagaacccccggaaccacttcagatgccaggtgcagttctacggcctgagcgagaacgacgagtggacccaggacagagccaagcccgtgacccagatcgtgtctgccgaagcctggggcagagccgattgcgacgtgaagctggtggaaaagagcttcgagacagacaccaacctgaacttccagaacctgagcgtgatcggcttcagaatcctgctgctgaaagtggccggctttaacctgctgatgaccctgcggctgtggtccagc

SEQ ID NO: 4484 - DNA, 2283 bp, synthetic construct
  source 1..2283: mol_type = other DNA
atggccttaccagtgaccgccttgctcctgccgctggccttgctgctccacgccgccaggccggaagtgcagctggttgaatctggcggaggactggttcagcctggcggatctctgagactgtcttgtgccgccagcggcttcagcttcagcgacttttggatgagctgggtccgacaggcccctggcaaaggacttgaatgggtcgccacaatcagccaggccggcagcgagaaggactacgtggactctgtgaagggcagattcaccatcagccgggacaacgccaagaagtccctgtacctccagatgaacagcctgagagccgaggacaccgccgtgtactattgtgcctctggcgtgtacagcttcgactacagaggccagggcaccctggtcacagtctcttctggtaccggcggaggcggatctggcggcggaggtagcggtggcggaggatctgaattcgacatccagatgacccagagccccagcagcctgtctgccagcgtgggcgacagagtgaccatcacctgtagagccagccagggcatcagctcttggctggcctggtatcagcagaagcccgagaaggcccccaagagcctgatctacgccgcctctagtctccagagcggcgtgcccagcagattttctggcagcggctccggcaccgacttcaccctgacaatcagctccctccagcccgaggacttcgccacctactactgccagcagtacaacagctaccctcccacctttggcggaggcaccaaggtggaaatcaagctcgagatccagaaccctgatcctgccgtgtaccagctgcgggatagcaagagcagcgacaagagcgtgtgtctgttcaccgacttcgacagccagaccaacgtgtcccagagcaaggactccgacgtgtacatcaccgataagtgcgtgctggacatgcggagcatggacttcaagagcaactccgccgtggcctggtccaacaagtccgatttcgcctgcgccaacgccttcaacaacagcattatccccgaggacacattcttcccaagccccgagagcagctgcggctttaccagcgagagctaccagcagggcgtgctgagcgccaccatcctgtacgagatcctgctgggcaaggccaccctgtacgccgtgctggtgtctgccctggtgctgatggctatggtcaagcggaaggacagccggggacgcgccaagagaagcggatctggcgtgaagcagaccctgaatttcgacctgctgaagctggctggcgacgtggaatccaacccaggccctactagtatggactggatttggcgcatccttttccttgtcggcgctgctaccggcgcgcattccttcgaagaagtgcaactggtggaatccgggggaggctctgtgcagcctggcgagtctctgagactgagctgtgtggcctccggcttcaccttcagccggtacaagatgaactgggtgcgccaggcccctggcaagggactggaatgggtgtcctacatcagccgcagcggcagagacatctactacgccgacagcgtgaagggccggttcaccatcagcagagacaacgccaagaacagcctgtacctccagatgaactccctgcgggacgaggacaccgccgtgtactactgtgccggaaccgtgaccacctattactacgacttcggcatggacgtgtggggccagggcacaaccgtgacagtgtctagcacgcgtgaggacctgaagaacgtgttcccacctgaggtggccgtgttcgagcctagcgaggccgagatcagccacacccagaaagccaccctcgtgtgcctggctaccggcttctaccccgaccatgtggaactgtcttggtgggtcaacggcaaagaggtgcacagcggcgtgtgtaccgacccccagccactgaaagaacagcccgccctgaacgacagccggtactgcctgagcagcagactgagagtgtccgccaccttctggcagaacccccggaaccacttcagatgccaggtgcagttctacggcctgagcgagaacgacgagtggacccaggacagagccaagcccgtgacccagatcgtgtctgccgaagcctggggcagagccgattgcgacgtgaagctggtggaaaagagcttcgagacagacaccaacctgaacttccagaacctgagcgtgatcggcttcagaatcctgctgctgaaagtggccggctttaacctgctgatgaccctgcggctgtggtccagc

SEQ ID NO: 4485 - DNA, 2277 bp, synthetic construct
  source 1..2277: mol_type = other DNA
atggccttaccagtgaccgccttgctcctgccgctggccttgctgctccacgccgccaggccggaagtgcagctggttgaatctggcggaggactggttcagcctggcggatctctgagactgtcttgtgccgccagcggcttcagcttcagcgacttttggatgagctgggtccgacaggcccctggcaaaggacttgaatgggtcgccacaatcagccaggccggcagcgagaaggactacgtggactctgtgaagggcagattcaccatcagccgggacaacgccaagaagtccctgtacctccagatgaacagcctgagagccgaggacaccgccgtgtactattgtgcctctggcgtgtacagcttcgactacagaggccagggcaccctggtcacagtctcttctggtaccggcggaggcggatctggcggcggaggtagcggtggcggaggatctgaattccagtctgtgctgacacagcctccatctgcctctggcacacctggacagagagtgaccatcagctgtagcggcagcagaagcaacgtcggcggcaactacgtgttctggtatcagcaggtcccaggcgctacccctaagctgctgatctacagaagcaatcagcggcctagcggcgtgcccgatagatttgccggaagcaagagcggcagctctgccagccttgccatctctggactgagaagcgaggacgaggccgactactactgtgccacctgggatgatagcctgagcggcttcgtgtttggcaccggcaccaaagtgacagtgcttggtctcgagatccagaaccctgatcctgccgtgtaccagctgcgggatagcaagagcagcgacaagagcgtgtgtctgttcaccgacttcgacagccagaccaacgtgtcccagagcaaggactccgacgtgtacatcaccgataagtgcgtgctggacatgcggagcatggacttcaagagcaactccgccgtggcctggtccaacaagtccgatttcgcctgcgccaacgccttcaacaacagcattatccccgaggacacattcttcccaagccccgagagcagctgcggctttaccagcgagagctaccagcagggcgtgctgagcgccaccatcctgtacgagatcctgctgggcaaggccaccctgtacgccgtgctggtgtctgccctggtgctgatggctatggtcaagcggaaggacagccggggacgcgccaagagaagcggatctggcgtgaagcagaccctgaatttcgacctgctgaagctggctggcgacgtggaatccaacccaggccctactagtatggactggatttggcgcatccttttccttgtcggcgctgctaccggcgcgcattccttcgaagttcagctggttgaatctggcggcggactggttaagcctggcggatctctgagactgtcttgtgccgccagcggcttcaccttcagcgattactacatgagctggatcagacaggcccctggcaaaggactggaatgggtgtcctacatcagcagcagcggctccaccatctactacgccgatagcgtgaagggcagattcaccatcagccgggacaacgccaagaacagcctgtacctccagatgaactccctgagagccgaggacaccgccgtgtactattgcgccagaggctacggcaaagcctacgatcaatggggccagggcacactggtcaccgtttcttctacgcgtgaggacctgaagaacgtgttcccacctgaggtggccgtgttcgagcctagcgaggccgagatcagccacacccagaaagccaccctcgtgtgcctggctaccggcttctaccccgaccatgtggaactgtcttggtgggtcaacggcaaagaggtgcacagcggcgtgtgtaccgacccccagccactgaaagaacagcccgccctgaacgacagccggtactgcctgagcagcagactgagagtgtccgccaccttctggcagaacccccggaaccacttcagatgccaggtgcagttctacggcctgagcgagaacgacgagtggacccaggacagagccaagcccgtgacccagatcgtgtctgccgaagcctggggcagagccgattgcgacgtgaagctggtggaaaagagcttcgagacagacaccaacctgaacttccagaacctgagcgtgatcggcttcagaatcctgctgctgaaagtggccggctttaacctgctgatgaccctgcggctgtggtccagc

SEQ ID NO: 4486 - DNA, 2274 bp, synthetic construct
  source 1..2274: mol_type = other DNA
atggccttaccagtgaccgccttgctcctgccgctggccttgctgctccacgccgccaggccggaagtgcagctggttgaatctggcggaggactggttcagcctggcggatctctgagactgtcttgtgccgccagcggcttcagcttcagcgacttttggatgagctgggtccgacaggcccctggcaaaggacttgaatgggtcgccacaatcagccaggccggcagcgagaaggactacgtggactctgtgaagggcagattcaccatcagccgggacaacgccaagaagtccctgtacctccagatgaacagcctgagagccgaggacaccgccgtgtactattgtgcctctggcgtgtacagcttcgactacagaggccagggcaccctggtcacagtctcttctggtaccggcggaggcggatctggcggcggaggtagcggtggcggaggatctgaattccagtctgtggtcacacagccacctagcatgtctgccgctccaggccagcaagtgaccatctcttgtagcggcggcaacagcaacatcgagcggaactacgtgtcctggtatctgcaactgcctggcacagcccctaagctggtcatcttcgacaacgacagacggcccagcggcatccccgatagattttctggcagcaagagcggcaccagcgccacactgggaattaccggacttcagacaggcgacgaggccgactactactgtggcacatgggactctagcctgagaggctgggttttcggcggaggcacaaagctgacagtgcttggtctcgagatccagaaccctgatcctgccgtgtaccagctgcgggatagcaagagcagcgacaagagcgtgtgtctgttcaccgacttcgacagccagaccaacgtgtcccagagcaaggactccgacgtgtacatcaccgataagtgcgtgctggacatgcggagcatggacttcaagagcaactccgccgtggcctggtccaacaagtccgatttcgcctgcgccaacgccttcaacaacagcattatccccgaggacacattcttcccaagccccgagagcagctgcggctttaccagcgagagctaccagcagggcgtgctgagcgccaccatcctgtacgagatcctgctgggcaaggccaccctgtacgccgtgctggtgtctgccctggtgctgatggctatggtcaagcggaaggacagccggggacgcgccaagagaagcggatctggcgtgaagcagaccctgaatttcgacctgctgaagctggctggcgacgtggaatccaacccaggccctactagtatggactggatttggcgcatccttttccttgtcggcgctgctaccggcgcgcattccttcgaagtgcagctcgttgagtctggcggcggactgattcaacctggcggaagcctgagactgagctgtgccgcttccggcttcaccttcagcaactacgccatgaactgggttcgacaggcccctggcaaaggactggaatgggtgtccaccatcaacggcagaggcagcagcaccatctacgccgattctgtgaagggcagattcaccatcagccgggacaacagcaagaacaccctgtacctccagatgaactccctgagagccgaggacaccgccacctattactgtgcccggtacatcagcagaggactgggcgattcttggggccagggcacactggttacagtgacgcgtgaggacctgaagaacgtgttcccacctgaggtggccgtgttcgagcctagcgaggccgagatcagccacacccagaaagccaccctcgtgtgcctggctaccggcttctaccccgaccatgtggaactgtcttggtgggtcaacggcaaagaggtgcacagcggcgtgtgtaccgacccccagccactgaaagaacagcccgccctgaacgacagccggtactgcctgagcagcagactgagagtgtccgccaccttctggcagaacccccggaaccacttcagatgccaggtgcagttctacggcctgagcgagaacgacgagtggacccaggacagagccaagcccgtgacccagatcgtgtctgccgaagcctggggcagagccgattgcgacgtgaagctggtggaaaagagcttcgagacagacaccaacctgaacttccagaacctgagcgtgatcggcttcagaatcctgctgctgaaagtggccggctttaacctgctgatgaccctgcggctgtggtccagc

SEQ ID NO: 4487 - DNA, 2277 bp, synthetic construct
  source 1..2277: mol_type = other DNA
atggccttaccagtgaccgccttgctcctgccgctggccttgctgctccacgccgccaggccggaagtgcagctggttgaatctggcggaggactggttcagcctggcggatctctgagactgtcttgtgccgccagcggcttcagcttcagcgacttttggatgagctgggtccgacaggcccctggcaaaggacttgaatgggtcgccacaatcagccaggccggcagcgagaaggactacgtggactctgtgaagggcagattcaccatcagccgggacaacgccaagaagtccctgtacctccagatgaacagcctgagagccgaggacaccgccgtgtactattgtgcctctggcgtgtacagcttcgactacagaggccagggcaccctggtcacagtctcttctggtaccggcggaggcggatctggcggcggaggtagcggtggcggaggatctgaattcgacgtcgtgatgacccagacccctctgagcctgcctgtgtccctgggcgatcaggccagcatcagctgtagaagcagccagagcctggtgcacagcaacggcaacacctacctgcactggtatctccagaagcccggccagagccccaagctgctgatctacaaggtgtccaacagattcagcggcgtgcccgacagattctccggcagcggctctggcaccgacttcaccctgaagatcagccgggtggaagccgaggacctgggcgtgtacttctgtagccagaacacccccgtgccccccaagtttggcagcggcaccaagctggaaatcaagctcgagatccagaaccctgatcctgccgtgtaccagctgcgggatagcaagagcagcgacaagagcgtgtgtctgttcaccgacttcgacagccagaccaacgtgtcccagagcaaggactccgacgtgtacatcaccgataagtgcgtgctggacatgcggagcatggacttcaagagcaactccgccgtggcctggtccaacaagtccgatttcgcctgcgccaacgccttcaacaacagcattatccccgaggacacattcttcccaagccccgagagcagctgcggctttaccagcgagagctaccagcagggcgtgctgagcgccaccatcctgtacgagatcctgctgggcaaggccaccctgtacgccgtgctggtgtctgccctggtgctgatggctatggtcaagcggaaggacagccggggacgcgccaagagaagcggatctggcgtgaagcagaccctgaatttcgacctgctgaagctggctggcgacgtggaatccaacccaggccctactagtatggactggatttggcgcatccttttccttgtcggcgctgctaccggcgcgcattccttcgaacaggtgcagctccagcagtctggcgctgaactcgtgcggcctggcgcttctgtgaagctgtcttgcaaggccagcggctacaccttcaacgactacgagatgcactgggtcaagcagacccctgtgcacggcctgaagtggatcggagccctggaacccaagaccggcgataccgcctacagccagaagttcaagggcaaggccaccctgaccgccgacaagagcagcagcacagcctacatggaactgcggagcctgaccagcgaggacagcgccgtgtactactgcaccagctgctactactacacctacagcggccagggcaccctcgtgacagtgtctgctacgcgtgaggacctgaagaacgtgttcccacctgaggtggccgtgttcgagcctagcgaggccgagatcagccacacccagaaagccaccctcgtgtgcctggctaccggcttctaccccgaccatgtggaactgtcttggtgggtcaacggcaaagaggtgcacagcggcgtgtgtaccgacccccagccactgaaagaacagcccgccctgaacgacagccggtactgcctgagcagcagactgagagtgtccgccaccttctggcagaacccccggaaccacttcagatgccaggtgcagttctacggcctgagcgagaacgacgagtggacccaggacagagccaagcccgtgacccagatcgtgtctgccgaagcctggggcagagccgattgcgacgtgaagctggtggaaaagagcttcgagacagacaccaacctgaacttccagaacctgagcgtgatcggcttcagaatcctgctgctgaaagtggccggctttaacctgctgatgaccctgcggctgtggtccagc

SEQ ID NO: 4488 - DNA, 2274 bp, synthetic construct
  source 1..2274: mol_type = other DNA
atggccttaccagtgaccgccttgctcctgccgctggccttgctgctccacgccgccaggccggaagtgcagctggttgaatctggcggaggactggttcagcctggcggatctctgagactgtcttgtgccgccagcggcttcagcttcagcgacttttggatgagctgggtccgacaggcccctggcaaaggacttgaatgggtcgccacaatcagccaggccggcagcgagaaggactacgtggactctgtgaagggcagattcaccatcagccgggacaacgccaagaagtccctgtacctccagatgaacagcctgagagccgaggacaccgccgtgtactattgtgcctctggcgtgtacagcttcgactacagaggccagggcaccctggtcacagtctcttctggtaccggcggaggcggatctggcggcggaggtagcggtggcggaggatctgaattcgacatccaactgacccagagccccagcagcctgtctgcctctgtgggcgacagagtgaccatcacctgtagagccagccagggcatcagaaacgacctgggctggtatcagcagaagcccggcaaggcccccaagcggctgatctatgctgccagctccctccagaatggcgtgcccagcagattttccggcagcggctctggcaccgagttcaccctgaccatcagctccctccagcccgaggacttcgccacctactactgcctccagcacaacacctaccccgccttcggccagggcaccaaggtggaaatcaagagactcgagatccagaaccctgatcctgccgtgtaccagctgcgggatagcaagagcagcgacaagagcgtgtgtctgttcaccgacttcgacagccagaccaacgtgtcccagagcaaggactccgacgtgtacatcaccgataagtgcgtgctggacatgcggagcatggacttcaagagcaactccgccgtggcctggtccaacaagtccgatttcgcctgcgccaacgccttcaacaacagcattatccccgaggacacattcttcccaagccccgagagcagctgcggctttaccagcgagagctaccagcagggcgtgctgagcgccaccatcctgtacgagatcctgctgggcaaggccaccctgtacgccgtgctggtgtctgccctggtgctgatggctatggtcaagcggaaggacagccggggacgcgccaagagaagcggatctggcgtgaagcagaccctgaatttcgacctgctgaagctggctggcgacgtggaatccaacccaggccctactagtatggactggatttggcgcatccttttccttgtcggcgctgctaccggcgcgcattccttcgaacaggtgcaactccaggaatctggccctggcctcgtgaagcctagccagaccctgagcctgacctgtaccgtgtctggcggcagcatcagcagcttcaactactactggtcctggatcagacaccaccctggcaagggcctggaatggatcggctacatctactacagcggcagcacctacagcaaccccagcctgaagtcccgcgtgaccatctccgtggacaccagcaagaaccagtttagcctgaccctgtccagcgtgacagccgccgataccgccgtgtactactgcgccagaggctacaactggaactacttcgactactggggccagggaaccctcgtgaccgtgtctagtacgcgtgaggacctgaagaacgtgttcccacctgaggtggccgtgttcgagcctagcgaggccgagatcagccacacccagaaagccaccctcgtgtgcctggctaccggcttctaccccgaccatgtggaactgtcttggtgggtcaacggcaaagaggtgcacagcggcgtgtgtaccgacccccagccactgaaagaacagcccgccctgaacgacagccggtactgcctgagcagcagactgagagtgtccgccaccttctggcagaacccccggaaccacttcagatgccaggtgcagttctacggcctgagcgagaacgacgagtggacccaggacagagccaagcccgtgacccagatcgtgtctgccgaagcctggggcagagccgattgcgacgtgaagctggtggaaaagagcttcgagacagacaccaacctgaacttccagaacctgagcgtgatcggcttcagaatcctgctgctgaaagtggccggctttaacctgctgatgaccctgcggctgtggtccagc

SEQ ID NO: 4489 - DNA, 2280 bp, synthetic construct
  source 1..2280: mol_type = other DNA
atggccttaccagtgaccgccttgctcctgccgctggccttgctgctccacgccgccaggccggaagtgcagctggttgaatctggcggaggactggttcagcctggcggatctctgagactgtcttgtgccgccagcggcttcagcttcagcgacttttggatgagctgggtccgacaggcccctggcaaaggacttgaatgggtcgccacaatcagccaggccggcagcgagaaggactacgtggactctgtgaagggcagattcaccatcagccgggacaacgccaagaagtccctgtacctccagatgaacagcctgagagccgaggacaccgccgtgtactattgtgcctctggcgtgtacagcttcgactacagaggccagggcaccctggtcacagtctcttctggtaccggcggaggcggatctggcggcggaggtagcggtggcggaggatctgaattcgacgacatcgtgctgacccagagccccgccagcctggccgtgagcctgggccagagcgtgaccatcagctgcagagccagcgagagcgtggagtactacggcaccagcctgatgcagtggtaccagcagaagcccggccagccccccaagctgctgatctacgccaccagcaacgtggagagcggcgtgcccgccagattcagcggcagcggcagcggcaccgacttcagcctgaacatccaccccgtggaggaggacgacatcgccatgtacttctgccagcagagcagaaagctgcccagcaccttcggcggcggcaccaagctggagatcaagctcgagatccagaaccctgatcctgccgtgtaccagctgcgggatagcaagagcagcgacaagagcgtgtgtctgttcaccgacttcgacagccagaccaacgtgtcccagagcaaggactccgacgtgtacatcaccgataagtgcgtgctggacatgcggagcatggacttcaagagcaactccgccgtggcctggtccaacaagtccgatttcgcctgcgccaacgccttcaacaacagcattatccccgaggacacattcttcccaagccccgagagcagctgcggctttaccagcgagagctaccagcagggcgtgctgagcgccaccatcctgtacgagatcctgctgggcaaggccaccctgtacgccgtgctggtgtctgccctggtgctgatggctatggtcaagcggaaggacagccggggacgcgccaagagaagcggatctggcgtgaagcagaccctgaatttcgacctgctgaagctggctggcgacgtggaatccaacccaggccctactagtatggactggatttggcgcatccttttccttgtcggcgctgctaccggcgcgcattccttcgaagacgtgagactgcaggagagcggccccggccaggtgaagcccagccagaccgtgagcctgacctgcagcgtgaccggctacagcatcaccaacggcaaccactggtggaactggatcagacaggtgagcggcagcaagctggagtggatcggctacatcagcagcagcggcagcaccgacagcaaccccagcctgaagagcagaatcagcatcaccagagacaccagcaagaaccagctgttcctgcagctgaacagcgtgaccaccgaggacatcgccacctactactgcgccagaggctactacttcgactactggggccagggcaccaccctgaccgtgagcagcacgcgtgaggacctgaagaacgtgttcccacctgaggtggccgtgttcgagcctagcgaggccgagatcagccacacccagaaagccaccctcgtgtgcctggctaccggcttctaccccgaccatgtggaactgtcttggtgggtcaacggcaaagaggtgcacagcggcgtgtgtaccgacccccagccactgaaagaacagcccgccctgaacgacagccggtactgcctgagcagcagactgagagtgtccgccaccttctggcagaacccccggaaccacttcagatgccaggtgcagttctacggcctgagcgagaacgacgagtggacccaggacagagccaagcccgtgacccagatcgtgtctgccgaagcctggggcagagccgattgcgacgtgaagctggtggaaaagagcttcgagacagacaccaacctgaacttccagaacctgagcgtgatcggcttcagaatcctgctgctgaaagtggccggctttaacctgctgatgaccctgcggctgtggtccagc

SEQ ID NO: 4490 - DNA, 2277 bp, synthetic construct
  source 1..2277: mol_type = other DNA
atggccttaccagtgaccgccttgctcctgccgctggccttgctgctccacgccgccaggccggaagtgcagctggttgaatctggcggaggactggttcagcctggcggatctctgagactgtcttgtgccgccagcggcttcagcttcagcgacttttggatgagctgggtccgacaggcccctggcaaaggacttgaatgggtcgccacaatcagccaggccggcagcgagaaggactacgtggactctgtgaagggcagattcaccatcagccgggacaacgccaagaagtccctgtacctccagatgaacagcctgagagccgaggacaccgccgtgtactattgtgcctctggcgtgtacagcttcgactacagaggccagggcaccctggtcacagtctcttctggtaccggcggaggcggatctggcggcggaggtagcggtggcggaggatctgaattcgacatccagatgacccagagccccagcagcctgtctgccagcgtgggcgacagagtgaccatcacctgtagagccagccaggacgtgaacaccgccgtggcctggtatcagcagaagcctggcaaggcccccaagctgctgatctacagcgccagcttcctggaaagcggcgtgcccagcagattcagcggaagcagaagcggcaccgacttcaccctgaccatcagctccctccagcccgaggacttcgccacctactactgccagcagcactacaccacccctcccaccttcggccagaccaaggtggaaatcaagagactcgagatccagaaccctgatcctgccgtgtaccagctgcgggatagcaagagcagcgacaagagcgtgtgtctgttcaccgacttcgacagccagaccaacgtgtcccagagcaaggactccgacgtgtacatcaccgataagtgcgtgctggacatgcggagcatggacttcaagagcaactccgccgtggcctggtccaacaagtccgatttcgcctgcgccaacgccttcaacaacagcattatccccgaggacacattcttcccaagccccgagagcagctgcggctttaccagcgagagctaccagcagggcgtgctgagcgccaccatcctgtacgagatcctgctgggcaaggccaccctgtacgccgtgctggtgtctgccctggtgctgatggctatggtcaagcggaaggacagccggggacgcgccaagagaagcggatctggcgtgaagcagaccctgaatttcgacctgctgaagctggctggcgacgtggaatccaacccaggccctactagtatggactggatttggcgcatccttttccttgtcggcgctgctaccggcgcgcattccttcgaagaagtgcaactggtggaatctggcggcggactggtgcagcctggcggatctctgagactgagctgtgccgccagcggcttcaacatcaaggacacctacatccactgggtgcgccaggcccctggaaagggactggaatgggtggcccggatctaccccaccaacggctacaccagatacgccgacagcgtgaagggccggttcaccatcagcgccgacaccagcaagaataccgcctacctccagatgaacagcctgcgggccgaggataccgccgtgtactactgctcaagatggggaggcgacggcttctacgctatggacgtgtggggccagggcacccttgtgaccgtgtcatctacgcgtgaggacctgaagaacgtgttcccacctgaggtggccgtgttcgagcctagcgaggccgagatcagccacacccagaaagccaccctcgtgtgcctggctaccggcttctaccccgaccatgtggaactgtcttggtgggtcaacggcaaagaggtgcacagcggcgtgtgtaccgacccccagccactgaaagaacagcccgccctgaacgacagccggtactgcctgagcagcagactgagagtgtccgccaccttctggcagaacccccggaaccacttcagatgccaggtgcagttctacggcctgagcgagaacgacgagtggacccaggacagagccaagcccgtgacccagatcgtgtctgccgaagcctggggcagagccgattgcgacgtgaagctggtggaaaagagcttcgagacagacaccaacctgaacttccagaacctgagcgtgatcggcttcagaatcctgctgctgaaagtggccggctttaacctgctgatgaccctgcggctgtggtccagc

SEQ ID NO: 4491 - DNA, 2274 bp, synthetic construct
  source 1..2274: mol_type = other DNA
atggccttaccagtgaccgccttgctcctgccgctggccttgctgctccacgccgccaggccggaagtgcagctggttgaatctggcggaggactggttcagcctggcggatctctgagactgtcttgtgccgccagcggcttcagcttcagcgacttttggatgagctgggtccgacaggcccctggcaaaggacttgaatgggtcgccacaatcagccaggccggcagcgagaaggactacgtggactctgtgaagggcagattcaccatcagccgggacaacgccaagaagtccctgtacctccagatgaacagcctgagagccgaggacaccgccgtgtactattgtgcctctggcgtgtacagcttcgactacagaggccagggcaccctggtcacagtctcttctggtaccggcggaggcggatctggcggcggaggtagcggtggcggaggatctgaattcgaccagagcgtgctgacacagcctcctagcgtgtcagtggcccctggcaagaccgccagaatcccctgcgagggcaactacatcggcagcagcaacgtgcactggtatcagcagaagcccggccaggctcccgtgctcgtgatccacttcgacagcgacagacccagcggcatccccgacagattcagcggcagcaacagcggcaacatggctaccctgaccatcagcagagtggaagccggggacgaggccgactactactgtcaagtgtgggagaaccacggctgggtgttcggcggaggcaccaagctgacagtgctgtctctcgagatccagaaccctgatcctgccgtgtaccagctgcgggatagcaagagcagcgacaagagcgtgtgtctgttcaccgacttcgacagccagaccaacgtgtcccagagcaaggactccgacgtgtacatcaccgataagtgcgtgctggacatgcggagcatggacttcaagagcaactccgccgtggcctggtccaacaagtccgatttcgcctgcgccaacgccttcaacaacagcattatccccgaggacacattcttcccaagccccgagagcagctgcggctttaccagcgagagctaccagcagggcgtgctgagcgccaccatcctgtacgagatcctgctgggcaaggccaccctgtacgccgtgctggtgtctgccctggtgctgatggctatggtcaagcggaaggacagccggggacgcgccaagagaagcggatctggcgtgaagcagaccctgaatttcgacctgctgaagctggctggcgacgtggaatccaacccaggccctactagtatggactggatttggcgcatccttttccttgtcggcgctgctaccggcgcgcattccttcgaagaggtgcaactggtggaaacaggcggcggactggtgcagcctggcgagtctctgagactgagctgtgccgccagcggcttcaccttcagcgactacgagatgaactgggtgcgccaggcccctggaaagggcctggaatgggtgtcctacatcagcagctccggcagcaccatctactacgccgacagcgtgaagggccggtttaccatctaccgggacaacgccaagaacagcctgtacctccagatgaactccctgcgggccgaggacaccgccctgtactattgtgccagagcctggggcgtgggaccccctgattattggggacagggcaccctcgtgaccgtgtcctctacgcgtgaggacctgaagaacgtgttcccacctgaggtggccgtgttcgagcctagcgaggccgagatcagccacacccagaaagccaccctcgtgtgcctggctaccggcttctaccccgaccatgtggaactgtcttggtgggtcaacggcaaagaggtgcacagcggcgtgtgtaccgacccccagccactgaaagaacagcccgccctgaacgacagccggtactgcctgagcagcagactgagagtgtccgccaccttctggcagaacccccggaaccacttcagatgccaggtgcagttctacggcctgagcgagaacgacgagtggacccaggacagagccaagcccgtgacccagatcgtgtctgccgaagcctggggcagagccgattgcgacgtgaagctggtggaaaagagcttcgagacagacaccaacctgaacttccagaacctgagcgtgatcggcttcagaatcctgctgctgaaagtggccggctttaacctgctgatgaccctgcggctgtggtccagc

SEQ ID NO: 4492 - DNA, 2298 bp, synthetic construct
  source 1..2298: mol_type = other DNA
atggccttaccagtgaccgccttgctcctgccgctggccttgctgctccacgccgccaggccggaagtgcagctggttgaatctggcggaggactggttcagcctggcggatctctgagactgtcttgtgccgccagcggcttcagcttcagcgacttttggatgagctgggtccgacaggcccctggcaaaggacttgaatgggtcgccacaatcagccaggccggcagcgagaaggactacgtggactctgtgaagggcagattcaccatcagccgggacaacgccaagaagtccctgtacctccagatgaacagcctgagagccgaggacaccgccgtgtactattgtgcctctggcgtgtacagcttcgactacagaggccagggcaccctggtcacagtctcttctggtaccggcggaggcggatctggcggcggaggtagcggtggcggaggatctgaattcgacatccagatgacccagagccccagcagcctgtctgccagcgtgggcgataccgtgaccatcacctgtcaggccaacggctacctgaactggtatcagcagcggagaggcaaggcccccaagctgctgatctacgacggcagcaagctggaaagaggcgtgcccagcagattcagcggcagaagatggggccaggagtacaacctgaccatcaacaacctccagcccgaggatattgccacatacttttgccaggtgtacgagttcgtggtgcccggcacacggctggacctgaagagaacagtggctgctcctctcgagatccagaaccctgatcctgccgtgtaccagctgcgggatagcaagagcagcgacaagagcgtgtgtctgttcaccgacttcgacagccagaccaacgtgtcccagagcaaggactccgacgtgtacatcaccgataagtgcgtgctggacatgcggagcatggacttcaagagcaactccgccgtggcctggtccaacaagtccgatttcgcctgcgccaacgccttcaacaacagcattatccccgaggacacattcttcccaagccccgagagcagctgcggctttaccagcgagagctaccagcagggcgtgctgagcgccaccatcctgtacgagatcctgctgggcaaggccaccctgtacgccgtgctggtgtctgccctggtgctgatggctatggtcaagcggaaggacagccggggacgcgccaagagaagcggatctggcgtgaagcagaccctgaatttcgacctgctgaagctggctggcgacgtggaatccaacccaggccctactagtatggactggatttggcgcatccttttccttgtcggcgctgctaccggcgcgcattccttcgaacaggtgcagctgctccagtctggcgctgccgtgacaaagcctggcgcttctgtgcgggtgtcctgtgaagccagcggctacaacatccgggactacttcatccactggtggcggcaggctccaggccagggactccagtgggtgggatggatcaaccccaagaccggccagcccaacaaccccagacagttccagggcagagtgtccctgaccagacacgccagctgggacttcgacaccttcagcttctacatggatctgaaggccctgcggagcgacgataccgccgtgtacttctgcgccagacagagaagcgactactgggatttcgacgtgtggggcagcggcacccaagtgacagtgtctagcgccagcaccaagggacccacgcgtgaggacctgaagaacgtgttcccacctgaggtggccgtgttcgagcctagcgaggccgagatcagccacacccagaaagccaccctcgtgtgcctggctaccggcttctaccccgaccatgtggaactgtcttggtgggtcaacggcaaagaggtgcacagcggcgtgtgtaccgacccccagccactgaaagaacagcccgccctgaacgacagccggtactgcctgagcagcagactgagagtgtccgccaccttctggcagaacccccggaaccacttcagatgccaggtgcagttctacggcctgagcgagaacgacgagtggacccaggacagagccaagcccgtgacccagatcgtgtctgccgaagcctggggcagagccgattgcgacgtgaagctggtggaaaagagcttcgagacagacaccaacctgaacttccagaacctgagcgtgatcggcttcagaatcctgctgctgaaagtggccggctttaacctgctgatgaccctgcggctgtggtccagc

SEQ ID NO: 4493 - DNA, 2316 bp, synthetic construct
  source 1..2316: mol_type = other DNA
atggccttaccagtgaccgccttgctcctgccgctggccttgctgctccacgccgccaggccggaagtgcagctggttgaatctggcggaggactggttcagcctggcggatctctgagactgtcttgtgccgccagcggcttcagcttcagcgacttttggatgagctgggtccgacaggcccctggcaaaggacttgaatgggtcgccacaatcagccaggccggcagcgagaaggactacgtggactctgtgaagggcagattcaccatcagccgggacaacgccaagaagtccctgtacctccagatgaacagcctgagagccgaggacaccgccgtgtactattgtgcctctggcgtgtacagcttcgactacagaggccagggcaccctggtcacagtctcttctggtaccggcggaggcggatctggcggcggaggtagcggtggcggaggatctgaattccagtctgccctgacacagcctcctagcgcctctggctctcccggccagagcatcaccatcagctgtaccggcaccagcaacaacttcgtgtcctggtatcagcagcacgccggcaaggcccccaagctcgtgatctacgacgtgaacaagcggcccagcggcgtgcccgatagattcagcggcagcaagagcggcaacaccgccagcctgacagtgtctggcctccagaccgatgacgaggccgtgtactactgcggcagcctcgtgggcaactgggacgtgatctttggcggaggcaccaagctgaccgtgctgctcgagatccagaaccctgatcctgccgtgtaccagctgcgggatagcaagagcagcgacaagagcgtgtgtctgttcaccgacttcgacagccagaccaacgtgtcccagagcaaggactccgacgtgtacatcaccgataagtgcgtgctggacatgcggagcatggacttcaagagcaactccgccgtggcctggtccaacaagtccgatttcgcctgcgccaacgccttcaacaacagcattatccccgaggacacattcttcccaagccccgagagcagctgcggctttaccagcgagagctaccagcagggcgtgctgagcgccaccatcctgtacgagatcctgctgggcaaggccaccctgtacgccgtgctggtgtctgccctggtgctgatggctatggtcaagcggaaggacagccggggacgcgccaagagaagcggatctggcgtgaagcagaccctgaatttcgacctgctgaagctggctggcgacgtggaatccaacccaggccctactagtatggactggatttggcgcatccttttccttgtcggcgctgctaccggcgcgcattccttcgaacagccccagctccaggaatctggccccacactggtggaagccagcgagacactgagcctgacctgtgccgtgtccggcgattctaccgccgcctgcaatagcttctggggctgggtgcgccagcctcctggaaagggactggaatgggtgggaagcctgagccactgcgccagctattggaaccggggctggacctaccacaaccccagcctgaagtccagactgaccctggccctggacacccccaagaacctggtgttcctgaagctgaacagcgtgacagccgccgacaccgccacctactactgtgccagatttggcggcgaggtgctgcggtacaccgactggcctaaacctgcctgggtggacctgtggggcagaggaacactcgtgaccgtgtccagcacgcgtgaggacctgaagaacgtgttcccacctgaggtggccgtgttcgagcctagcgaggccgagatcagccacacccagaaagccaccctcgtgtgcctggctaccggcttctaccccgaccatgtggaactgtcttggtgggtcaacggcaaagaggtgcacagcggcgtgtgtaccgacccccagccactgaaagaacagcccgccctgaacgacagccggtactgcctgagcagcagactgagagtgtccgccaccttctggcagaacccccggaaccacttcagatgccaggtgcagttctacggcctgagcgagaacgacgagtggacccaggacagagccaagcccgtgacccagatcgtgtctgccgaagcctggggcagagccgattgcgacgtgaagctggtggaaaagagcttcgagacagacaccaacctgaacttccagaacctgagcgtgatcggcttcagaatcctgctgctgaaagtggccggctttaacctgctgatgaccctgcggctgtggtccagc

SEQ ID NO: 4494 - DNA, 2271 bp, synthetic construct
  source 1..2271: mol_type = other DNA
atggccttaccagtgaccgccttgctcctgccgctggccttgctgctccacgccgccaggccggaagtgcagctggttgaatctggcggaggactggttcagcctggcggatctctgagactgtcttgtgccgccagcggcttcagcttcagcgacttttggatgagctgggtccgacaggcccctggcaaaggacttgaatgggtcgccacaatcagccaggccggcagcgagaaggactacgtggactctgtgaagggcagattcaccatcagccgggacaacgccaagaagtccctgtacctccagatgaacagcctgagagccgaggacaccgccgtgtactattgtgcctctggcgtgtacagcttcgactacagaggccagggcaccctggtcacagtctcttctggtaccggcggaggcggatctggcggcggaggtagcggtggcggaggatctgaattcgagatcgtgctgacacagagccctggcaccctgagcctgtctccaggcgagacagccatcatcagctgccggacaagccagtacggcagcctggcctggtatcagcagaggccaggacaggcccccagactcgtgatctacagcggcagcacaagagccgccggaatccccgatagattcagcggctccagatggggacccgactacaacctgaccatcagcaacctggaaagcggcgacttcggcgtgtactactgccagcagtacgagttcttcggccagggcaccaaggtgcaggtggacatcaaaagactcgagatccagaaccctgatcctgccgtgtaccagctgcgggatagcaagagcagcgacaagagcgtgtgtctgttcaccgacttcgacagccagaccaacgtgtcccagagcaaggactccgacgtgtacatcaccgataagtgcgtgctggacatgcggagcatggacttcaagagcaactccgccgtggcctggtccaacaagtccgatttcgcctgcgccaacgccttcaacaacagcattatccccgaggacacattcttcccaagccccgagagcagctgcggctttaccagcgagagctaccagcagggcgtgctgagcgccaccatcctgtacgagatcctgctgggcaaggccaccctgtacgccgtgctggtgtctgccctggtgctgatggctatggtcaagcggaaggacagccggggacgcgccaagagaagcggatctggcgtgaagcagaccctgaatttcgacctgctgaagctggctggcgacgtggaatccaacccaggccctactagtatggactggatttggcgcatccttttccttgtcggcgctgctaccggcgcgcattccttcgaacaggtgcagctggtgcagtctggcggccagatgaagaaacccggcgagagcatgagaatcagctgtcgggcctccggctacgagttcatcgactgcaccctgaactggatcagactggcccctggcaagcggcctgagtggatgggatggctgaagcctagaggcggagccgtgaactacgccagacctctccagggcagagtgaccatgaccagggacgtgtacagcgataccgccttcctggaactgcggagcctgaccgtggatgataccgccgtgtacttctgcaccagaggcaagaactgcgattacaactgggacttcgagcactggggcagaggcacccctgtgatcgtgtctagcacgcgtgaggacctgaagaacgtgttcccacctgaggtggccgtgttcgagcctagcgaggccgagatcagccacacccagaaagccaccctcgtgtgcctggctaccggcttctaccccgaccatgtggaactgtcttggtgggtcaacggcaaagaggtgcacagcggcgtgtgtaccgacccccagccactgaaagaacagcccgccctgaacgacagccggtactgcctgagcagcagactgagagtgtccgccaccttctggcagaacccccggaaccacttcagatgccaggtgcagttctacggcctgagcgagaacgacgagtggacccaggacagagccaagcccgtgacccagatcgtgtctgccgaagcctggggcagagccgattgcgacgtgaagctggtggaaaagagcttcgagacagacaccaacctgaacttccagaacctgagcgtgatcggcttcagaatcctgctgctgaaagtggccggctttaacctgctgatgaccctgcggctgtggtccagc

SEQ ID NO: 4495 - DNA, 2301 bp, synthetic construct
  source 1..2301: mol_type = other DNA
atggccttaccagtgaccgccttgctcctgccgctggccttgctgctccacgccgccaggccggaagtgcagctggttgaatctggcggaggactggttcagcctggcggatctctgagactgtcttgtgccgccagcggcttcagcttcagcgacttttggatgagctgggtccgacaggcccctggcaaaggacttgaatgggtcgccacaatcagccaggccggcagcgagaaggactacgtggactctgtgaagggcagattcaccatcagccgggacaacgccaagaagtccctgtacctccagatgaacagcctgagagccgaggacaccgccgtgtactattgtgcctctggcgtgtacagcttcgactacagaggccagggcaccctggtcacagtctcttctggtaccggcggaggcggatctggcggcggaggtagcggtggcggaggatctgaattcgagctggtgctgacacagagccctggcaccctgtctctgtctgccggcgaaagagccaccctgagctgtagagccagccagagcgtgtcctctggcagcctggcttggtatcagcagaagccaggccaggcccccagactgctgatctacggcgcttctaccagagccaccggcatccccgatagattcagcggctctggctccggcaccgacttcaccctgacaatcggcagactggaacccgaggacctggccgtgtactactgccagcagtacggcaccagcccctacacattcggccagggcaccaagctggaaatcctcgagatccagaaccctgatcctgccgtgtaccagctgcgggatagcaagagcagcgacaagagcgtgtgtctgttcaccgacttcgacagccagaccaacgtgtcccagagcaaggactccgacgtgtacatcaccgataagtgcgtgctggacatgcggagcatggacttcaagagcaactccgccgtggcctggtccaacaagtccgatttcgcctgcgccaacgccttcaacaacagcattatccccgaggacacattcttcccaagccccgagagcagctgcggctttaccagcgagagctaccagcagggcgtgctgagcgccaccatcctgtacgagatcctgctgggcaaggccaccctgtacgccgtgctggtgtctgccctggtgctgatggctatggtcaagcggaaggacagccggggacgcgccaagagaagcggatctggcgtgaagcagaccctgaatttcgacctgctgaagctggctggcgacgtggaatccaacccaggccctactagtatggactggatttggcgcatccttttccttgtcggcgctgctaccggcgcgcattccttcgaactggaacagagcggagccgaagtgaagaaacccggcagcagcgtgcaggtgtcctgcaaagcaagcggcggcaccttctctatgtacggcttcaactgggtgcgccaggctcctggacacggcctggaatggatgggcggcatcatccccatcttcggcacctccaactacgcccagaaattccggggcagagtgaccttcaccgccgaccaggccacaagcaccgcctacatggaactgaccaacctgcggagcgacgacaccgccgtgtattattgcgccagagacttcggccccgactgggaggatggcgacagctacgatggcagcggcagaggcttcttcgacttctggggccagggaacccttgtgaccgtgtcctcaacgcgtgaggacctgaagaacgtgttcccacctgaggtggccgtgttcgagcctagcgaggccgagatcagccacacccagaaagccaccctcgtgtgcctggctaccggcttctaccccgaccatgtggaactgtcttggtgggtcaacggcaaagaggtgcacagcggcgtgtgtaccgacccccagccactgaaagaacagcccgccctgaacgacagccggtactgcctgagcagcagactgagagtgtccgccaccttctggcagaacccccggaaccacttcagatgccaggtgcagttctacggcctgagcgagaacgacgagtggacccaggacagagccaagcccgtgacccagatcgtgtctgccgaagcctggggcagagccgattgcgacgtgaagctggtggaaaagagcttcgagacagacaccaacctgaacttccagaacctgagcgtgatcggcttcagaatcctgctgctgaaagtggccggctttaacctgctgatgaccctgcggctgtggtccagc

SEQ ID NO: 4496 - DNA, 2241 bp, synthetic construct
  source 1..2241: mol_type = other DNA
atggccttaccagtgaccgccttgctcctgccgctggccttgctgctccacgccgccaggccggaagtgcagctggttgaatctggcggaggactggttcagcctggcggatctctgagactgtcttgtgccgccagcggcttcagcttcagcgacttttggatgagctgggtccgacaggcccctggcaaaggacttgaatgggtcgccacaatcagccaggccggcagcgagaaggactacgtggactctgtgaagggcagattcaccatcagccgggacaacgccaagaagtccctgtacctccagatgaacagcctgagagccgaggacaccgccgtgtactattgtgcctctggcgtgtacagcttcgactacagaggccagggcaccctggtcacagtctcttctggtaccggcggaggcggatctggcggcggaggtagcggtggcggaggatctgaattcgacatccagatgacccagagccccagcagcctgtctgccagcgtgggcgacagagtgaccatcacctgtcaggccagccaggacatcaacaactacctgaactggtatcagcagaagcccggcaaggcccccaagctgctgatctacgacgccagcaatctgcagaccggcgtgcccagcagattttccggctctggcagcggcaccgacttcaccttcaccatcgaggacattgccacctactactgccagcagtacaccttcggccctggcaccaaggtggacatcaaactcgagatccagaaccctgatcctgccgtgtaccagctgcgggatagcaagagcagcgacaagagcgtgtgtctgttcaccgacttcgacagccagaccaacgtgtcccagagcaaggactccgacgtgtacatcaccgataagtgcgtgctggacatgcggagcatggacttcaagagcaactccgccgtggcctggtccaacaagtccgatttcgcctgcgccaacgccttcaacaacagcattatccccgaggacacattcttcccaagccccgagagcagctgcggctttaccagcgagagctaccagcagggcgtgctgagcgccaccatcctgtacgagatcctgctgggcaaggccaccctgtacgccgtgctggtgtctgccctggtgctgatggctatggtcaagcggaaggacagccggggacgcgccaagagaagcggatctggcgtgaagcagaccctgaatttcgacctgctgaagctggctggcgacgtggaatccaacccaggccctactagtatggactggatttggcgcatccttttccttgtcggcgctgctaccggcgcgcattccttcgaagaagtgcaactgctggaatctggcggcggactggtgcagcctggcggatctctgagactgagctgtgccgccagcggcttcacctttagctggtacagcatgacctgggtgcgccaggcccctggcaaaggactggaatgggtgtccagcatcgtgccctggggcgatttcacccagtacgccgatagcgtgaagggccggttcaccatcagccgggacaacagcaagaacaccctgtacctgcagatgaacagcctgcgggccgaggacaccgccgtgtactattgtgccaagggacctggctggggcagcttcgatctgtggggcagaggaacccttgtgaccgtgtccagcacgcgtgaggacctgaagaacgtgttcccacctgaggtggccgtgttcgagcctagcgaggccgagatcagccacacccagaaagccaccctcgtgtgcctggctaccggcttctaccccgaccatgtggaactgtcttggtgggtcaacggcaaagaggtgcacagcggcgtgtgtaccgacccccagccactgaaagaacagcccgccctgaacgacagccggtactgcctgagcagcagactgagagtgtccgccaccttctggcagaacccccggaaccacttcagatgccaggtgcagttctacggcctgagcgagaacgacgagtggacccaggacagagccaagcccgtgacccagatcgtgtctgccgaagcctggggcagagccgattgcgacgtgaagctggtggaaaagagcttcgagacagacaccaacctgaacttccagaacctgagcgtgatcggcttcagaatcctgctgctgaaagtggccggctttaacctgctgatgaccctgcggctgtggtccagc

SEQ ID NO: 4497 - DNA, 2271 bp, synthetic construct
  source 1..2271: mol_type = other DNA
atggccttaccagtgaccgccttgctcctgccgctggccttgctgctccacgccgccaggccggaagtgcagctggttgaatctggcggaggactggttcagcctggcggatctctgagactgtcttgtgccgccagcggcttcagcttcagcgacttttggatgagctgggtccgacaggcccctggcaaaggacttgaatgggtcgccacaatcagccaggccggcagcgagaaggactacgtggactctgtgaagggcagattcaccatcagccgggacaacgccaagaagtccctgtacctccagatgaacagcctgagagccgaggacaccgccgtgtactattgtgcctctggcgtgtacagcttcgactacagaggccagggcaccctggtcacagtctcttctggtaccggcggaggcggatctggcggcggaggtagcggtggcggaggatctgaattcgacatccagatgacccagagccccagcagcctgtctgccagcgtgggcgacagagtgaccatcacctgtaccgccagcctgagcgtgtccagcacctacctgcactggtatcagcagaagcccggcagcagccccaagctgtggatctacagcaccagcaacctggcctccggcgtgcccagcagattttctggcagcggctctggcaccagctacaccctgaccatcagctccctccagcccgaggacttcgccacctactactgccaccagtaccacagaagccccctgacctttggcggaggcaccaaggtggaaatcaagagactcgagatccagaaccctgatcctgccgtgtaccagctgcgggatagcaagagcagcgacaagagcgtgtgtctgttcaccgacttcgacagccagaccaacgtgtcccagagcaaggactccgacgtgtacatcaccgataagtgcgtgctggacatgcggagcatggacttcaagagcaactccgccgtggcctggtccaacaagtccgatttcgcctgcgccaacgccttcaacaacagcattatccccgaggacacattcttcccaagccccgagagcagctgcggctttaccagcgagagctaccagcagggcgtgctgagcgccaccatcctgtacgagatcctgctgggcaaggccaccctgtacgccgtgctggtgtctgccctggtgctgatggctatggtcaagcggaaggacagccggggacgcgccaagagaagcggatctggcgtgaagcagaccctgaatttcgacctgctgaagctggctggcgacgtggaatccaacccaggccctactagtatggactggatttggcgcatccttttccttgtcggcgctgctaccggcgcgcattccttcgaagaagtgcaactggtggaatctggcggcggactggtgcagcctggcggatctctgagactgagctgtgccgccagcggcttcagcctgaccaaatacggcgtgcactgggtgcgccaggcccctggaaaaggactggaatgggtgggagtgaagtgggctggcggctccaccgactacaacagcgccctgatgagccggttcaccatcagcaaggacaacgccaagaacagcctgtacctccagatgaactccctgcgggccgaggacaccgccgtgtactactgtgccagagatcaccgggacgctatggactactggggccagggaacactcgtgaccgtgtcctctacgcgtgaggacctgaagaacgtgttcccacctgaggtggccgtgttcgagcctagcgaggccgagatcagccacacccagaaagccaccctcgtgtgcctggctaccggcttctaccccgaccatgtggaactgtcttggtgggtcaacggcaaagaggtgcacagcggcgtgtgtaccgacccccagccactgaaagaacagcccgccctgaacgacagccggtactgcctgagcagcagactgagagtgtccgccaccttctggcagaacccccggaaccacttcagatgccaggtgcagttctacggcctgagcgagaacgacgagtggacccaggacagagccaagcccgtgacccagatcgtgtctgccgaagcctggggcagagccgattgcgacgtgaagctggtggaaaagagcttcgagacagacaccaacctgaacttccagaacctgagcgtgatcggcttcagaatcctgctgctgaaagtggccggctttaacctgctgatgaccctgcggctgtggtccagc

SEQ ID NO: 4498 - DNA, 2283 bp, synthetic construct
  source 1..2283: mol_type = other DNA
atggccttaccagtgaccgccttgctcctgccgctggccttgctgctccacgccgccaggccggaagtgcagctggttgaatctggcggaggactggttcagcctggcggatctctgagactgtcttgtgccgccagcggcttcagcttcagcgacttttggatgagctgggtccgacaggcccctggcaaaggacttgaatgggtcgccacaatcagccaggccggcagcgagaaggactacgtggactctgtgaagggcagattcaccatcagccgggacaacgccaagaagtccctgtacctccagatgaacagcctgagagccgaggacaccgccgtgtactattgtgcctctggcgtgtacagcttcgactacagaggccagggcaccctggtcacagtctcttctggtaccggcggaggcggatctggcggcggaggtagcggtggcggaggatctgaattcgacatccagatgacccagagccccagcagcctgtctgccagcgtgggcgacagagtgaccatcacatgcaaggccagccaggacgtgggaacagccgtggcctggtatcagcagaagcctggcaaggcccccaagctgctgatctacagcgccagctacagatccaccggcgtgcccagcagattttccggctctggcagcggcaccgacttcaccctgaccatctctagcctccagcccgaggacttcgccacctactactgccagcaccactactccgccccctggacatttggcggaggcaccaaggtggaaatcaagctcgagatccagaaccctgatcctgccgtgtaccagctgcgggatagcaagagcagcgacaagagcgtgtgtctgttcaccgacttcgacagccagaccaacgtgtcccagagcaaggactccgacgtgtacatcaccgataagtgcgtgctggacatgcggagcatggacttcaagagcaactccgccgtggcctggtccaacaagtccgatttcgcctgcgccaacgccttcaacaacagcattatccccgaggacacattcttcccaagccccgagagcagctgcggctttaccagcgagagctaccagcagggcgtgctgagcgccaccatcctgtacgagatcctgctgggcaaggccaccctgtacgccgtgctggtgtctgccctggtgctgatggctatggtcaagcggaaggacagccggggacgcgccaagagaagcggatctggcgtgaagcagaccctgaatttcgacctgctgaagctggctggcgacgtggaatccaacccaggccctactagtatggactggatttggcgcatccttttccttgtcggcgctgctaccggcgcgcattccttcgaagaagtgcaactggtggaatcaggcggcggactggtgcagcctggcggatctctgagactgagctgtgccgccagcggcttcaccttcagcagaaacggcatgagctgggtgcgccaggcccctggaaaaggactggaatgggtggcaaccgtgtccagcggcggcagctacatctactacgccgacagcgtgaagggccggttcaccatctccagagacaacgccaagaacagcctgtacctccagatgaactccctgcgggccgaggacaccgccgtgtactattgtgccagacagggcaccaccgccctggctaccagattcttcgatgtgtggggccagggcaccctcgtgaccgtgtcatctacgcgtgaggacctgaagaacgtgttcccacctgaggtggccgtgttcgagcctagcgaggccgagatcagccacacccagaaagccaccctcgtgtgcctggctaccggcttctaccccgaccatgtggaactgtcttggtgggtcaacggcaaagaggtgcacagcggcgtgtgtaccgacccccagccactgaaagaacagcccgccctgaacgacagccggtactgcctgagcagcagactgagagtgtccgccaccttctggcagaacccccggaaccacttcagatgccaggtgcagttctacggcctgagcgagaacgacgagtggacccaggacagagccaagcccgtgacccagatcgtgtctgccgaagcctggggcagagccgattgcgacgtgaagctggtggaaaagagcttcgagacagacaccaacctgaacttccagaacctgagcgtgatcggcttcagaatcctgctgctgaaagtggccggctttaacctgctgatgaccctgcggctgtggtccagc

SEQ ID NO: 4499 - DNA, 2271 bp, synthetic construct
  source 1..2271: mol_type = other DNA
atggccttaccagtgaccgccttgctcctgccgctggccttgctgctccacgccgccaggccggaagtgcagctggttgaatctggcggaggactggttcagcctggcggatctctgagactgtcttgtgccgccagcggcttcagcttcagcgacttttggatgagctgggtccgacaggcccctggcaaaggacttgaatgggtcgccacaatcagccaggccggcagcgagaaggactacgtggactctgtgaagggcagattcaccatcagccgggacaacgccaagaagtccctgtacctccagatgaacagcctgagagccgaggacaccgccgtgtactattgtgcctctggcgtgtacagcttcgactacagaggccagggcaccctggtcacagtctcttctggtaccggcggaggcggatctggcggcggaggtagcggtggcggaggatctgaattcgacatccagatgacccagagcccccctagcctgtctgcctctgtgggcggcaaagtgaccatcacatgcaaggccagccaggacatcgaccgctacatggcctggtatcaggacaagcccggcaagggacccaagctgctgatccacgataccagcaccctccagcccggcatccccagcagattttctggcagcggctccggcagagactacagcttcagcatcagcaacctggaacccgaggacattgccacctactactgcctccagtacgacaacctgtggaccttcggcggaggcaccaagctggaaatcaagagactcgagatccagaaccctgatcctgccgtgtaccagctgcgggatagcaagagcagcgacaagagcgtgtgtctgttcaccgacttcgacagccagaccaacgtgtcccagagcaaggactccgacgtgtacatcaccgataagtgcgtgctggacatgcggagcatggacttcaagagcaactccgccgtggcctggtccaacaagtccgatttcgcctgcgccaacgccttcaacaacagcattatccccgaggacacattcttcccaagccccgagagcagctgcggctttaccagcgagagctaccagcagggcgtgctgagcgccaccatcctgtacgagatcctgctgggcaaggccaccctgtacgccgtgctggtgtctgccctggtgctgatggctatggtcaagcggaaggacagccggggacgcgccaagagaagcggatctggcgtgaagcagaccctgaatttcgacctgctgaagctggctggcgacgtggaatccaacccaggccctactagtatggactggatttggcgcatccttttccttgtcggcgctgctaccggcgcgcattccttcgaacaggtgcaactggtgcagagcggagccgagcttgtgaagcctggcgcttccgtgaagatgagctgcaaagccagcggctacatcttcaccaactacaacatccactgggtcaagaagtccccaggccagggcctggaatggatcggagccatctaccccggaaacggcgacgccccttacagccagaagttccaggacagagccaccctgaccgccgacaccagcagcagcaccacctacatggaactgagcagcctgaccagcgaggacagcgccgtgtactattgcgtgcgggccaactgggatgtggccttcgcctattggggccagggcacactggtgtccgtgtcctctacgcgtgaggacctgaagaacgtgttcccacctgaggtggccgtgttcgagcctagcgaggccgagatcagccacacccagaaagccaccctcgtgtgcctggctaccggcttctaccccgaccatgtggaactgtcttggtgggtcaacggcaaagaggtgcacagcggcgtgtgtaccgacccccagccactgaaagaacagcccgccctgaacgacagccggtactgcctgagcagcagactgagagtgtccgccaccttctggcagaacccccggaaccacttcagatgccaggtgcagttctacggcctgagcgagaacgacgagtggacccaggacagagccaagcccgtgacccagatcgtgtctgccgaagcctggggcagagccgattgcgacgtgaagctggtggaaaagagcttcgagacagacaccaacctgaacttccagaacctgagcgtgatcggcttcagaatcctgctgctgaaagtggccggctttaacctgctgatgaccctgcggctgtggtccagc

SEQ ID NO: 4500 - DNA, 2274 bp, synthetic construct
  source 1..2274: mol_type = other DNA
atggccttaccagtgaccgccttgctcctgccgctggccttgctgctccacgccgccaggccggaagtgcagctggttgaatctggcggaggactggttcagcctggcggatctctgagactgtcttgtgccgccagcggcttcagcttcagcgacttttggatgagctgggtccgacaggcccctggcaaaggacttgaatgggtcgccacaatcagccaggccggcagcgagaaggactacgtggactctgtgaagggcagattcaccatcagccgggacaacgccaagaagtccctgtacctccagatgaacagcctgagagccgaggacaccgccgtgtactattgtgcctctggcgtgtacagcttcgactacagaggccagggcaccctggtcacagtctcttctggtaccggcggaggcggatctggcggcggaggtagcggtggcggaggatctgaattcgacatccagatgacccagagccctgccagcctgtctgcctctgtgggcgagacagtgaccatcacctgtcgggtgtccggcaacatccacaactacctggcctggtatcagcagaagcagggcaagagcccccaactgctggtgtacaacgccaagaccctggccgatggcgtgcccagcagattttctggctctggcagcggcacccagtacagcctgaagatcaacagcctccagcccgaggacttcggcagctactactgccagcacttctggtccaacccctacaccttcggcggaggcaccaagctggaaatcaagctcgagatccagaaccctgatcctgccgtgtaccagctgcgggatagcaagagcagcgacaagagcgtgtgtctgttcaccgacttcgacagccagaccaacgtgtcccagagcaaggactccgacgtgtacatcaccgataagtgcgtgctggacatgcggagcatggacttcaagagcaactccgccgtggcctggtccaacaagtccgatttcgcctgcgccaacgccttcaacaacagcattatccccgaggacacattcttcccaagccccgagagcagctgcggctttaccagcgagagctaccagcagggcgtgctgagcgccaccatcctgtacgagatcctgctgggcaaggccaccctgtacgccgtgctggtgtctgccctggtgctgatggctatggtcaagcggaaggacagccggggacgcgccaagagaagcggatctggcgtgaagcagaccctgaatttcgacctgctgaagctggctggcgacgtggaatccaacccaggccctactagtatggactggatttggcgcatccttttccttgtcggcgctgctaccggcgcgcattccttcgaacaggtgcaactccagcagtctggcgcttccgtgaaggtgtcctgcaaggccagcgaactcgtgcggcctggcacaggctacgccttcaccaattacctgatcgagtgggtcaagcagaggcccggacagggcctggaatggatcggagtgattaacccaggcagcggcggcaccaactacaacgagaagttcaagggcaaggccaccctgaccgccgacaagagcagcagcacagcctacatgcaactgagcagcctgaccagcgacgacagcgccgtgtacttctgcgcccggtacagaagctacgactggtacttcgacgtgtggggagccggcaccaccgtgacagtgtcatctacgcgtgaggacctgaagaacgtgttcccacctgaggtggccgtgttcgagcctagcgaggccgagatcagccacacccagaaagccaccctcgtgtgcctggctaccggcttctaccccgaccatgtggaactgtcttggtgggtcaacggcaaagaggtgcacagcggcgtgtgtaccgacccccagccactgaaagaacagcccgccctgaacgacagccggtactgcctgagcagcagactgagagtgtccgccaccttctggcagaacccccggaaccacttcagatgccaggtgcagttctacggcctgagcgagaacgacgagtggacccaggacagagccaagcccgtgacccagatcgtgtctgccgaagcctggggcagagccgattgcgacgtgaagctggtggaaaagagcttcgagacagacaccaacctgaacttccagaacctgagcgtgatcggcttcagaatcctgctgctgaaagtggccggctttaacctgctgatgaccctgcggctgtggtccagc

SEQ ID NO: 4501 - DNA, 2271 bp, synthetic construct
  source 1..2271: mol_type = other DNA
atggccttaccagtgaccgccttgctcctgccgctggccttgctgctccacgccgccaggccggaagtgcagctggttgaatctggcggaggactggttcagcctggcggatctctgagactgtcttgtgccgccagcggcttcagcttcagcgacttttggatgagctgggtccgacaggcccctggcaaaggacttgaatgggtcgccacaatcagccaggccggcagcgagaaggactacgtggactctgtgaagggcagattcaccatcagccgggacaacgccaagaagtccctgtacctccagatgaacagcctgagagccgaggacaccgccgtgtactattgtgcctctggcgtgtacagcttcgactacagaggccagggcaccctggtcacagtctcttctggtaccggcggaggcggatctggcggcggaggtagcggtggcggaggatctgaattcgacatccagatgacccagagcttcagcagcctgagcgccagcgtgggcgacagagtgaccatcacctgtagagccagccaggacatcagcaactacctgaactggtatcagcagaagcccggcaaggcccccaagctgctgatctactacaccagcagactgcacagcggcgtgcccagcagattttctggcagcggctccggcaccgactacaccctgacaatcagctccctgcagcccgaggacttcgctacctacttctgtcagcaaggcaacaccctgccctggacctttggcggaggcaccaagctggaaatcaagagactcgagatccagaaccctgatcctgccgtgtaccagctgcgggatagcaagagcagcgacaagagcgtgtgtctgttcaccgacttcgacagccagaccaacgtgtcccagagcaaggactccgacgtgtacatcaccgataagtgcgtgctggacatgcggagcatggacttcaagagcaactccgccgtggcctggtccaacaagtccgatttcgcctgcgccaacgccttcaacaacagcattatccccgaggacacattcttcccaagccccgagagcagctgcggctttaccagcgagagctaccagcagggcgtgctgagcgccaccatcctgtacgagatcctgctgggcaaggccaccctgtacgccgtgctggtgtctgccctggtgctgatggctatggtcaagcggaaggacagccggggacgcgccaagagaagcggatctggcgtgaagcagaccctgaatttcgacctgctgaagctggctggcgacgtggaatccaacccaggccctactagtatggactggatttggcgcatccttttccttgtcggcgctgctaccggcgcgcattccttcgaagaagtgcaactggtgcagtccggcggagggctggtgcagagcggaggatctctgagactgagctgcagagccagcggctacaccttcacccggtactggatgctgtgggtgcgccagaggccaggcaagggactggaatgggtggccgagatcaacccccggaacgaccggaccaactacaacgagaagttcaagacccggttcaccatcagcgtggacagaagcaagaacaccctgtacctgcagatggacagcctgcgggccgaggataccgccgtgtacttttgtgctctgggaggcggctacgctatggactactggggccagggaacccttgtgaccgtgtcctctacgcgtgaggacctgaagaacgtgttcccacctgaggtggccgtgttcgagcctagcgaggccgagatcagccacacccagaaagccaccctcgtgtgcctggctaccggcttctaccccgaccatgtggaactgtcttggtgggtcaacggcaaagaggtgcacagcggcgtgtgtaccgacccccagccactgaaagaacagcccgccctgaacgacagccggtactgcctgagcagcagactgagagtgtccgccaccttctggcagaacccccggaaccacttcagatgccaggtgcagttctacggcctgagcgagaacgacgagtggacccaggacagagccaagcccgtgacccagatcgtgtctgccgaagcctggggcagagccgattgcgacgtgaagctggtggaaaagagcttcgagacagacaccaacctgaacttccagaacctgagcgtgatcggcttcagaatcctgctgctgaaagtggccggctttaacctgctgatgaccctgcggctgtggtccagc

SEQ ID NO: 4502 - DNA, 2274 bp, synthetic construct
  source 1..2274: mol_type = other DNA
atggccttaccagtgaccgccttgctcctgccgctggccttgctgctccacgccgccaggccggaagtgcagctggttgaatctggcggaggactggttcagcctggcggatctctgagactgtcttgtgccgccagcggcttcagcttcagcgacttttggatgagctgggtccgacaggcccctggcaaaggacttgaatgggtcgccacaatcagccaggccggcagcgagaaggactacgtggactctgtgaagggcagattcaccatcagccgggacaacgccaagaagtccctgtacctccagatgaacagcctgagagccgaggacaccgccgtgtactattgtgcctctggcgtgtacagcttcgactacagaggccagggcaccctggtcacagtctcttctggtaccggcggaggcggatctggcggcggaggtagcggtggcggaggatctgaattcgacatccagatgacacagtctccggcgtcactgtccgcctccgtgggggagactgtgactattatttgtagggcatcagttaacatctactcttatttggcctggtaccagcagaagcaaggcaagagtcctcagctgctggtgtataatgcgaagatcctggcagagggcgtgccgagccggttctccggcagcggctcaggtacccaattttccctcaagatcaattcactgcagccagaggactttggcagttactattgtcaacaccactacggcacattcactttcgggtccggtacaaaattggagattaagcgactcgagatccagaaccctgatcctgccgtgtaccagctgcgggatagcaagagcagcgacaagagcgtgtgtctgttcaccgacttcgacagccagaccaacgtgtcccagagcaaggactccgacgtgtacatcaccgataagtgcgtgctggacatgcggagcatggacttcaagagcaactccgccgtggcctggtccaacaagtccgatttcgcctgcgccaacgccttcaacaacagcattatccccgaggacacattcttcccaagccccgagagcagctgcggctttaccagcgagagctaccagcagggcgtgctgagcgccaccatcctgtacgagatcctgctgggcaaggccaccctgtacgccgtgctggtgtctgccctggtgctgatggctatggtcaagcggaaggacagccggggacgcgccaagagaagcggatctggcgtgaagcagaccctgaatttcgacctgctgaagctggctggcgacgtggaatccaacccaggccctactagtatggactggatttggcgcatccttttccttgtcggcgctgctaccggcgcgcattccttcgaacaggtacagttgaaagaaagcgggcctggactggtagcgccttcccaatctctctccatcacgtgcaccatctctggcttctccctgacttcctatggagttcactgggtgaggcagccccccggcaagggactggaatggctggtcgtcatctggtccgacgggtccacaacctacaactccgctctgaaaagtcggctctctatttctaaagataatagcaagagccaggtgtttctgaaaatgaactctctgcagaccgatgatacggccatttactactgcgcttcacactatggctcaaccttggcattcgcttcctggggccacggaacactggtgaccgtttccgcagccacgcgtgaggacctgaagaacgtgttcccacctgaggtggccgtgttcgagcctagcgaggccgagatcagccacacccagaaagccaccctcgtgtgcctggctaccggcttctaccccgaccatgtggaactgtcttggtgggtcaacggcaaagaggtgcacagcggcgtgtgtaccgacccccagccactgaaagaacagcccgccctgaacgacagccggtactgcctgagcagcagactgagagtgtccgccaccttctggcagaacccccggaaccacttcagatgccaggtgcagttctacggcctgagcgagaacgacgagtggacccaggacagagccaagcccgtgacccagatcgtgtctgccgaagcctggggcagagccgattgcgacgtgaagctggtggaaaagagcttcgagacagacaccaacctgaacttccagaacctgagcgtgatcggcttcagaatcctgctgctgaaagtggccggctttaacctgctgatgaccctgcggctgtggtccagc

SEQ ID NO: 4503 - DNA, 2298 bp, synthetic construct
  source 1..2298: mol_type = other DNA
atggccttaccagtgaccgccttgctcctgccgctggccttgctgctccacgccgccaggccggaagtgcagctggttgaatctggcggaggactggttcagcctggcggatctctgagactgtcttgtgccgccagcggcttcagcttcagcgacttttggatgagctgggtccgacaggcccctggcaaaggacttgaatgggtcgccacaatcagccaggccggcagcgagaaggactacgtggactctgtgaagggcagattcaccatcagccgggacaacgccaagaagtccctgtacctccagatgaacagcctgagagccgaggacaccgccgtgtactattgtgcctctggcgtgtacagcttcgactacagaggccagggcaccctggtcacagtctcttctggtaccggcggaggcggatctggcggcggaggtagcggtggcggaggatctgaattcgacattgtgatgacccagtctcacaaattcatgtccacatcagtaggagacagggtcagcgtcacctgcaaggccagtcagaatgtgggtaataatgtagcctggtatcaacagaaaccagggcaatctcctaaagtactgatttactcggcatcctaccggtacagtggagtccctgatcgcttcacaggcagtggatctgggacagatttcactctcaccatcagtaatgtgcagtctgaagacttggcagagtatttctgtcagcaatataacacctatccattcacgttcggctcggggacaaagttggaaataaaactcgagatccagaaccctgatcctgccgtgtaccagctgcgggatagcaagagcagcgacaagagcgtgtgtctgttcaccgacttcgacagccagaccaacgtgtcccagagcaaggactccgacgtgtacatcaccgataagtgcgtgctggacatgcggagcatggacttcaagagcaactccgccgtggcctggtccaacaagtccgatttcgcctgcgccaacgccttcaacaacagcattatccccgaggacacattcttcccaagccccgagagcagctgcggctttaccagcgagagctaccagcagggcgtgctgagcgccaccatcctgtacgagatcctgctgggcaaggccaccctgtacgccgtgctggtgtctgccctggtgctgatggctatggtcaagcggaaggacagccggggacgcgccaagagaagcggatctggcgtgaagcagaccctgaatttcgacctgctgaagctggctggcgacgtggaatccaacccaggccctactagtatggactggatttggcgcatccttttccttgtcggcgctgctaccggcgcgcattccttcgaagaggtacagctggaggaaagcggtggaggactggtgcaacctggagggtctatgaagctctcttgcgtagcttctgggttcacgttctccaattactggatgaactgggtgcggcagtcccccgagaaaggcctggaatgggtagcagaaattcggttcaagtcccataactatgctacacactttgccgagtctgtcaaaggccggttcactattagtcgagacgacagcaagtcttcagtctacctgcagatgaataacttgcgggcagaggacacaggtatctactactgcaccaggagaatcggcaactccgactatgactggtggtactttgacgtctggggagcaggcaccagcgtgacggtgagttcagcctcaacgcgtgaggacctgaagaacgtgttcccacctgaggtggccgtgttcgagcctagcgaggccgagatcagccacacccagaaagccaccctcgtgtgcctggctaccggcttctaccccgaccatgtggaactgtcttggtgggtcaacggcaaagaggtgcacagcggcgtgtgtaccgacccccagccactgaaagaacagcccgccctgaacgacagccggtactgcctgagcagcagactgagagtgtccgccaccttctggcagaacccccggaaccacttcagatgccaggtgcagttctacggcctgagcgagaacgacgagtggacccaggacagagccaagcccgtgacccagatcgtgtctgccgaagcctggggcagagccgattgcgacgtgaagctggtggaaaagagcttcgagacagacaccaacctgaacttccagaacctgagcgtgatcggcttcagaatcctgctgctgaaagtggccggctttaacctgctgatgaccctgcggctgtggtccagc

SEQ ID NO: 4504 - DNA, 2277 bp, synthetic construct
  source 1..2277: mol_type = other DNA
atggccttaccagtgaccgccttgctcctgccgctggccttgctgctccacgccgccaggccggaagtgcagctggttgaatctggcggaggactggttcagcctggcggatctctgagactgtcttgtgccgccagcggcttcagcttcagcgacttttggatgagctgggtccgacaggcccctggcaaaggacttgaatgggtcgccacaatcagccaggccggcagcgagaaggactacgtggactctgtgaagggcagattcaccatcagccgggacaacgccaagaagtccctgtacctccagatgaacagcctgagagccgaggacaccgccgtgtactattgtgcctctggcgtgtacagcttcgactacagaggccagggcaccctggtcacagtctcttctggtaccggcggaggcggatctggcggcggaggtagcggtggcggaggatctgaattcgaccagatcgtgctgacccagtcccccgctattatgtccgcatcaccgggcgaaaaagtgacgatctcctgtagcgcttcatctagcgtctcctacatgtattggtatcaacagaaacctgggtctagcccaaagccgtggatctacagaaccagtaaccttgccagtggggtgccagcccgcttcagcggtagtggcagtggaacttcctatagcctcacaataagcaacatggaggctgaagatgccgctgcctattactgccagcagtaccacagttacccaaccacgttcggcgggggaactaagctcgaagtaaaactcgagatccagaaccctgatcctgccgtgtaccagctgcgggatagcaagagcagcgacaagagcgtgtgtctgttcaccgacttcgacagccagaccaacgtgtcccagagcaaggactccgacgtgtacatcaccgataagtgcgtgctggacatgcggagcatggacttcaagagcaactccgccgtggcctggtccaacaagtccgatttcgcctgcgccaacgccttcaacaacagcattatccccgaggacacattcttcccaagccccgagagcagctgcggctttaccagcgagagctaccagcagggcgtgctgagcgccaccatcctgtacgagatcctgctgggcaaggccaccctgtacgccgtgctggtgtctgccctggtgctgatggctatggtcaagcggaaggacagccggggacgcgccaagagaagcggatctggcgtgaagcagaccctgaatttcgacctgctgaagctggctggcgacgtggaatccaacccaggccctactagtatggactggatttggcgcatccttttccttgtcggcgctgctaccggcgcgcattccttcgaagaggtgcagctggtggaatctgggggcggcctggtccaacctaagggatcactcaagctctcttgtgcggccagcggattctctttcaatacctatgctatgaattgggtgagacaggcgcccggaaagggcctcgaatggatagcccatatccggtcaaaatcaaacaatttcgcaacctactatgcggactccgtgaaggaccgattttccatctcccgagatgcctccgagaatattctgttcctgcagatgaataacctcaagacagaggacaccgccatgtactactgtgtgcgccagggcggtgactttcccatggattactgggggcaggggaccagcgtgaccgtgagctctacgcgtgaggacctgaagaacgtgttcccacctgaggtggccgtgttcgagcctagcgaggccgagatcagccacacccagaaagccaccctcgtgtgcctggctaccggcttctaccccgaccatgtggaactgtcttggtgggtcaacggcaaagaggtgcacagcggcgtgtgtaccgacccccagccactgaaagaacagcccgccctgaacgacagccggtactgcctgagcagcagactgagagtgtccgccaccttctggcagaacccccggaaccacttcagatgccaggtgcagttctacggcctgagcgagaacgacgagtggacccaggacagagccaagcccgtgacccagatcgtgtctgccgaagcctggggcagagccgattgcgacgtgaagctggtggaaaagagcttcgagacagacaccaacctgaacttccagaacctgagcgtgatcggcttcagaatcctgctgctgaaagtggccggctttaacctgctgatgaccctgcggctgtggtccagc

SEQ ID NO: 4505 - DNA, 2274 bp, synthetic construct
  source 1..2274: mol_type = other DNA
atggccttaccagtgaccgccttgctcctgccgctggccttgctgctccacgccgccaggccggaagtgcagctggttgaatctggcggaggactggttcagcctggcggatctctgagactgtcttgtgccgccagcggcttcagcttcagcgacttttggatgagctgggtccgacaggcccctggcaaaggacttgaatgggtcgccacaatcagccaggccggcagcgagaaggactacgtggactctgtgaagggcagattcaccatcagccgggacaacgccaagaagtccctgtacctccagatgaacagcctgagagccgaggacaccgccgtgtactattgtgcctctggcgtgtacagcttcgactacagaggccagggcaccctggtcacagtctcttctggtaccggcggaggcggatctggcggcggaggtagcggtggcggaggatctgaattcgacgacatccagatgacccagagcagcagcagcttcagcgtgagcctgggcgacagagtgaccatcacctgcatggccagcgaggacatctacatcagactggcctggtaccagcagaagcccggcaacgcccccagactgctgatcagcgccgccaccagcctggagaccggcgtgcccagcagattcagcggcagcggcagcggcaaggactacaccctgagcatcaccagcctgcagaccgaggacgtgggcacctactactgccagcagtactggagcagcccctggaccttcggcggcggcaccaagctggagatcaacctcgagatccagaaccctgatcctgccgtgtaccagctgcgggatagcaagagcagcgacaagagcgtgtgtctgttcaccgacttcgacagccagaccaacgtgtcccagagcaaggactccgacgtgtacatcaccgataagtgcgtgctggacatgcggagcatggacttcaagagcaactccgccgtggcctggtccaacaagtccgatttcgcctgcgccaacgccttcaacaacagcattatccccgaggacacattcttcccaagccccgagagcagctgcggctttaccagcgagagctaccagcagggcgtgctgagcgccaccatcctgtacgagatcctgctgggcaaggccaccctgtacgccgtgctggtgtctgccctggtgctgatggctatggtcaagcggaaggacagccggggacgcgccaagagaagcggatctggcgtgaagcagaccctgaatttcgacctgctgaagctggctggcgacgtggaatccaacccaggccctactagtatggactggatttggcgcatccttttccttgtcggcgctgctaccggcgcgcattccttcgaagacgtgcagctgcaggagagcggccccggcctggtgaagcccagccagagcctgagcctgacctgcaccgtgaccggctacagcatcaccagcgactacacctggaactggatcagacagttccccggcaacaagctggagtggatgggctacatcacctacagcggcagcaccagctacaaccccagcctgaagagcagaaacagcatcaccagagacaccagcaagaaccagttcttcctgcagctgaacagcgtgaccaccgaggacaccgccacctactactgcgccagactgggcagaagatacacaatggactactggggccagggcaccagcgtgaccgtgagcagcacgcgtgaggacctgaagaacgtgttcccacctgaggtggccgtgttcgagcctagcgaggccgagatcagccacacccagaaagccaccctcgtgtgcctggctaccggcttctaccccgaccatgtggaactgtcttggtgggtcaacggcaaagaggtgcacagcggcgtgtgtaccgacccccagccactgaaagaacagcccgccctgaacgacagccggtactgcctgagcagcagactgagagtgtccgccaccttctggcagaacccccggaaccacttcagatgccaggtgcagttctacggcctgagcgagaacgacgagtggacccaggacagagccaagcccgtgacccagatcgtgtctgccgaagcctggggcagagccgattgcgacgtgaagctggtggaaaagagcttcgagacagacaccaacctgaacttccagaacctgagcgtgatcggcttcagaatcctgctgctgaaagtggccggctttaacctgctgatgaccctgcggctgtggtccagc

SEQ ID NO: 4506 - DNA, 2283 bp, synthetic construct
  source 1..2283: mol_type = other DNA
atggccttaccagtgaccgccttgctcctgccgctggccttgctgctccacgccgccaggccggaagtgcagctggttgaatctggcggaggactggttcagcctggcggatctctgagactgtcttgtgccgccagcggcttcagcttcagcgacttttggatgagctgggtccgacaggcccctggcaaaggacttgaatgggtcgccacaatcagccaggccggcagcgagaaggactacgtggactctgtgaagggcagattcaccatcagccgggacaacgccaagaagtccctgtacctccagatgaacagcctgagagccgaggacaccgccgtgtactattgtgcctctggcgtgtacagcttcgactacagaggccagggcaccctggtcacagtctcttctggtaccggcggaggcggatctggcggcggaggtagcggtggcggaggatctgaattcgacgacatccagatgacccagagccccagcagcctgtctgccagcgtgggcgacagagtgaccatcacctgtagagccagccagagcatcagcagctacctgaactggtatcagcagaagcccggcaaggcccccaaactgctgatctacgacgccagcaacctggaaaccggcgtgcccagcagattttccggcagcggctctggcaccgacttcaccttcaccatcagctccctccagcccgaggacattgccacctactactgccagcagtacgacaacctgcccctgacctttggcggaggcaccaaggtggacatcaagagactcgagatccagaaccctgatcctgccgtgtaccagctgcgggatagcaagagcagcgacaagagcgtgtgtctgttcaccgacttcgacagccagaccaacgtgtcccagagcaaggactccgacgtgtacatcaccgataagtgcgtgctggacatgcggagcatggacttcaagagcaactccgccgtggcctggtccaacaagtccgatttcgcctgcgccaacgccttcaacaacagcattatccccgaggacacattcttcccaagccccgagagcagctgcggctttaccagcgagagctaccagcagggcgtgctgagcgccaccatcctgtacgagatcctgctgggcaaggccaccctgtacgccgtgctggtgtctgccctggtgctgatggctatggtcaagcggaaggacagccggggacgcgccaagagaagcggatctggcgtgaagcagaccctgaatttcgacctgctgaagctggctggcgacgtggaatccaacccaggccctactagtatggactggatttggcgcatccttttccttgtcggcgctgctaccggcgcgcattccttcgaacaggtgcaactggtggaatctggcggcggagtggtgcagcctggcagaagcctgagactgagctgtgccgccagcggcttcacctttagcagctacgccatgcactgggtgcgccaggcccctggaaaaggcctggaatgggtggccgtgatctcctacgacggctccaacaagtattacgccgacagcgtgaagggccggttcaccatctccagagacaacagcaagaacaccctgtacctccagatgaacagcctgcgggccgaggacaccgccgtgtactattgtgccagggctcacaacagcagctcttggagcttcgactactggggccagggcaccctcgtgaccgtgtcatctacgcgtgaggacctgaagaacgtgttcccacctgaggtggccgtgttcgagcctagcgaggccgagatcagccacacccagaaagccaccctcgtgtgcctggctaccggcttctaccccgaccatgtggaactgtcttggtgggtcaacggcaaagaggtgcacagcggcgtgtgtaccgacccccagccactgaaagaacagcccgccctgaacgacagccggtactgcctgagcagcagactgagagtgtccgccaccttctggcagaacccccggaaccacttcagatgccaggtgcagttctacggcctgagcgagaacgacgagtggacccaggacagagccaagcccgtgacccagatcgtgtctgccgaagcctggggcagagccgattgcgacgtgaagctggtggaaaagagcttcgagacagacaccaacctgaacttccagaacctgagcgtgatcggcttcagaatcctgctgctgaaagtggccggctttaacctgctgatgaccctgcggctgtggtccagc

SEQ ID NO: 4507 - DNA, 2310 bp, synthetic construct
  source 1..2310: mol_type = other DNA
atggccttaccagtgaccgccttgctcctgccgctggccttgctgctccacgccgccaggccggaagtgcagctggttgaatctggcggaggactggttcagcctggcggatctctgagactgtcttgtgccgccagcggcttcagcttcagcgacttttggatgagctgggtccgacaggcccctggcaaaggacttgaatgggtcgccacaatcagccaggccggcagcgagaaggactacgtggactctgtgaagggcagattcaccatcagccgggacaacgccaagaagtccctgtacctccagatgaacagcctgagagccgaggacaccgccgtgtactattgtgcctctggcgtgtacagcttcgactacagaggccagggcaccctggtcacagtctcttctggtaccggcggaggcggatctggcggcggaggtagcggtggcggaggatctgaattcgacgacgtcgtgatgacccagagccctctgagcctgcctgtgtccctgggcgatcaggccagcatctcctgcagatccagccagagactggtgcacagcaacggcaacacctacctgcactggtatctgcagaagcccggccagagccccaagctgctgatctaccgggtgtccaacagattccccggcgtgcccgatagattcagcggctctggcagcggcaccgacttcaccctgaagatcagccgggtggaagccgaggacctgggcatctatttctgcagccagagcacccacgtgccctacacctttggcggaggcaccaagctggaaatcaagcggctcgagatccagaaccctgatcctgccgtgtaccagctgcgggatagcaagagcagcgacaagagcgtgtgtctgttcaccgacttcgacagccagaccaacgtgtcccagagcaaggactccgacgtgtacatcaccgataagtgcgtgctggacatgcggagcatggacttcaagagcaactccgccgtggcctggtccaacaagtccgatttcgcctgcgccaacgccttcaacaacagcattatccccgaggacacattcttcccaagccccgagagcagctgcggctttaccagcgagagctaccagcagggcgtgctgagcgccaccatcctgtacgagatcctgctgggcaaggccaccctgtacgccgtgctggtgtctgccctggtgctgatggctatggtcaagcggaaggacagccggggacgcgccaagagaagcggatctggcgtgaagcagaccctgaatttcgacctgctgaagctggctggcgacgtggaatccaacccaggccctactagtatggactggatttggcgcatccttttccttgtcggcgctgctaccggcgcgcattccttcgaagaagtgcggctgcagcagtctggccccgacctgattaagcctggggccagcgtgaagatgagctgcaaggccagcggctacaccttcaccggctacgtgatgcactgggtcaagcagaggccaggccagggcctggaatggatcggcttcatcaacccctacaacgacgacatccagagcaacgagcggttccggggcaaggccaccctgaccagcgataagagcagcaccaccgcctacatggaactgagcagcctgacctccgaggacagcgccgtgtactactgtgctaggggagccggctacaacttcgacggggcctacagattcttcgacttttggggccagggcaccacactgaccgtgtcctctacgcgtgaggacctgaagaacgtgttcccacctgaggtggccgtgttcgagcctagcgaggccgagatcagccacacccagaaagccaccctcgtgtgcctggctaccggcttctaccccgaccatgtggaactgtcttggtgggtcaacggcaaagaggtgcacagcggcgtgtgtaccgacccccagccactgaaagaacagcccgccctgaacgacagccggtactgcctgagcagcagactgagagtgtccgccaccttctggcagaacccccggaaccacttcagatgccaggtgcagttctacggcctgagcgagaacgacgagtggacccaggacagagccaagcccgtgacccagatcgtgtctgccgaagcctggggcagagccgattgcgacgtgaagctggtggaaaagagcttcgagacagacaccaacctgaacttccagaacctgagcgtgatcggcttcagaatcctgctgctgaaagtggccggctttaacctgctgatgaccctgcggctgtggtccagc

SEQ ID NO: 4508 - DNA, 2283 bp, synthetic construct
  source 1..2283: mol_type = other DNA
atggccttaccagtgaccgccttgctcctgccgctggccttgctgctccacgccgccaggccggaagtgcagctggttgaatctggcggaggactggttcagcctggcggatctctgagactgtcttgtgccgccagcggcttcagcttcagcgacttttggatgagctgggtccgacaggcccctggcaaaggacttgaatgggtcgccacaatcagccaggccggcagcgagaaggactacgtggactctgtgaagggcagattcaccatcagccgggacaacgccaagaagtccctgtacctccagatgaacagcctgagagccgaggacaccgccgtgtactattgtgcctctggcgtgtacagcttcgactacagaggccagggcaccctggtcacagtctcttctggtaccggcggaggcggatctggcggcggaggtagcggtggcggaggatctgaattcgacagctacgagctgacccagcctcctagcgtgtccgtgtctcctggacagaccgccaccatctcttgcagcggcgatcaactgggcgggaagtacggccactggtatcagaagaagcccggccagagccccgtgctggtgctgtaccaggacagaaaacggcctgccggcatccccgagagattcagcggaagcagcagcggcaacaccatcaccctgaccatcagcggcacccaggccgtggatgaggccgactactactgccaggcttgggacaccaatctgggcggcgtgttcggcggaggcaccaaagtgacagtgctgggacagctcgagatccagaaccctgatcctgccgtgtaccagctgcgggatagcaagagcagcgacaagagcgtgtgtctgttcaccgacttcgacagccagaccaacgtgtcccagagcaaggactccgacgtgtacatcaccgataagtgcgtgctggacatgcggagcatggacttcaagagcaactccgccgtggcctggtccaacaagtccgatttcgcctgcgccaacgccttcaacaacagcattatccccgaggacacattcttcccaagccccgagagcagctgcggctttaccagcgagagctaccagcagggcgtgctgagcgccaccatcctgtacgagatcctgctgggcaaggccaccctgtacgccgtgctggtgtctgccctggtgctgatggctatggtcaagcggaaggacagccggggacgcgccaagagaagcggatctggcgtgaagcagaccctgaatttcgacctgctgaagctggctggcgacgtggaatccaacccaggccctactagtatggactggatttggcgcatccttttccttgtcggcgctgctaccggcgcgcattccttcgaacaggtgcaactggtggaaagcggagccgaagtgaagaaacctggggccagcgtgaaggtgtcctgcaaggccagcggctacacctttaccggctactacatgcactgggtgcgccaggctccaggccagggactggaatggatgggccggatcaaccccaatagcggcggcaccaactacgcccagaaattccagggcagagtgaccatgaccagagacaccagcatcagcaccgcctacatggaactgagccggctgagaagcgacgacaccgccgtgtactactgcgccagccctagaggcagaggcagcgccttcgatatttggggccagggcacactcgtgaccgtgtcctctacgcgtgaggacctgaagaacgtgttcccacctgaggtggccgtgttcgagcctagcgaggccgagatcagccacacccagaaagccaccctcgtgtgcctggctaccggcttctaccccgaccatgtggaactgtcttggtgggtcaacggcaaagaggtgcacagcggcgtgtgtaccgacccccagccactgaaagaacagcccgccctgaacgacagccggtactgcctgagcagcagactgagagtgtccgccaccttctggcagaacccccggaaccacttcagatgccaggtgcagttctacggcctgagcgagaacgacgagtggacccaggacagagccaagcccgtgacccagatcgtgtctgccgaagcctggggcagagccgattgcgacgtgaagctggtggaaaagagcttcgagacagacaccaacctgaacttccagaacctgagcgtgatcggcttcagaatcctgctgctgaaagtggccggctttaacctgctgatgaccctgcggctgtggtccagc

SEQ ID NO: 4509 - DNA, 2292 bp, synthetic construct
  source 1..2292: mol_type = other DNA
atggccttaccagtgaccgccttgctcctgccgctggccttgctgctccacgccgccaggccggaagtgcagctggttgaatctggcggaggactggttcagcctggcggatctctgagactgtcttgtgccgccagcggcttcagcttcagcgacttttggatgagctgggtccgacaggcccctggcaaaggacttgaatgggtcgccacaatcagccaggccggcagcgagaaggactacgtggactctgtgaagggcagattcaccatcagccgggacaacgccaagaagtccctgtacctccagatgaacagcctgagagccgaggacaccgccgtgtactattgtgcctctggcgtgtacagcttcgactacagaggccagggcaccctggtcacagtctcttctggtaccggcggaggcggatctggcggcggaggtagcggtggcggaggatctgaattcgacaacttcatgctgacccagccccacagcgtgtccgagagccctggcaagaccgtgaccatctcctgcaccagaagcagcggctctatcgccagcaaatacgtgcagtggtatcagcagaggcccggcagcagccctaccaccgtgatctacgaggacaaccagaggcctagcggcgtgcccgatagattcagcggcagcatcgacaccagcagcaacagcgccagcctgaccatcagcggcctgagaacagaggacgaggccgactactactgccacagctacgacagcaacaaccactccgtgttcggcggaggcaccaaagtgacagtgctgggacagctcgagatccagaaccctgatcctgccgtgtaccagctgcgggatagcaagagcagcgacaagagcgtgtgtctgttcaccgacttcgacagccagaccaacgtgtcccagagcaaggactccgacgtgtacatcaccgataagtgcgtgctggacatgcggagcatggacttcaagagcaactccgccgtggcctggtccaacaagtccgatttcgcctgcgccaacgccttcaacaacagcattatccccgaggacacattcttcccaagccccgagagcagctgcggctttaccagcgagagctaccagcagggcgtgctgagcgccaccatcctgtacgagatcctgctgggcaaggccaccctgtacgccgtgctggtgtctgccctggtgctgatggctatggtcaagcggaaggacagccggggacgcgccaagagaagcggatctggcgtgaagcagaccctgaatttcgacctgctgaagctggctggcgacgtggaatccaacccaggccctactagtatggactggatttggcgcatccttttccttgtcggcgctgctaccggcgcgcattccttcgaagaagtgcaactggtggaaagcgggggaggcgtggtgcagccaggcggatctctgagactgagctgtgccgccagcggcttcaccttcagcagctacgccatgagctgggtgcgccaggcccctggaaaaggcctggaatgggtgtccgccatctctggctctggcggcagcacctactacgccgatagcgtgaagggccggttcagcatcagccgggacaacagcaagaacaccctgtacctccagatgaacagcctgcgggccgaggacaccgccgtgtactactgtgccagaaccagaagctccggggccttcgacatctggggccagggaacactcgtgaccgtgtcctctacgcgtgaggacctgaagaacgtgttcccacctgaggtggccgtgttcgagcctagcgaggccgagatcagccacacccagaaagccaccctcgtgtgcctggctaccggcttctaccccgaccatgtggaactgtcttggtgggtcaacggcaaagaggtgcacagcggcgtgtgtaccgacccccagccactgaaagaacagcccgccctgaacgacagccggtactgcctgagcagcagactgagagtgtccgccaccttctggcagaacccccggaaccacttcagatgccaggtgcagttctacggcctgagcgagaacgacgagtggacccaggacagagccaagcccgtgacccagatcgtgtctgccgaagcctggggcagagccgattgcgacgtgaagctggtggaaaagagcttcgagacagacaccaacctgaacttccagaacctgagcgtgatcggcttcagaatcctgctgctgaaagtggccggctttaacctgctgatgaccctgcggctgtggtccagc

SEQ ID NO: 4510 - DNA, 2277 bp, synthetic construct
  source 1..2277: mol_type = other DNA
atggccttaccagtgaccgccttgctcctgccgctggccttgctgctccacgccgccaggccggaagtgcagctggttgaatctggcggaggactggttcagcctggcggatctctgagactgtcttgtgccgccagcggcttcagcttcagcgacttttggatgagctgggtccgacaggcccctggcaaaggacttgaatgggtcgccacaatcagccaggccggcagcgagaaggactacgtggactctgtgaagggcagattcaccatcagccgggacaacgccaagaagtccctgtacctccagatgaacagcctgagagccgaggacaccgccgtgtactattgtgcctctggcgtgtacagcttcgactacagaggccagggcaccctggtcacagtctcttctggtaccggcggaggcggatctggcggcggaggtagcggtggcggaggatctgaattcgacatccagatgaaccagagccccagcagcctgagcgccagcctgggcgataccatcaccatcacctgtcacgccagccagaacatcaacgtgtggctgagctggtatcagcagaagcccggcaacatccccaagctgctgatctacaaggccagcaacctgcacaccggcgtgcccagcagattttctggcagcggctctggcaccggcttcaccattaccatcagctccctccagcccgaggacattgccacctactactgccagcagggccagagctacccctggacatttggcggaggcaccaagctggaaatcaagagactcgagatccagaaccctgatcctgccgtgtaccagctgcgggatagcaagagcagcgacaagagcgtgtgtctgttcaccgacttcgacagccagaccaacgtgtcccagagcaaggactccgacgtgtacatcaccgataagtgcgtgctggacatgcggagcatggacttcaagagcaactccgccgtggcctggtccaacaagtccgatttcgcctgcgccaacgccttcaacaacagcattatccccgaggacacattcttcccaagccccgagagcagctgcggctttaccagcgagagctaccagcagggcgtgctgagcgccaccatcctgtacgagatcctgctgggcaaggccaccctgtacgccgtgctggtgtctgccctggtgctgatggctatggtcaagcggaaggacagccggggacgcgccaagagaagcggatctggcgtgaagcagaccctgaatttcgacctgctgaagctggctggcgacgtggaatccaacccaggccctactagtatggactggatttggcgcatccttttccttgtcggcgctgctaccggcgcgcattccttcgaagaagtgcaactccagcagagcggcccagagcttgtgaagcctggcgcttccgtgaagattagctgcaaagccagcggctacagcttcaccggctacttcatgaactgggtcaagcagagccacggcaagagcctggagtacatcggcagattcaacccctacaacggcgagacactgtacaaccagaagttcaagggcaaggccaccctgaccgtggacaagagcagcagcaccgtgcacatggaactgctgagcgtgaccagcgaggacagcgccgtgtactactgtggcagaagcggcaacgacgacgctatggactattggggccagggcaccagcgtgaccgtgtctagtgctacgcgtgaggacctgaagaacgtgttcccacctgaggtggccgtgttcgagcctagcgaggccgagatcagccacacccagaaagccaccctcgtgtgcctggctaccggcttctaccccgaccatgtggaactgtcttggtgggtcaacggcaaagaggtgcacagcggcgtgtgtaccgacccccagccactgaaagaacagcccgccctgaacgacagccggtactgcctgagcagcagactgagagtgtccgccaccttctggcagaacccccggaaccacttcagatgccaggtgcagttctacggcctgagcgagaacgacgagtggacccaggacagagccaagcccgtgacccagatcgtgtctgccgaagcctggggcagagccgattgcgacgtgaagctggtggaaaagagcttcgagacagacaccaacctgaacttccagaacctgagcgtgatcggcttcagaatcctgctgctgaaagtggccggctttaacctgctgatgaccctgcggctgtggtccagc

SEQ ID NO: 4511 - DNA, 2280 bp, synthetic construct
  source 1..2280: mol_type = other DNA
atggccttaccagtgaccgccttgctcctgccgctggccttgctgctccacgccgccaggccggaagtgcagctggttgaatctggcggaggactggttcagcctggcggatctctgagactgtcttgtgccgccagcggcttcagcttcagcgacttttggatgagctgggtccgacaggcccctggcaaaggacttgaatgggtcgccacaatcagccaggccggcagcgagaaggactacgtggactctgtgaagggcagattcaccatcagccgggacaacgccaagaagtccctgtacctccagatgaacagcctgagagccgaggacaccgccgtgtactattgtgcctctggcgtgtacagcttcgactacagaggccagggcaccctggtcacagtctcttctggtaccggcggaggcggatctggcggcggaggtagcggtggcggaggatctgaattcgagatcgtgctgacacagagccctgccaccctgtctctgagccctggcgaaagagccaccctgagctgtagagccagccagagcgtgcggagctacctggcctggtatcagcagaagcctggacaggcccccagactgctgatctacgacgccagcaatcgggccacaggcatccccgccagattttctggctctggcagcggcaccgacttcaccctgacaatcagcagcctggaacccgaggacttcgccgtgtactactgccagcagcggagcaactggccccctacctttggacagggcaccaaggtggaaatcaagctcgagatccagaaccctgatcctgccgtgtaccagctgcgggatagcaagagcagcgacaagagcgtgtgtctgttcaccgacttcgacagccagaccaacgtgtcccagagcaaggactccgacgtgtacatcaccgataagtgcgtgctggacatgcggagcatggacttcaagagcaactccgccgtggcctggtccaacaagtccgatttcgcctgcgccaacgccttcaacaacagcattatccccgaggacacattcttcccaagccccgagagcagctgcggctttaccagcgagagctaccagcagggcgtgctgagcgccaccatcctgtacgagatcctgctgggcaaggccaccctgtacgccgtgctggtgtctgccctggtgctgatggctatggtcaagcggaaggacagccggggacgcgccaagagaagcggatctggcgtgaagcagaccctgaatttcgacctgctgaagctggctggcgacgtggaatccaacccaggccctactagtatggactggatttggcgcatccttttccttgtcggcgctgctaccggcgcgcattccttcgaacaactccaggtgcaggaatctggccccggactcgtgaagcccagcgagacactgagcctgacctgtaccgtgtccggcggcagcatcagcaacagctacttctcctggggctggatcagacagccccctggcaagggcctggaatggatcggcagcttctactacggcgagaaaacctactacaaccccagcctgaagtccagagccaccatcagcatcgacaccagcaagagccagttctccctgaagctgagcagcgtgacagccgccgacaccgccgtgtattattgccccagaggccccaccatgatccggggcgtgatcgactcttggggccagggaacactcgtgaccgtgtcctctacgcgtgaggacctgaagaacgtgttcccacctgaggtggccgtgttcgagcctagcgaggccgagatcagccacacccagaaagccaccctcgtgtgcctggctaccggcttctaccccgaccatgtggaactgtcttggtgggtcaacggcaaagaggtgcacagcggcgtgtgtaccgacccccagccactgaaagaacagcccgccctgaacgacagccggtactgcctgagcagcagactgagagtgtccgccaccttctggcagaacccccggaaccacttcagatgccaggtgcagttctacggcctgagcgagaacgacgagtggacccaggacagagccaagcccgtgacccagatcgtgtctgccgaagcctggggcagagccgattgcgacgtgaagctggtggaaaagagcttcgagacagacaccaacctgaacttccagaacctgagcgtgatcggcttcagaatcctgctgctgaaagtggccggctttaacctgctgatgaccctgcggctgtggtccagc

SEQ ID NO: 4512 - DNA, 2307 bp, synthetic construct
  source 1..2307: mol_type = other DNA
atggccttaccagtgaccgccttgctcctgccgctggccttgctgctccacgccgccaggccggaagtgcagctggttgaatctggcggaggactggttcagcctggcggatctctgagactgtcttgtgccgccagcggcttcagcttcagcgacttttggatgagctgggtccgacaggcccctggcaaaggacttgaatgggtcgccacaatcagccaggccggcagcgagaaggactacgtggactctgtgaagggcagattcaccatcagccgggacaacgccaagaagtccctgtacctccagatgaacagcctgagagccgaggacaccgccgtgtactattgtgcctctggcgtgtacagcttcgactacagaggccagggcaccctggtcacagtctcttctggtaccggcggaggcggatctggcggcggaggtagcggtggcggaggatctgaattcgacatcgtgatgacccagacccccctgagcctgcctgtgacacctggcgagcctgccagcatctcctgcagaagcagcagaagcctgctggacagcgacgacggcaacacctacctggactggtatctgcagaaacccggccagagcccccaactgctgatctacaccctgagctacagagccagcggcgtgcccgatagattttccggctctggcagcggcaccgacttcaccctgaagatcagccgggtggaagccgaggacgtgggcgtgtactactgtatgcagcgggtggaatttcccatcaccttcggccagggcaccagactggaaatcaagagactcgagatccagaaccctgatcctgccgtgtaccagctgcgggatagcaagagcagcgacaagagcgtgtgtctgttcaccgacttcgacagccagaccaacgtgtcccagagcaaggactccgacgtgtacatcaccgataagtgcgtgctggacatgcggagcatggacttcaagagcaactccgccgtggcctggtccaacaagtccgatttcgcctgcgccaacgccttcaacaacagcattatccccgaggacacattcttcccaagccccgagagcagctgcggctttaccagcgagagctaccagcagggcgtgctgagcgccaccatcctgtacgagatcctgctgggcaaggccaccctgtacgccgtgctggtgtctgccctggtgctgatggctatggtcaagcggaaggacagccggggacgcgccaagagaagcggatctggcgtgaagcagaccctgaatttcgacctgctgaagctggctggcgacgtggaatccaacccaggccctactagtatggactggatttggcgcatccttttccttgtcggcgctgctaccggcgcgcattccttcgaacaggtgcaactggtggaatctggcgggggagtggtgcagcctggcagatccctgagactgagctgtgccgccagcggcttcatcttcagcagatacggaatgcactgggtgcgccaggcccctggcaagggactgaaatgggtggccgtgatttggtacgacggcagcaacaagctgtacgccgacagcgtgaagggccggttcaccatcagcagagacaacagcaagaacaccctgtacctgcagatgaacagcctgcgggccgaggacaccgccgtgtactattgcgccagagactactacgacaacagccggcaccactggggcttcgactattggggccagggaacccttgtgaccgtgtcctctacgcgtgaggacctgaagaacgtgttcccacctgaggtggccgtgttcgagcctagcgaggccgagatcagccacacccagaaagccaccctcgtgtgcctggctaccggcttctaccccgaccatgtggaactgtcttggtgggtcaacggcaaagaggtgcacagcggcgtgtgtaccgacccccagccactgaaagaacagcccgccctgaacgacagccggtactgcctgagcagcagactgagagtgtccgccaccttctggcagaacccccggaaccacttcagatgccaggtgcagttctacggcctgagcgagaacgacgagtggacccaggacagagccaagcccgtgacccagatcgtgtctgccgaagcctggggcagagccgattgcgacgtgaagctggtggaaaagagcttcgagacagacaccaacctgaacttccagaacctgagcgtgatcggcttcagaatcctgctgctgaaagtggccggctttaacctgctgatgaccctgcggctgtggtccagc

SEQ ID NO: 4513 - DNA, 2277 bp, synthetic construct
  source 1..2277: mol_type = other DNA
atggccttaccagtgaccgccttgctcctgccgctggccttgctgctccacgccgccaggccggaagtgcagctggttgaatctggcggaggactggttcagcctggcggatctctgagactgtcttgtgccgccagcggcttcagcttcagcgacttttggatgagctgggtccgacaggcccctggcaaaggacttgaatgggtcgccacaatcagccaggccggcagcgagaaggactacgtggactctgtgaagggcagattcaccatcagccgggacaacgccaagaagtccctgtacctccagatgaacagcctgagagccgaggacaccgccgtgtactattgtgcctctggcgtgtacagcttcgactacagaggccagggcaccctggtcacagtctcttctggtaccggcggaggcggatctggcggcggaggtagcggtggcggaggatctgaattcgagatccagatgacccagagccccagcagcatgtctgccagcctgggcgacaccatcaccatcacatgccaggccacccaggacatcttcaagaacctgaactggtatcagcagaagcccggcaagccccccagcctgctgatctactatgccaccgaactggccgagggcgtgcccagcagattttctggcagcggcagcggctccgactacagcctgaccatcagcaacctggaaagcgaggacttcgccgcctactactgcctccagttcttcgagttcccattcaccttcggctccggcaccaagctggaaatgaagctcgagatccagaaccctgatcctgccgtgtaccagctgcgggatagcaagagcagcgacaagagcgtgtgtctgttcaccgacttcgacagccagaccaacgtgtcccagagcaaggactccgacgtgtacatcaccgataagtgcgtgctggacatgcggagcatggacttcaagagcaactccgccgtggcctggtccaacaagtccgatttcgcctgcgccaacgccttcaacaacagcattatccccgaggacacattcttcccaagccccgagagcagctgcggctttaccagcgagagctaccagcagggcgtgctgagcgccaccatcctgtacgagatcctgctgggcaaggccaccctgtacgccgtgctggtgtctgccctggtgctgatggctatggtcaagcggaaggacagccggggacgcgccaagagaagcggatctggcgtgaagcagaccctgaatttcgacctgctgaagctggctggcgacgtggaatccaacccaggccctactagtatggactggatttggcgcatccttttccttgtcggcgctgctaccggcgcgcattccttcgaacaggtgcaactccagcagtctggcgctgagcttgtgcggcctggcacctctgtgaaggtgtcctgtaaagccagcggctacgtgttcaccaactactggatcgagtggatcaagcagcggccaggccagggcctggaatggatcggcgtgatgaatccaggcagcggcgagacaacctacaacgagaagttcaagggcaaggccaccctgaccgccgacaagagcagcagcacagcctacatgcaactgtcctccctgaccagcgtggacagcgccgtgtacttctgcgccagggaccacgaccgggactactacgctatggactactggggccagggcaccagcgtgaccgtgtcatctacgcgtgaggacctgaagaacgtgttcccacctgaggtggccgtgttcgagcctagcgaggccgagatcagccacacccagaaagccaccctcgtgtgcctggctaccggcttctaccccgaccatgtggaactgtcttggtgggtcaacggcaaagaggtgcacagcggcgtgtgtaccgacccccagccactgaaagaacagcccgccctgaacgacagccggtactgcctgagcagcagactgagagtgtccgccaccttctggcagaacccccggaaccacttcagatgccaggtgcagttctacggcctgagcgagaacgacgagtggacccaggacagagccaagcccgtgacccagatcgtgtctgccgaagcctggggcagagccgattgcgacgtgaagctggtggaaaagagcttcgagacagacaccaacctgaacttccagaacctgagcgtgatcggcttcagaatcctgctgctgaaagtggccggctttaacctgctgatgaccctgcggctgtggtccagc

SEQ ID NO: 4514 - DNA, 2268 bp, synthetic construct
  source 1..2268: mol_type = other DNA
atggccttaccagtgaccgccttgctcctgccgctggccttgctgctccacgccgccaggccggaagtgcagctggttgaatctggcggaggactggttcagcctggcggatctctgagactgtcttgtgccgccagcggcttcagcttcagcgacttttggatgagctgggtccgacaggcccctggcaaaggacttgaatgggtcgccacaatcagccaggccggcagcgagaaggactacgtggactctgtgaagggcagattcaccatcagccgggacaacgccaagaagtccctgtacctccagatgaacagcctgagagccgaggacaccgccgtgtactattgtgcctctggcgtgtacagcttcgactacagaggccagggcaccctggtcacagtctcttctggtaccggcggaggcggatctggcggcggaggtagcggtggcggaggatctgaattcgacatcctgctgacacagagccccgccatcctgtccgtgtctccaggcgagagagtgtcctttagctgccgggccagccagaacatcggcaccagcatccactggtatcagcagcggaccaacggcagccccagactgctgattaagtacgccagcgagtccgtgtccggcatccccagcagattttctggcagcggctccggcaccgacttcaccctgagcatcaacagcgtggaaagcgaggacattgccgactactactgccagcacaccaatagctggcccaccacctttggcggaggcaccaagctggaaatcaagagactcgagatccagaaccctgatcctgccgtgtaccagctgcgggatagcaagagcagcgacaagagcgtgtgtctgttcaccgacttcgacagccagaccaacgtgtcccagagcaaggactccgacgtgtacatcaccgataagtgcgtgctggacatgcggagcatggacttcaagagcaactccgccgtggcctggtccaacaagtccgatttcgcctgcgccaacgccttcaacaacagcattatccccgaggacacattcttcccaagccccgagagcagctgcggctttaccagcgagagctaccagcagggcgtgctgagcgccaccatcctgtacgagatcctgctgggcaaggccaccctgtacgccgtgctggtgtctgccctggtgctgatggctatggtcaagcggaaggacagccggggacgcgccaagagaagcggatctggcgtgaagcagaccctgaatttcgacctgctgaagctggctggcgacgtggaatccaacccaggccctactagtatggactggatttggcgcatccttttccttgtcggcgctgctaccggcgcgcattccttcgaacaggtgcaactccagcagtccgacgccgagcttgtgaagcctggcgcttccgtgaagattagctgcaaggccagcggctacaccttcaccgaccacgccattcactgggtcaagcagaagcccgagcagggcctggaatggatcggctacttcagccccggcaacggcgacatcaagtacaacgagaagttcaagggcaaggccaccctgaccgccgacaagagcagcagcacagcctacatgcaactgaacagcctgaccagcgaggactccgccgtgtacttctgcaagcggagctacggcaactacgactactggggccagggcaccacactgaccgtgtctagtacgcgtgaggacctgaagaacgtgttcccacctgaggtggccgtgttcgagcctagcgaggccgagatcagccacacccagaaagccaccctcgtgtgcctggctaccggcttctaccccgaccatgtggaactgtcttggtgggtcaacggcaaagaggtgcacagcggcgtgtgtaccgacccccagccactgaaagaacagcccgccctgaacgacagccggtactgcctgagcagcagactgagagtgtccgccaccttctggcagaacccccggaaccacttcagatgccaggtgcagttctacggcctgagcgagaacgacgagtggacccaggacagagccaagcccgtgacccagatcgtgtctgccgaagcctggggcagagccgattgcgacgtgaagctggtggaaaagagcttcgagacagacaccaacctgaacttccagaacctgagcgtgatcggcttcagaatcctgctgctgaaagtggccggctttaacctgctgatgaccctgcggctgtggtccagc

SEQ ID NO: 4515 - DNA, 2283 bp, synthetic construct
  source 1..2283: mol_type = other DNA
atggccttaccagtgaccgccttgctcctgccgctggccttgctgctccacgccgccaggccggaagtgcagctggttgaatctggcggaggactggttcagcctggcggatctctgagactgtcttgtgccgccagcggcttcagcttcagcgacttttggatgagctgggtccgacaggcccctggcaaaggacttgaatgggtcgccacaatcagccaggccggcagcgagaaggactacgtggactctgtgaagggcagattcaccatcagccgggacaacgccaagaagtccctgtacctccagatgaacagcctgagagccgaggacaccgccgtgtactattgtgcctctggcgtgtacagcttcgactacagaggccagggcaccctggtcacagtctcttctggtaccggcggaggcggatctggcggcggaggtagcggtggcggaggatctgaattcgacatcgtgatgacccagagccccgatagcctggccgtgtctctgggagagagagccaccatcaactgcaagagcagccagagcctgctgaacagcggcgaccagaagaactacctgacctggtatcagcagaagcccggccagccccccaagctgctgatctactgggccagcaccagagaaagcggcgtgcccgatagattcagcggcagcggaagtggcaccgacttcaccctgaccatcagttctcttcaggccgaggacgtggccgtgtactactgccagaacgactacagctaccccctgaccttcggccagggcaccaaggtggaaatcaagctcgagatccagaaccctgatcctgccgtgtaccagctgcgggatagcaagagcagcgacaagagcgtgtgtctgttcaccgacttcgacagccagaccaacgtgtcccagagcaaggactccgacgtgtacatcaccgataagtgcgtgctggacatgcggagcatggacttcaagagcaactccgccgtggcctggtccaacaagtccgatttcgcctgcgccaacgccttcaacaacagcattatccccgaggacacattcttcccaagccccgagagcagctgcggctttaccagcgagagctaccagcagggcgtgctgagcgccaccatcctgtacgagatcctgctgggcaaggccaccctgtacgccgtgctggtgtctgccctggtgctgatggctatggtcaagcggaaggacagccggggacgcgccaagagaagcggatctggcgtgaagcagaccctgaatttcgacctgctgaagctggctggcgacgtggaatccaacccaggccctactagtatggactggatttggcgcatccttttccttgtcggcgctgctaccggcgcgcattccttcgaacaggtgcagctggtgcagtctggggccgaagtgaagaaaaccggcagcagcgtgaaggtgtcctgcaaggccagcggctacacctttaccgaccacgccattcacgtgtggcggcaggctccaggacaggccctggaatggatgggccacttcagccccggcaacaccgacatcaagtacaacgacaagttcaagggcagagtgaccctgaccgtggaccgcagcatgagcaccgcctacatggaactgagcagcctgcggagcgaggacaccgccatgtactattgcaagaccagcaccttctttttcgactactggggccagggaacaatggtcaccgtgtccagcacgcgtgaggacctgaagaacgtgttcccacctgaggtggccgtgttcgagcctagcgaggccgagatcagccacacccagaaagccaccctcgtgtgcctggctaccggcttctaccccgaccatgtggaactgtcttggtgggtcaacggcaaagaggtgcacagcggcgtgtgtaccgacccccagccactgaaagaacagcccgccctgaacgacagccggtactgcctgagcagcagactgagagtgtccgccaccttctggcagaacccccggaaccacttcagatgccaggtgcagttctacggcctgagcgagaacgacgagtggacccaggacagagccaagcccgtgacccagatcgtgtctgccgaagcctggggcagagccgattgcgacgtgaagctggtggaaaagagcttcgagacagacaccaacctgaacttccagaacctgagcgtgatcggcttcagaatcctgctgctgaaagtggccggctttaacctgctgatgaccctgcggctgtggtccagc

SEQ ID NO: 4516 - DNA, 2280 bp, synthetic construct
  source 1..2280: mol_type = other DNA
atggccttaccagtgaccgccttgctcctgccgctggccttgctgctccacgccgccaggccggaagtgcagctggttgaatctggcggaggactggttcagcctggcggatctctgagactgtcttgtgccgccagcggcttcagcttcagcgacttttggatgagctgggtccgacaggcccctggcaaaggacttgaatgggtcgccacaatcagccaggccggcagcgagaaggactacgtggactctgtgaagggcagattcaccatcagccgggacaacgccaagaagtccctgtacctccagatgaacagcctgagagccgaggacaccgccgtgtactattgtgcctctggcgtgtacagcttcgactacagaggccagggcaccctggtcacagtctcttctggtaccggcggaggcggatctggcggcggaggtagcggtggcggaggatctgaattcgacatccagatgacccagagccccagcagcctgtctgccagcgtgggcgacagagtgaccatcacatgcaaggccagccaggacgtgtccattgccgtggcctggtatcagcagaagcccggcaaggcccccaaggtgctgatctacagcgccagctacagatacaccggcgtgcccgacagattcagcggctctggcagcggcaccgacttcaccttcaccatcagctccctccagcccgaggatattgccgtgtactactgccagcagcactacatcacccccctgacctttggcggaggcaccaaggtggaaatcaagctcgagatccagaaccctgatcctgccgtgtaccagctgcgggatagcaagagcagcgacaagagcgtgtgtctgttcaccgacttcgacagccagaccaacgtgtcccagagcaaggactccgacgtgtacatcaccgataagtgcgtgctggacatgcggagcatggacttcaagagcaactccgccgtggcctggtccaacaagtccgatttcgcctgcgccaacgccttcaacaacagcattatccccgaggacacattcttcccaagccccgagagcagctgcggctttaccagcgagagctaccagcagggcgtgctgagcgccaccatcctgtacgagatcctgctgggcaaggccaccctgtacgccgtgctggtgtctgccctggtgctgatggctatggtcaagcggaaggacagccggggacgcgccaagagaagcggatctggcgtgaagcagaccctgaatttcgacctgctgaagctggctggcgacgtggaatccaacccaggccctactagtatggactggatttggcgcatccttttccttgtcggcgctgctaccggcgcgcattccttcgaacagatccaactggtgcagagcggccacgaagtgaagaaacctggggccagcgtgaaggtgtcctgcaaagccagcggctacacctttaccaactacggcatgaactgggtgcgccaggcccctggacagggcctggaatggatgggctggatcaacaccaagaccggcgagcccacctacgccgaagagttcaagggcagattcgtgttcagcctggaaaccagcgcctccaccgcctacctccagatcagctctctgaaggccgaggacaccgccatgtacttttgcggcagaggcggctacggcagcagctactggtacttcgatgtgtggggccagggcaccaccgtgaccgtgtcatctacgcgtgaggacctgaagaacgtgttcccacctgaggtggccgtgttcgagcctagcgaggccgagatcagccacacccagaaagccaccctcgtgtgcctggctaccggcttctaccccgaccatgtggaactgtcttggtgggtcaacggcaaagaggtgcacagcggcgtgtgtaccgacccccagccactgaaagaacagcccgccctgaacgacagccggtactgcctgagcagcagactgagagtgtccgccaccttctggcagaacccccggaaccacttcagatgccaggtgcagttctacggcctgagcgagaacgacgagtggacccaggacagagccaagcccgtgacccagatcgtgtctgccgaagcctggggcagagccgattgcgacgtgaagctggtggaaaagagcttcgagacagacaccaacctgaacttccagaacctgagcgtgatcggcttcagaatcctgctgctgaaagtggccggctttaacctgctgatgaccctgcggctgtggtccagc

SEQ ID NO: 4517 - DNA, 2286 bp, synthetic construct
  source 1..2286: mol_type = other DNA
atggccttaccagtgaccgccttgctcctgccgctggccttgctgctccacgccgccaggccggaagtgcagctggttgaatctggcggaggactggttcagcctggcggatctctgagactgtcttgtgccgccagcggcttcagcttcagcgacttttggatgagctgggtccgacaggcccctggcaaaggacttgaatgggtcgccacaatcagccaggccggcagcgagaaggactacgtggactctgtgaagggcagattcaccatcagccgggacaacgccaagaagtccctgtacctccagatgaacagcctgagagccgaggacaccgccgtgtactattgtgcctctggcgtgtacagcttcgactacagaggccagggcaccctggtcacagtctcttctggtaccggcggaggcggatctggcggcggaggtagcggtggcggaggatctgaattcgacatcgtgatgacccagagccccgatagcctggccgtgtctctgggagagagagccaccatcaactgccgggccagcaagagcgtgtccaccagcggctacagctacatgcactggtatcagcagaagcccggccagccccccaagctgctgatctacctggcctccaacctggaaagcggcgtgcccgatagattcagcggcagcggctctggcaccgacttcaccctgaccatcagttctcttcaggccgaggacgtggccgtgtactactgccagcacagcagagagctgccctacaccttcggccagggcaccaagctggaaatcaagctcgagatccagaaccctgatcctgccgtgtaccagctgcgggatagcaagagcagcgacaagagcgtgtgtctgttcaccgacttcgacagccagaccaacgtgtcccagagcaaggactccgacgtgtacatcaccgataagtgcgtgctggacatgcggagcatggacttcaagagcaactccgccgtggcctggtccaacaagtccgatttcgcctgcgccaacgccttcaacaacagcattatccccgaggacacattcttcccaagccccgagagcagctgcggctttaccagcgagagctaccagcagggcgtgctgagcgccaccatcctgtacgagatcctgctgggcaaggccaccctgtacgccgtgctggtgtctgccctggtgctgatggctatggtcaagcggaaggacagccggggacgcgccaagagaagcggatctggcgtgaagcagaccctgaatttcgacctgctgaagctggctggcgacgtggaatccaacccaggccctactagtatggactggatttggcgcatccttttccttgtcggcgctgctaccggcgcgcattccttcgaacaggtgcaactccaggaatctggccctggccttgtgaagcccagcgagacactgagcctgacctgtaccgtgtccggcggcagcatcagctcttacggcgtgcactggattcggcagcctccaggcaagggcctggaatggatcggcgtgatctggacctccggcgtgaccgactacaacagcgccctgatgggcagagtgaccatctccgtggacaccagcaagaaccagttcagcctgaagctgagcagcgtgacagccgccgataccgccgtgtattattgcgccagagatggcgactacgaccgctacacaatggactactggggccagggaacccttgtgaccgtgtcctctacgcgtgaggacctgaagaacgtgttcccacctgaggtggccgtgttcgagcctagcgaggccgagatcagccacacccagaaagccaccctcgtgtgcctggctaccggcttctaccccgaccatgtggaactgtcttggtgggtcaacggcaaagaggtgcacagcggcgtgtgtaccgacccccagccactgaaagaacagcccgccctgaacgacagccggtactgcctgagcagcagactgagagtgtccgccaccttctggcagaacccccggaaccacttcagatgccaggtgcagttctacggcctgagcgagaacgacgagtggacccaggacagagccaagcccgtgacccagatcgtgtctgccgaagcctggggcagagccgattgcgacgtgaagctggtggaaaagagcttcgagacagacaccaacctgaacttccagaacctgagcgtgatcggcttcagaatcctgctgctgaaagtggccggctttaacctgctgatgaccctgcggctgtggtccagc

SEQ ID NO: 4518 - DNA, 2286 bp, synthetic construct
  source 1..2286: mol_type = other DNA
atggccttaccagtgaccgccttgctcctgccgctggccttgctgctccacgccgccaggccggaagtgcagctggttgaatctggcggaggactggttcagcctggcggatctctgagactgtcttgtgccgccagcggcttcagcttcagcgacttttggatgagctgggtccgacaggcccctggcaaaggacttgaatgggtcgccacaatcagccaggccggcagcgagaaggactacgtggactctgtgaagggcagattcaccatcagccgggacaacgccaagaagtccctgtacctccagatgaacagcctgagagccgaggacaccgccgtgtactattgtgcctctggcgtgtacagcttcgactacagaggccagggcaccctggtcacagtctcttctggtaccggcggaggcggatctggcggcggaggtagcggtggcggaggatctgaattcgacatccagatgacccagagccccagcagcctgtctgccagcgtgggcgacagagtgaccatcacctgtagagccagccagagcatcggcaccagcctgcactggtatcagcagaagcctggcaaggcccccaagctgctgattaagttcgccagcagactgcagagcggcgtgcccagcagattttctggcagcggctccggcaccgacttcaccctgacaatcagctccctgcagcccgaggacttcgccacctactactgccagcagagccccggcttccctccaacctttggacagggcaccaagctggaaatcaagcggctcgagatccagaaccctgatcctgccgtgtaccagctgcgggatagcaagagcagcgacaagagcgtgtgtctgttcaccgacttcgacagccagaccaacgtgtcccagagcaaggactccgacgtgtacatcaccgataagtgcgtgctggacatgcggagcatggacttcaagagcaactccgccgtggcctggtccaacaagtccgatttcgcctgcgccaacgccttcaacaacagcattatccccgaggacacattcttcccaagccccgagagcagctgcggctttaccagcgagagctaccagcagggcgtgctgagcgccaccatcctgtacgagatcctgctgggcaaggccaccctgtacgccgtgctggtgtctgccctggtgctgatggctatggtcaagcggaaggacagccggggacgcgccaagagaagcggatctggcgtgaagcagaccctgaatttcgacctgctgaagctggctggcgacgtggaatccaacccaggccctactagtatggactggatttggcgcatccttttccttgtcggcgctgctaccggcgcgcattccttcgaacaggtgcaactggtggaatctggcggcggacttgtgaagccaggcggcagcctgagactgagctgtgccgccagcggcttcagcatcaccaccagcggctactactggacctggatcagacagttccccggcaagggcctggaatggatgggctacatcggctacaacagcaagacctactacaaccccgccctgaagtcccggatcaccatcagcagagacaacgccaagaacagcctgtacctgcagatgaactccctgagagccgaggataccgccgtgtactactgcgccagatccctgtacggcggctacaaggacgccttcgatagctggggccagggaacccttgtgaccgtgtctagcacgcgtgaggacctgaagaacgtgttcccacctgaggtggccgtgttcgagcctagcgaggccgagatcagccacacccagaaagccaccctcgtgtgcctggctaccggcttctaccccgaccatgtggaactgtcttggtgggtcaacggcaaagaggtgcacagcggcgtgtgtaccgacccccagccactgaaagaacagcccgccctgaacgacagccggtactgcctgagcagcagactgagagtgtccgccaccttctggcagaacccccggaaccacttcagatgccaggtgcagttctacggcctgagcgagaacgacgagtggacccaggacagagccaagcccgtgacccagatcgtgtctgccgaagcctggggcagagccgattgcgacgtgaagctggtggaaaagagcttcgagacagacaccaacctgaacttccagaacctgagcgtgatcggcttcagaatcctgctgctgaaagtggccggctttaacctgctgatgaccctgcggctgtggtccagc

SEQ ID NO: 4519 - DNA, 2301 bp, synthetic construct
  source 1..2301: mol_type = other DNA
atggccttaccagtgaccgccttgctcctgccgctggccttgctgctccacgccgccaggccggaagtgcagctggttgaatctggcggaggactggttcagcctggcggatctctgagactgtcttgtgccgccagcggcttcagcttcagcgacttttggatgagctgggtccgacaggcccctggcaaaggacttgaatgggtcgccacaatcagccaggccggcagcgagaaggactacgtggactctgtgaagggcagattcaccatcagccgggacaacgccaagaagtccctgtacctccagatgaacagcctgagagccgaggacaccgccgtgtactattgtgcctctggcgtgtacagcttcgactacagaggccagggcaccctggtcacagtctcttctggtaccggcggaggcggatctggcggcggaggtagcggtggcggaggatctgaattcgacgagatcgtgctgacccagagccctctgagcctgcctgtgacacctggcgagcctgccagcatctcctgtagaagcagccagagcctgctgcacagcatcggctacaactacctggactggtatctccagaagcccggccagagcccccaactgctgatctacctgggcagcaacagagccagcggcgtgcccgatagattttccggcagcggctccggcaccgacttcaccctgaagatcagccgggtggaagccgaggacgtgggcgtgtactactgtatgcaggccctccagacccccctgacctttggcggaggcaccaaggtggaaatcaagcggctcgagatccagaaccctgatcctgccgtgtaccagctgcgggatagcaagagcagcgacaagagcgtgtgtctgttcaccgacttcgacagccagaccaacgtgtcccagagcaaggactccgacgtgtacatcaccgataagtgcgtgctggacatgcggagcatggacttcaagagcaactccgccgtggcctggtccaacaagtccgatttcgcctgcgccaacgccttcaacaacagcattatccccgaggacacattcttcccaagccccgagagcagctgcggctttaccagcgagagctaccagcagggcgtgctgagcgccaccatcctgtacgagatcctgctgggcaaggccaccctgtacgccgtgctggtgtctgccctggtgctgatggctatggtcaagcggaaggacagccggggacgcgccaagagaagcggatctggcgtgaagcagaccctgaatttcgacctgctgaagctggctggcgacgtggaatccaacccaggccctactagtatggactggatttggcgcatccttttccttgtcggcgctgctaccggcgcgcattccttcgaagaagtgcaactggtggaaagcggaggcggcgtggtgcagcctggaagaagcctgagactgagctgtgccgccagcggcttcaccttccggtcctacggaatgcactgggtgcgccaggcccctggcaaaggactggaatgggtggccgtgatctcctacgacggctccaacaagtactacaccgacagcgtgaacggcagattcaccatcagcagagacaacagcaagaacaccctgtacctccagatgaacagcctgcgggccgaggacaccgccgtgtactattgtgctagaggcggaggctactacgagacaagcggccctgattactggggccagggcacactcgtgaccgtgtctagtacgcgtgaggacctgaagaacgtgttcccacctgaggtggccgtgttcgagcctagcgaggccgagatcagccacacccagaaagccaccctcgtgtgcctggctaccggcttctaccccgaccatgtggaactgtcttggtgggtcaacggcaaagaggtgcacagcggcgtgtgtaccgacccccagccactgaaagaacagcccgccctgaacgacagccggtactgcctgagcagcagactgagagtgtccgccaccttctggcagaacccccggaaccacttcagatgccaggtgcagttctacggcctgagcgagaacgacgagtggacccaggacagagccaagcccgtgacccagatcgtgtctgccgaagcctggggcagagccgattgcgacgtgaagctggtggaaaagagcttcgagacagacaccaacctgaacttccagaacctgagcgtgatcggcttcagaatcctgctgctgaaagtggccggctttaacctgctgatgaccctgcggctgtggtccagc

SEQ ID NO: 4520 - DNA, 2295 bp, synthetic construct
  source 1..2295: mol_type = other DNA
atggccttaccagtgaccgccttgctcctgccgctggccttgctgctccacgccgccaggccggaagtgcagctggttgaatctggcggaggactggttcagcctggcggatctctgagactgtcttgtgccgccagcggcttcagcttcagcgacttttggatgagctgggtccgacaggcccctggcaaaggacttgaatgggtcgccacaatcagccaggccggcagcgagaaggactacgtggactctgtgaagggcagattcaccatcagccgggacaacgccaagaagtccctgtacctccagatgaacagcctgagagccgaggacaccgccgtgtactattgtgcctctggcgtgtacagcttcgactacagaggccagggcaccctggtcacagtctcttctggtaccggcggaggcggatctggcggcggaggtagcggtggcggaggatctgaattcgacgacgtcgtgatgacccagagccctctgagcctgcctgtgacacctggcgagcctgccagcatctcctgtagaagcagccagagcctgctgcacagcatcggctacaactacctgcactggtttctccagaagcccggccagagcccccaactgctgatctacctgggcagcaacagagccagcggcgtgcccgatagattttccggcagcggctccggcaccgacttcaccctgaagatcagccgggtggaagccgaggacgtgggcgtgtactactgtatgcaggccctccagacccctcccacctttggacagggcaccagactggaaatcaagcggctcgagatccagaaccctgatcctgccgtgtaccagctgcgggatagcaagagcagcgacaagagcgtgtgtctgttcaccgacttcgacagccagaccaacgtgtcccagagcaaggactccgacgtgtacatcaccgataagtgcgtgctggacatgcggagcatggacttcaagagcaactccgccgtggcctggtccaacaagtccgatttcgcctgcgccaacgccttcaacaacagcattatccccgaggacacattcttcccaagccccgagagcagctgcggctttaccagcgagagctaccagcagggcgtgctgagcgccaccatcctgtacgagatcctgctgggcaaggccaccctgtacgccgtgctggtgtctgccctggtgctgatggctatggtcaagcggaaggacagccggggacgcgccaagagaagcggatctggcgtgaagcagaccctgaatttcgacctgctgaagctggctggcgacgtggaatccaacccaggccctactagtatggactggatttggcgcatccttttccttgtcggcgctgctaccggcgcgcattccttcgaacaactccaactccaggaaagcggccctggcctcgtgaagcctagcggcacactgagcctgacatgtgccgtgtctggcggcagcatcagcagcagcaactggtggtcttgggtgcgccagcctcctggcaagggcctggaatggatcggcgaaatctaccacagcggcagcaccaactacaaccccagcctgaagtccagagtgaccatcagcgtggacaagagcaagaaccagttctccctgaagctgagcagcgtgacagccgccgataccgccgtgtactattgcgtgggcagcccctacggcgactacgtgctggattattggggccagggcaccctcgtgaccgtgtctagtacgcgtgaggacctgaagaacgtgttcccacctgaggtggccgtgttcgagcctagcgaggccgagatcagccacacccagaaagccaccctcgtgtgcctggctaccggcttctaccccgaccatgtggaactgtcttggtgggtcaacggcaaagaggtgcacagcggcgtgtgtaccgacccccagccactgaaagaacagcccgccctgaacgacagccggtactgcctgagcagcagactgagagtgtccgccaccttctggcagaacccccggaaccacttcagatgccaggtgcagttctacggcctgagcgagaacgacgagtggacccaggacagagccaagcccgtgacccagatcgtgtctgccgaagcctggggcagagccgattgcgacgtgaagctggtggaaaagagcttcgagacagacaccaacctgaacttccagaacctgagcgtgatcggcttcagaatcctgctgctgaaagtggccggctttaacctgctgatgaccctgcggctgtggtccagc

SEQ ID NO: 4521 - DNA, 2289 bp, synthetic construct
  source 1..2289: mol_type = other DNA
atggccttaccagtgaccgccttgctcctgccgctggccttgctgctccacgccgccaggccggaagtgcagctggttgaatctggcggaggactggttcagcctggcggatctctgagactgtcttgtgccgccagcggcttcagcttcagcgacttttggatgagctgggtccgacaggcccctggcaaaggacttgaatgggtcgccacaatcagccaggccggcagcgagaaggactacgtggactctgtgaagggcagattcaccatcagccgggacaacgccaagaagtccctgtacctccagatgaacagcctgagagccgaggacaccgccgtgtactattgtgcctctggcgtgtacagcttcgactacagaggccagggcaccctggtcacagtctcttctggtaccggcggaggcggatctggcggcggaggtagcggtggcggaggatctgaattcgacgagatcgtgctgacacagagccctggcaccctgagcctgtctctgggagagagagccacactgagctgtcgggccagccagtctatcagcagcagcttcctggcctggtatcagcagaagcccggccaggcccctaagctgctgatctacgccgccagcacaagagccaccggcatccccgatagattcagcggctctggcagcggcaccgacttcaccctgaccatcagcagactggaacccgaggacttcgccgtgtactactgccagcagtacggcagaagcctgagcttcggcggaggcaccaaggtggaagtgaagctcgagatccagaaccctgatcctgccgtgtaccagctgcgggatagcaagagcagcgacaagagcgtgtgtctgttcaccgacttcgacagccagaccaacgtgtcccagagcaaggactccgacgtgtacatcaccgataagtgcgtgctggacatgcggagcatggacttcaagagcaactccgccgtggcctggtccaacaagtccgatttcgcctgcgccaacgccttcaacaacagcattatccccgaggacacattcttcccaagccccgagagcagctgcggctttaccagcgagagctaccagcagggcgtgctgagcgccaccatcctgtacgagatcctgctgggcaaggccaccctgtacgccgtgctggtgtctgccctggtgctgatggctatggtcaagcggaaggacagccggggacgcgccaagagaagcggatctggcgtgaagcagaccctgaatttcgacctgctgaagctggctggcgacgtggaatccaacccaggccctactagtatggactggatttggcgcatccttttccttgtcggcgctgctaccggcgcgcattccttcgaacaggtgcaactccagcagtctggccccggactcgtgaagcctagccagacactgagcctgacctgcgccatcagcggcgatagcgtgtccggcaatagcgccacctggaactggatcagacagagcccatctcggggcctggaatggctgggccggacctactaccgcagcaagtggaaccacgactacgccgagagcgtgaagtcccggatcaccatcaaccccgacaccagcaagaaccagttctccttgcaactgaacagcgtgacccccgaggacacagccgtgtattattgcgccagaggcgacagcagctcttggtacgccttcgactattggggccagggcaccctcgtgaccgtgtctagtacgcgtgaggacctgaagaacgtgttcccacctgaggtggccgtgttcgagcctagcgaggccgagatcagccacacccagaaagccaccctcgtgtgcctggctaccggcttctaccccgaccatgtggaactgtcttggtgggtcaacggcaaagaggtgcacagcggcgtgtgtaccgacccccagccactgaaagaacagcccgccctgaacgacagccggtactgcctgagcagcagactgagagtgtccgccaccttctggcagaacccccggaaccacttcagatgccaggtgcagttctacggcctgagcgagaacgacgagtggacccaggacagagccaagcccgtgacccagatcgtgtctgccgaagcctggggcagagccgattgcgacgtgaagctggtggaaaagagcttcgagacagacaccaacctgaacttccagaacctgagcgtgatcggcttcagaatcctgctgctgaaagtggccggctttaacctgctgatgaccctgcggctgtggtccagc

SEQ ID NO: 4522 - DNA, 2286 bp, synthetic construct
  source 1..2286: mol_type = other DNA
atggccttaccagtgaccgccttgctcctgccgctggccttgctgctccacgccgccaggccggaagtgcagctggttgaatctggcggaggactggttcagcctggcggatctctgagactgtcttgtgccgccagcggcttcagcttcagcgacttttggatgagctgggtccgacaggcccctggcaaaggacttgaatgggtcgccacaatcagccaggccggcagcgagaaggactacgtggactctgtgaagggcagattcaccatcagccgggacaacgccaagaagtccctgtacctccagatgaacagcctgagagccgaggacaccgccgtgtactattgtgcctctggcgtgtacagcttcgactacagaggccagggcaccctggtcacagtctcttctggtaccggcggaggcggatctggcggcggaggtagcggtggcggaggatctgaattcgaccagagcgtcgtgacacagcctcctagcgtgtcagtggcccctggcaagaccgccagaatcacctgtggccggaacaacatcggcagcaagagcgtgcactggtatcagcagaagcccggccaggctcctgtgctggtggtgtacgacgacagcgacagacccagcggcatccccgagagattcagcggcagcaactccggcaataccgccaccctgaccatcagcagagtggaagccggcgacgaggccgactactactgccaagtgtgggacagcagcagcgatcacgtggtgtttggcggaggcaccaagctgacagtgctgggtctcgagatccagaaccctgatcctgccgtgtaccagctgcgggatagcaagagcagcgacaagagcgtgtgtctgttcaccgacttcgacagccagaccaacgtgtcccagagcaaggactccgacgtgtacatcaccgataagtgcgtgctggacatgcggagcatggacttcaagagcaactccgccgtggcctggtccaacaagtccgatttcgcctgcgccaacgccttcaacaacagcattatccccgaggacacattcttcccaagccccgagagcagctgcggctttaccagcgagagctaccagcagggcgtgctgagcgccaccatcctgtacgagatcctgctgggcaaggccaccctgtacgccgtgctggtgtctgccctggtgctgatggctatggtcaagcggaaggacagccggggacgcgccaagagaagcggatctggcgtgaagcagaccctgaatttcgacctgctgaagctggctggcgacgtggaatccaacccaggccctactagtatggactggatttggcgcatccttttccttgtcggcgctgctaccggcgcgcattccttcgaagtgcaactggtgcagtctggcggaggggtcatgcggcctggcggatctctgagactgtcttgtgccgccagcggcttcaccttcgacgactacggcatgagctgggtgcgccaggcccctggaaaaggcctggaatgggtgtccggcatcaactggaatggcggcagcaccggctacgccgattctgtgcggggcagattcaccatcagccgggacaacgccaagaacagcctgtacctgcagatgaactccctgcgggccgaggacaccgccctgtactattgcgccagagagcggggctacggctaccacgaccctcacgattattggggccagggcacccttgttaccgtgtcctctacgcgtgaggacctgaagaacgtgttcccacctgaggtggccgtgttcgagcctagcgaggccgagatcagccacacccagaaagccaccctcgtgtgcctggctaccggcttctaccccgaccatgtggaactgtcttggtgggtcaacggcaaagaggtgcacagcggcgtgtgtaccgacccccagccactgaaagaacagcccgccctgaacgacagccggtactgcctgagcagcagactgagagtgtccgccaccttctggcagaacccccggaaccacttcagatgccaggtgcagttctacggcctgagcgagaacgacgagtggacccaggacagagccaagcccgtgacccagatcgtgtctgccgaagcctggggcagagccgattgcgacgtgaagctggtggaaaagagcttcgagacagacaccaacctgaacttccagaacctgagcgtgatcggcttcagaatcctgctgctgaaagtggccggctttaacctgctgatgaccctgcggctgtggtccagc

SEQ ID NO: 4523 - DNA, 2325 bp, synthetic construct
  source 1..2325: mol_type = other DNA
atggccttaccagtgaccgccttgctcctgccgctggccttgctgctccacgccgccaggccggaagtgcagctggttgaatctggcggaggactggttcagcctggcggatctctgagactgtcttgtgccgccagcggcttcagcttcagcgacttttggatgagctgggtccgacaggcccctggcaaaggacttgaatgggtcgccacaatcagccaggccggcagcgagaaggactacgtggactctgtgaagggcagattcaccatcagccgggacaacgccaagaagtccctgtacctccagatgaacagcctgagagccgaggacaccgccgtgtactattgtgcctctggcgtgtacagcttcgactacagaggccagggcaccctggtcacagtctcttctggtaccggcggaggcggatctggcggcggaggtagcggtggcggaggatctgaattcgaacagaaactcatcagtgaagaagacctggaattccaggctgtcgtgacacagcctcctagcgcctctggcacaccaggccagagagtgaccatctcctgtagcggcagcagcagcaacatcggcagcaacaccgtgaactggtatcagcaggtgcccggcaccgctcccaagctgctgatctacagcaacaaccagcggcccagcggcgtgcccgatagattttctggcagcaagagcggcaccagcgccagcctggctatctctggactccagtccgaggacgaggccgactactattgcgccgcctgggacgatagcctgaacggctgggtgttcggcggaggcaccaagctgacagtgctgctcgagatccagaaccctgatcctgccgtgtaccagctgcgggatagcaagagcagcgacaagagcgtgtgtctgttcaccgacttcgacagccagaccaacgtgtcccagagcaaggactccgacgtgtacatcaccgataagtgcgtgctggacatgcggagcatggacttcaagagcaactccgccgtggcctggtccaacaagtccgatttcgcctgcgccaacgccttcaacaacagcattatccccgaggacacattcttcccaagccccgagagcagctgcggctttaccagcgagagctaccagcagggcgtgctgagcgccaccatcctgtacgagatcctgctgggcaaggccaccctgtacgccgtgctggtgtctgccctggtgctgatggctatggtcaagcggaaggacagccggggacgcgccaagagaagcggatctggcgtgaagcagaccctgaatttcgacctgctgaagctggctggcgacgtggaatccaacccaggccctactagtatggactggatttggcgcatccttttccttgtcggcgctgctaccggcgcgcattccttcgaacagatgcaactggtgcagagcggagccgaagtgaaagagcctggcgagagcctgcggatctcctgcaagggcagcggctacagcttcaccaatttctggatctcttgggtgcgccagatgcccggcaagggcctggaatggatgggcagagtggaccccggctactcctacagcacctacagccctagcttccagggccacgtgaccatcagcgccgacaagagcaccagcaccgcctacctccagtggaacagcctgaaggccagcgacaccgccatgtactactgcgccagagtgcagtacagcggctattacgattggttcgacccctggggccagggcacactcgtgacagtgtcaagcacgcgtgaggacctgaagaacgtgttcccacctgaggtggccgtgttcgagcctagcgaggccgagatcagccacacccagaaagccaccctcgtgtgcctggctaccggcttctaccccgaccatgtggaactgtcttggtgggtcaacggcaaagaggtgcacagcggcgtgtgtaccgacccccagccactgaaagaacagcccgccctgaacgacagccggtactgcctgagcagcagactgagagtgtccgccaccttctggcagaacccccggaaccacttcagatgccaggtgcagttctacggcctgagcgagaacgacgagtggacccaggacagagccaagcccgtgacccagatcgtgtctgccgaagcctggggcagagccgattgcgacgtgaagctggtggaaaagagcttcgagacagacaccaacctgaacttccagaacctgagcgtgatcggcttcagaatcctgctgctgaaagtggccggctttaacctgctgatgaccctgcggctgtggtccagc

SEQ ID NO: 4524 - DNA, 2307 bp, synthetic construct
  source 1..2307: mol_type = other DNA
atggccttaccagtgaccgccttgctcctgccgctggccttgctgctccacgccgccaggccggaagtgcagctggttgaatctggcggaggactggttcagcctggcggatctctgagactgtcttgtgccgccagcggcttcagcttcagcgacttttggatgagctgggtccgacaggcccctggcaaaggacttgaatgggtcgccacaatcagccaggccggcagcgagaaggactacgtggactctgtgaagggcagattcaccatcagccgggacaacgccaagaagtccctgtacctccagatgaacagcctgagagccgaggacaccgccgtgtactattgtgcctctggcgtgtacagcttcgactacagaggccagggcaccctggtcacagtctcttctggtaccggcggaggcggatctggcggcggaggtagcggtggcggaggatctgaattcgaacagaaactcatcagtgaagaagacctggaattcgacatccagatgacccagagccccagcacactgagcgccagcgtgggcgacagagtgaccatcacctgtcgggccagccagaacatcaacaagtggctggcctggtatcagcagaggcccggaaaagccccccagctgctgatctacaaggccagcagcctggaaagcggcgtgcccagcagattttctggcagcggctctggcaccgagtacaccctgaccatcagctccctccagcccgacgacttcgccacctactactgccagcagtacaacagctacgccaccttcggccagggcaccaaggtggaaatcaagagactcgagatccagaaccctgatcctgccgtgtaccagctgcgggatagcaagagcagcgacaagagcgtgtgtctgttcaccgacttcgacagccagaccaacgtgtcccagagcaaggactccgacgtgtacatcaccgataagtgcgtgctggacatgcggagcatggacttcaagagcaactccgccgtggcctggtccaacaagtccgatttcgcctgcgccaacgccttcaacaacagcattatccccgaggacacattcttcccaagccccgagagcagctgcggctttaccagcgagagctaccagcagggcgtgctgagcgccaccatcctgtacgagatcctgctgggcaaggccaccctgtacgccgtgctggtgtctgccctggtgctgatggctatggtcaagcggaaggacagccggggacgcgccaagagaagcggatctggcgtgaagcagaccctgaatttcgacctgctgaagctggctggcgacgtggaatccaacccaggccctactagtatggactggatttggcgcatccttttccttgtcggcgctgctaccggcgcgcattccttcgaacaggtgcagctggtgcagtctggggccgaagtgaagaagcctggcgagagcctgaagatcagctgcaagggctccggctacaacttctctaacaagtggatcggctgggtgcgccagctgcctggcagaggactggaatggatcgccatcatctaccccggctacagcgacatcacctacagccccagcttccagggccgcgtgacaatcagcgccgacaccagcatcaacaccgcctacctgcactggcacagcctgaaggccagcgacaccgccatgtactactgcgtgcggcatacagccctggctggcttcgattattggggcctgggcaccctcgtgaccgtgtctagtacgcgtgaggacctgaagaacgtgttcccacctgaggtggccgtgttcgagcctagcgaggccgagatcagccacacccagaaagccaccctcgtgtgcctggctaccggcttctaccccgaccatgtggaactgtcttggtgggtcaacggcaaagaggtgcacagcggcgtgtgtaccgacccccagccactgaaagaacagcccgccctgaacgacagccggtactgcctgagcagcagactgagagtgtccgccaccttctggcagaacccccggaaccacttcagatgccaggtgcagttctacggcctgagcgagaacgacgagtggacccaggacagagccaagcccgtgacccagatcgtgtctgccgaagcctggggcagagccgattgcgacgtgaagctggtggaaaagagcttcgagacagacaccaacctgaacttccagaacctgagcgtgatcggcttcagaatcctgctgctgaaagtggccggctttaacctgctgatgaccctgcggctgtggtccagc

SEQ ID NO: 4525 - DNA, 2283 bp, synthetic construct
  source 1..2283: mol_type = other DNA
atggccttaccagtgaccgccttgctcctgccgctggccttgctgctccacgccgccaggccggaagtgcagctggttgaatctggcggaggactggttcagcctggcggatctctgagactgtcttgtgccgccagcggcttcagcttcagcgacttttggatgagctgggtccgacaggcccctggcaaaggacttgaatgggtcgccacaatcagccaggccggcagcgagaaggactacgtggactctgtgaagggcagattcaccatcagccgggacaacgccaagaagtccctgtacctccagatgaacagcctgagagccgaggacaccgccgtgtactattgtgcctctggcgtgtacagcttcgactacagaggccagggcaccctggtcacagtctcttctggtaccggcggaggcggatctggcggcggaggtagcggtggcggaggatctgaattcgacatcgtgctgacacagagccctgcttctctggccgtgtctctgggacagagagccaccatcagctgtagagccagcgagagcgtggacaactacggcaacaccttcatgcactggtatcagcagaagcccggccagcctcctaagctgctgatctacagagccagcaacctggaaagcggcatccccgccagattttctggcagcggcagcagaaccgacttcaccctgaccatcaatcccgtggaagccgacgacgtggcaacctactactgccagcagagcaacgaggaccctcctacatttggagccggcaccaagctggaactgaaactcgagatccagaaccctgatcctgccgtgtaccagctgcgggatagcaagagcagcgacaagagcgtgtgtctgttcaccgacttcgacagccagaccaacgtgtcccagagcaaggactccgacgtgtacatcaccgataagtgcgtgctggacatgcggagcatggacttcaagagcaactccgccgtggcctggtccaacaagtccgatttcgcctgcgccaacgccttcaacaacagcattatccccgaggacacattcttcccaagccccgagagcagctgcggctttaccagcgagagctaccagcagggcgtgctgagcgccaccatcctgtacgagatcctgctgggcaaggccaccctgtacgccgtgctggtgtctgccctggtgctgatggctatggtcaagcggaaggacagccggggacgcgccaagagaagcggatctggcgtgaagcagaccctgaatttcgacctgctgaagctggctggcgacgtggaatccaacccaggccctactagtatggactggatttggcgcatccttttccttgtcggcgctgctaccggcgcgcattccttcgaacagattcagctggtgcagtctggccccgagctgaagaaacctggcgagacagtgaagatcagctgcaaggccagcggctacatcttcaccaattacggcatgaactgggtcaagcaggcccctggcaagagcttcaagtggatgggctggatcaacacctacaccggcgagagcacatacagcgccgacttcaagggcagattcgccttcagcctggaaaccagcgccagcacagcctacctgcacatcaacgacctgaagaacgaggacaccgccacctacttttgcgccagaagcggcggctacgaccctatggattattggggccagggcaccagcgtgaccgtttcttctacgcgtgaggacctgaagaacgtgttcccacctgaggtggccgtgttcgagcctagcgaggccgagatcagccacacccagaaagccaccctcgtgtgcctggctaccggcttctaccccgaccatgtggaactgtcttggtgggtcaacggcaaagaggtgcacagcggcgtgtgtaccgacccccagccactgaaagaacagcccgccctgaacgacagccggtactgcctgagcagcagactgagagtgtccgccaccttctggcagaacccccggaaccacttcagatgccaggtgcagttctacggcctgagcgagaacgacgagtggacccaggacagagccaagcccgtgacccagatcgtgtctgccgaagcctggggcagagccgattgcgacgtgaagctggtggaaaagagcttcgagacagacaccaacctgaacttccagaacctgagcgtgatcggcttcagaatcctgctgctgaaagtggccggctttaacctgctgatgaccctgcggctgtggtccagc

SEQ ID NO: 4526 - DNA, 2280 bp, synthetic construct
  source 1..2280: mol_type = other DNA
atggccttaccagtgaccgccttgctcctgccgctggccttgctgctccacgccgccaggccggaagtgcagctggttgaatctggcggaggactggttcagcctggcggatctctgagactgtcttgtgccgccagcggcttcagcttcagcgacttttggatgagctgggtccgacaggcccctggcaaaggacttgaatgggtcgccacaatcagccaggccggcagcgagaaggactacgtggactctgtgaagggcagattcaccatcagccgggacaacgccaagaagtccctgtacctccagatgaacagcctgagagccgaggacaccgccgtgtactattgtgcctctggcgtgtacagcttcgactacagaggccagggcaccctggtcacagtctcttctggtaccggcggaggcggatctggcggcggaggtagcggtggcggaggatctgaattcgacgagatcgtgctgacacagagccctggcaccctgagcctgtctccaggcgaaagagccacactgagctgtcgggccagccagagcgtgtccaatacctacctggcctggtatcaccagaggcccggacaggctccccggctgctgatctatggcgcttctagcagagccaccggcatccccgatagattcagcggctctggcagcggcaccgacttcgccctgacaatcagctccctggaacccgaggacttcgccgtgtactactgccagcagtacagcaactcctggaccttcggccagggcaccaaggtggaaatcaagagactcgagatccagaaccctgatcctgccgtgtaccagctgcgggatagcaagagcagcgacaagagcgtgtgtctgttcaccgacttcgacagccagaccaacgtgtcccagagcaaggactccgacgtgtacatcaccgataagtgcgtgctggacatgcggagcatggacttcaagagcaactccgccgtggcctggtccaacaagtccgatttcgcctgcgccaacgccttcaacaacagcattatccccgaggacacattcttcccaagccccgagagcagctgcggctttaccagcgagagctaccagcagggcgtgctgagcgccaccatcctgtacgagatcctgctgggcaaggccaccctgtacgccgtgctggtgtctgccctggtgctgatggctatggtcaagcggaaggacagccggggacgcgccaagagaagcggatctggcgtgaagcagaccctgaatttcgacctgctgaagctggctggcgacgtggaatccaacccaggccctactagtatggactggatttggcgcatccttttccttgtcggcgctgctaccggcgcgcattccttcgaacaggtgcaactggtggaatctggcgggggagtggtgcagcctggcagaagcctgagactgtcttgtgccgccagcggcttcaccttcagcagctacgacatgcactgggtgcgccaggcccctggcaaaggactggaatgggtggccgtgatctcctacgacggcaccaacgagtattacgccgacagcgtgaagggccggttcaccatctccagagacaccagcaagaacaccctgtacctccagatgaacagcctgcgggccgaggacacagccgtgtattattgcgccagagagcggtacttcgactggtccttcgactactggggccagggaaccctggtgtccgtgtctagtacgcgtgaggacctgaagaacgtgttcccacctgaggtggccgtgttcgagcctagcgaggccgagatcagccacacccagaaagccaccctcgtgtgcctggctaccggcttctaccccgaccatgtggaactgtcttggtgggtcaacggcaaagaggtgcacagcggcgtgtgtaccgacccccagccactgaaagaacagcccgccctgaacgacagccggtactgcctgagcagcagactgagagtgtccgccaccttctggcagaacccccggaaccacttcagatgccaggtgcagttctacggcctgagcgagaacgacgagtggacccaggacagagccaagcccgtgacccagatcgtgtctgccgaagcctggggcagagccgattgcgacgtgaagctggtggaaaagagcttcgagacagacaccaacctgaacttccagaacctgagcgtgatcggcttcagaatcctgctgctgaaagtggccggctttaacctgctgatgaccctgcggctgtggtccagc

SEQ ID NO: 4527 - DNA, 2277 bp, synthetic construct
  source 1..2277: mol_type = other DNA
atggccttaccagtgaccgccttgctcctgccgctggccttgctgctccacgccgccaggccggaagtgcagctggttgaatctggcggaggactggttcagcctggcggatctctgagactgtcttgtgccgccagcggcttcagcttcagcgacttttggatgagctgggtccgacaggcccctggcaaaggacttgaatgggtcgccacaatcagccaggccggcagcgagaaggactacgtggactctgtgaagggcagattcaccatcagccgggacaacgccaagaagtccctgtacctccagatgaacagcctgagagccgaggacaccgccgtgtactattgtgcctctggcgtgtacagcttcgactacagaggccagggcaccctggtcacagtctcttctggtaccggcggaggcggatctggcggcggaggtagcggtggcggaggatctgaattcgacgagctgacacaggaccctgctgtgtctgttgccctgggccagacagtgcggattacctgtcaaggcgacagcctgagaagcaactacgccaactggtatcagcagaagcccggacaggctcccgtgctggttatctacggccagaacaacagacccagcggcatccccgatagattcagcggctctagctctggcaataccgccagcctgacaatcactggcgctcaggctgccgatgaggccgactactactgcgatagcagagtgtccaccggcaatcacgtggtgtttggcggcggaacaaagctgacagtgctcggacaactcgagatccagaaccctgatcctgccgtgtaccagctgcgggatagcaagagcagcgacaagagcgtgtgtctgttcaccgacttcgacagccagaccaacgtgtcccagagcaaggactccgacgtgtacatcaccgataagtgcgtgctggacatgcggagcatggacttcaagagcaactccgccgtggcctggtccaacaagtccgatttcgcctgcgccaacgccttcaacaacagcattatccccgaggacacattcttcccaagccccgagagcagctgcggctttaccagcgagagctaccagcagggcgtgctgagcgccaccatcctgtacgagatcctgctgggcaaggccaccctgtacgccgtgctggtgtctgccctggtgctgatggctatggtcaagcggaaggacagccggggacgcgccaagagaagcggatctggcgtgaagcagaccctgaatttcgacctgctgaagctggctggcgacgtggaatccaacccaggccctactagtatggactggatttggcgcatccttttccttgtcggcgctgctaccggcgcgcattccttcgaagaagttcagctggtgcagagcggagccgaagtgaagaaacctggggcctctgtgaaggtgtcctgcaaggcttccggctacacctttaccagctacgccatgcactgggtccgacaggcacctggacaacggcttgaatggatgggctggatcaacgccggcaacggcaacaccaagtacagccagaaattccagggccgcgtgaccatcaccagagatacaagcgccagcaccgcctacatggaactgtctagcctgagatccgaggacaccgccgtgtactactgtgccagagacatcagctacggcagcttcgactattggggccagggcacactggtcaccgttagctctacgcgtgaggacctgaagaacgtgttcccacctgaggtggccgtgttcgagcctagcgaggccgagatcagccacacccagaaagccaccctcgtgtgcctggctaccggcttctaccccgaccatgtggaactgtcttggtgggtcaacggcaaagaggtgcacagcggcgtgtgtaccgacccccagccactgaaagaacagcccgccctgaacgacagccggtactgcctgagcagcagactgagagtgtccgccaccttctggcagaacccccggaaccacttcagatgccaggtgcagttctacggcctgagcgagaacgacgagtggacccaggacagagccaagcccgtgacccagatcgtgtctgccgaagcctggggcagagccgattgcgacgtgaagctggtggaaaagagcttcgagacagacaccaacctgaacttccagaacctgagcgtgatcggcttcagaatcctgctgctgaaagtggccggctttaacctgctgatgaccctgcggctgtggtccagc

SEQ ID NO: 4528 - DNA, 2283 bp, synthetic construct
  source 1..2283: mol_type = other DNA
atggccttaccagtgaccgccttgctcctgccgctggccttgctgctccacgccgccaggccggaagtgcagctggttgaatctggcggaggactggttcagcctggcggatctctgagactgtcttgtgccgccagcggcttcagcttcagcgacttttggatgagctgggtccgacaggcccctggcaaaggacttgaatgggtcgccacaatcagccaggccggcagcgagaaggactacgtggactctgtgaagggcagattcaccatcagccgggacaacgccaagaagtccctgtacctccagatgaacagcctgagagccgaggacaccgccgtgtactattgtgcctctggcgtgtacagcttcgactacagaggccagggcaccctggtcacagtctcttctggtaccggcggaggcggatctggcggcggaggtagcggtggcggaggatctgaattcgacgacatcgtgctgacacagacaccagccacactgagcgtgacacctggcgattctgtgtccctgagctgtagagccagccagagcatcagcaacaacctgcactggtatcagcagaagtcccacgagagccccagactgctgattaagaacgccagccagtctatcagcggcatccccagcaagtttagcggctctggcagcggcaccgacttcaccctgagaatcaacagcgtggaaaccgaggacttcgggatgtacttctgccagcagagcaatagctggccctacacatttggctccggcaccaagctggaaatcaaactcgagatccagaaccctgatcctgccgtgtaccagctgcgggatagcaagagcagcgacaagagcgtgtgtctgttcaccgacttcgacagccagaccaacgtgtcccagagcaaggactccgacgtgtacatcaccgataagtgcgtgctggacatgcggagcatggacttcaagagcaactccgccgtggcctggtccaacaagtccgatttcgcctgcgccaacgccttcaacaacagcattatccccgaggacacattcttcccaagccccgagagcagctgcggctttaccagcgagagctaccagcagggcgtgctgagcgccaccatcctgtacgagatcctgctgggcaaggccaccctgtacgccgtgctggtgtctgccctggtgctgatggctatggtcaagcggaaggacagccggggacgcgccaagagaagcggatctggcgtgaagcagaccctgaatttcgacctgctgaagctggctggcgacgtggaatccaacccaggccctactagtatggactggatttggcgcatccttttccttgtcggcgctgctaccggcgcgcattccttcgaacaagtgaagctgcaacagagcggacccgagctggttaagccaggcgcttccgtgaagattagctgcaaggccagcggctacagcttcaccggctactacatgcactgggtcaagcagagccacggcaacatcctggactggatcggctacatctacccctacaacggcgtgtccagctacaaccagaagttcaagggcaaagccactctgaccgtggacaagagcagcagcaccgcctacatggaactgagaagcctgaccagcgaggacagcgccgtgtactattgtgccagagagcggggcctgtaccagctcagagcaatggattattggggccagggcaccagcgtgaccgtttcttctacgcgtgaggacctgaagaacgtgttcccacctgaggtggccgtgttcgagcctagcgaggccgagatcagccacacccagaaagccaccctcgtgtgcctggctaccggcttctaccccgaccatgtggaactgtcttggtgggtcaacggcaaagaggtgcacagcggcgtgtgtaccgacccccagccactgaaagaacagcccgccctgaacgacagccggtactgcctgagcagcagactgagagtgtccgccaccttctggcagaacccccggaaccacttcagatgccaggtgcagttctacggcctgagcgagaacgacgagtggacccaggacagagccaagcccgtgacccagatcgtgtctgccgaagcctggggcagagccgattgcgacgtgaagctggtggaaaagagcttcgagacagacaccaacctgaacttccagaacctgagcgtgatcggcttcagaatcctgctgctgaaagtggccggctttaacctgctgatgaccctgcggctgtggtccagc

SEQ ID NO: 4529 - DNA, 2256 bp, synthetic construct
  source 1..2256: mol_type = other DNA
atggccttaccagtgaccgccttgctcctgccgctggccttgctgctccacgccgccaggccggaagtgcagctggttgaatctggcggaggactggttcagcctggcggatctctgagactgtcttgtgccgccagcggcttcagcttcagcgacttttggatgagctgggtccgacaggcccctggcaaaggacttgaatgggtcgccacaatcagccaggccggcagcgagaaggactacgtggactctgtgaagggcagattcaccatcagccgggacaacgccaagaagtccctgtacctccagatgaacagcctgagagccgaggacaccgccgtgtactattgtgcctctggcgtgtacagcttcgactacagaggccagggcaccctggtcacagtctcttctggtaccggcggaggcggatctggcggcggaggtagcggtggcggaggatctgaattcgacgacatcgtgatgacacagacccctgccatcatgagcgcctctccaggccagaaagtgaccatcacatgtagcgccagcagcagcgtgaactacatgcactggtatcagcagaagctgggcagcagccccaagctgtggatctacgataccagcaaactggcccctggcgtgccagccagattttctggttctggcagcggcaccagctacagcctgacaatcagcagcatggaagccgaggatgccgccagctacttctgccatcagtggtctagctacccctacacctttggctccggcaccaagctggaaatcaaactcgagatccagaaccctgatcctgccgtgtaccagctgcgggatagcaagagcagcgacaagagcgtgtgtctgttcaccgacttcgacagccagaccaacgtgtcccagagcaaggactccgacgtgtacatcaccgataagtgcgtgctggacatgcggagcatggacttcaagagcaactccgccgtggcctggtccaacaagtccgatttcgcctgcgccaacgccttcaacaacagcattatccccgaggacacattcttcccaagccccgagagcagctgcggctttaccagcgagagctaccagcagggcgtgctgagcgccaccatcctgtacgagatcctgctgggcaaggccaccctgtacgccgtgctggtgtctgccctggtgctgatggctatggtcaagcggaaggacagccggggacgcgccaagagaagcggatctggcgtgaagcagaccctgaatttcgacctgctgaagctggctggcgacgtggaatccaacccaggccctactagtatggactggatttggcgcatccttttccttgtcggcgctgctaccggcgcgcattccttcgaagaagttcagctccaagagtctggccccgacctggtcaagcctagccaaagcctgagcctgacctgtaccgtgaccggctacagcatcacaagcggctatggatggcactggatcagacagttccccggcaacaaactggaatggatgggctacatccactacagcggcagcaccacctacaatcccagcctgaagtcccggatcagcatcagcagagacaccagcaagaaccagttcttcctgcaactgaacagcgtgaccaccgaggacaccgccacctactattgtgctcggagcctgagatattggggccagggcacaaccctgaccgtgtcatctacgcgtgaggacctgaagaacgtgttcccacctgaggtggccgtgttcgagcctagcgaggccgagatcagccacacccagaaagccaccctcgtgtgcctggctaccggcttctaccccgaccatgtggaactgtcttggtgggtcaacggcaaagaggtgcacagcggcgtgtgtaccgacccccagccactgaaagaacagcccgccctgaacgacagccggtactgcctgagcagcagactgagagtgtccgccaccttctggcagaacccccggaaccacttcagatgccaggtgcagttctacggcctgagcgagaacgacgagtggacccaggacagagccaagcccgtgacccagatcgtgtctgccgaagcctggggcagagccgattgcgacgtgaagctggtggaaaagagcttcgagacagacaccaacctgaacttccagaacctgagcgtgatcggcttcagaatcctgctgctgaaagtggccggctttaacctgctgatgaccctgcggctgtggtccagc

SEQ ID NO: 4530 - DNA, 2265 bp, synthetic construct
  source 1..2265: mol_type = other DNA
atggccttaccagtgaccgccttgctcctgccgctggccttgctgctccacgccgccaggccggaagtgcagctggttgaatctggcggaggactggttcagcctggcggatctctgagactgtcttgtgccgccagcggcttcagcttcagcgacttttggatgagctgggtccgacaggcccctggcaaaggacttgaatgggtcgccacaatcagccaggccggcagcgagaaggactacgtggactctgtgaagggcagattcaccatcagccgggacaacgccaagaagtccctgtacctccagatgaacagcctgagagccgaggacaccgccgtgtactattgtgcctctggcgtgtacagcttcgactacagaggccagggcaccctggtcacagtctcttctggtaccggcggaggcggatctggcggcggaggtagcggtggcggaggatctgaattcgacgacatccagatgacacagagccctagcagcctgtctgccagcgtgggagacagagtgaccatcacctgtagcgccaccagcagcatcagctacatgcactggtatcagcagaagcccggcaaggcccctaaaggctggatctacgataccagcaaactggcccacggcgtgcccagcagattttctggttctggcagcggcaccgacttcaccctgacaatatctagcctccagcctgaggacttcgccacctactactgccaccagagaagaagctaccccttcaccttcggccagggcaccaaggtggaaatcaaactcgagatccagaaccctgatcctgccgtgtaccagctgcgggatagcaagagcagcgacaagagcgtgtgtctgttcaccgacttcgacagccagaccaacgtgtcccagagcaaggactccgacgtgtacatcaccgataagtgcgtgctggacatgcggagcatggacttcaagagcaactccgccgtggcctggtccaacaagtccgatttcgcctgcgccaacgccttcaacaacagcattatccccgaggacacattcttcccaagccccgagagcagctgcggctttaccagcgagagctaccagcagggcgtgctgagcgccaccatcctgtacgagatcctgctgggcaaggccaccctgtacgccgtgctggtgtctgccctggtgctgatggctatggtcaagcggaaggacagccggggacgcgccaagagaagcggatctggcgtgaagcagaccctgaatttcgacctgctgaagctggctggcgacgtggaatccaacccaggccctactagtatggactggatttggcgcatccttttccttgtcggcgctgctaccggcgcgcattccttcgaagaagtgcaactggttcagagcggagccgaagtgaagaaacctggggcctctgtgaaggtgtcctgcaaggcttccggctacacctttaccaatttctggattcactgggtccgacaggctccaggccaaggactggaatggatcggagagatcgaccccagcgacagctacaccaactacaaccagaaattcaaaggccgggtcaccatcaccagagacaccagcacaagcaccgcctacctggaactgagcagcctgagaagcgaggacaccgccgtgtactactgcgccagggaaatcaccaccgtggattattggggccagggaaccctggtcaccgtgtcatctacgcgtgaggacctgaagaacgtgttcccacctgaggtggccgtgttcgagcctagcgaggccgagatcagccacacccagaaagccaccctcgtgtgcctggctaccggcttctaccccgaccatgtggaactgtcttggtgggtcaacggcaaagaggtgcacagcggcgtgtgtaccgacccccagccactgaaagaacagcccgccctgaacgacagccggtactgcctgagcagcagactgagagtgtccgccaccttctggcagaacccccggaaccacttcagatgccaggtgcagttctacggcctgagcgagaacgacgagtggacccaggacagagccaagcccgtgacccagatcgtgtctgccgaagcctggggcagagccgattgcgacgtgaagctggtggaaaagagcttcgagacagacaccaacctgaacttccagaacctgagcgtgatcggcttcagaatcctgctgctgaaagtggccggctttaacctgctgatgaccctgcggctgtggtccagc

SEQ ID NO: 4531 - DNA, 2286 bp, synthetic construct
  source 1..2286: mol_type = other DNA
atggccttaccagtgaccgccttgctcctgccgctggccttgctgctccacgccgccaggccggaagtgcagctggttgaatctggcggaggactggttcagcctggcggatctctgagactgtcttgtgccgccagcggcttcagcttcagcgacttttggatgagctgggtccgacaggcccctggcaaaggacttgaatgggtcgccacaatcagccaggccggcagcgagaaggactacgtggactctgtgaagggcagattcaccatcagccgggacaacgccaagaagtccctgtacctccagatgaacagcctgagagccgaggacaccgccgtgtactattgtgcctctggcgtgtacagcttcgactacagaggccagggcaccctggtcacagtctcttctggtaccggcggaggcggatctggcggcggaggtagcggtggcggaggatctgaattcgacgacatccagatgacacagagccctagcagcctgtctgccagcgtgggagacagagtgaccatcacatgcaaggccagccagggcttcaacaaatacgtggcctggtatcagcagaagcccggcaaggctcctaagctgctgatctactacaccagcacactccagcctggcgtgcccagcagattttctggctctggcagcggcagagactacaccctgacaatatccagcctccagccagaggacttcgccacctactactgtctccagtacggcaacctgctgtacgcctttggacagggcaccaaggtggaaatcaagagactcgagatccagaaccctgatcctgccgtgtaccagctgcgggatagcaagagcagcgacaagagcgtgtgtctgttcaccgacttcgacagccagaccaacgtgtcccagagcaaggactccgacgtgtacatcaccgataagtgcgtgctggacatgcggagcatggacttcaagagcaactccgccgtggcctggtccaacaagtccgatttcgcctgcgccaacgccttcaacaacagcattatccccgaggacacattcttcccaagccccgagagcagctgcggctttaccagcgagagctaccagcagggcgtgctgagcgccaccatcctgtacgagatcctgctgggcaaggccaccctgtacgccgtgctggtgtctgccctggtgctgatggctatggtcaagcggaaggacagccggggacgcgccaagagaagcggatctggcgtgaagcagaccctgaatttcgacctgctgaagctggctggcgacgtggaatccaacccaggccctactagtatggactggatttggcgcatccttttccttgtcggcgctgctaccggcgcgcattccttcgaagaagttcagcttgtgcagagcggagccgaagtgaagaaacctggggcctctgtgaaggtgtcctgcaaagccagcggctacacctttaccagctactggatcggctgggtccgacaggctcctggacaaggactggaatggatcggcgacatctatcccggcggaggctacaccaactacaacgagaagttcaagggccgcgtgacaatcaccagagacacctctacaagcaccgcctacctggaactgagcagcctgagaagcgaggacaccgccgtgtactactgcgccagactggatggcagcagctacagaggcgctatggattcttggggccagggcacactggtcaccgtttcttctacgcgtgaggacctgaagaacgtgttcccacctgaggtggccgtgttcgagcctagcgaggccgagatcagccacacccagaaagccaccctcgtgtgcctggctaccggcttctaccccgaccatgtggaactgtcttggtgggtcaacggcaaagaggtgcacagcggcgtgtgtaccgacccccagccactgaaagaacagcccgccctgaacgacagccggtactgcctgagcagcagactgagagtgtccgccaccttctggcagaacccccggaaccacttcagatgccaggtgcagttctacggcctgagcgagaacgacgagtggacccaggacagagccaagcccgtgacccagatcgtgtctgccgaagcctggggcagagccgattgcgacgtgaagctggtggaaaagagcttcgagacagacaccaacctgaacttccagaacctgagcgtgatcggcttcagaatcctgctgctgaaagtggccggctttaacctgctgatgaccctgcggctgtggtccagc

SEQ ID NO: 4532 - DNA, 2274 bp, synthetic construct
  source 1..2274: mol_type = other DNA
atggccttaccagtgaccgccttgctcctgccgctggccttgctgctccacgccgccaggccggaagtgcagctggttgaatctggcggaggactggttcagcctggcggatctctgagactgtcttgtgccgccagcggcttcagcttcagcgacttttggatgagctgggtccgacaggcccctggcaaaggacttgaatgggtcgccacaatcagccaggccggcagcgagaaggactacgtggactctgtgaagggcagattcaccatcagccgggacaacgccaagaagtccctgtacctccagatgaacagcctgagagccgaggacaccgccgtgtactattgtgcctctggcgtgtacagcttcgactacagaggccagggcaccctggtcacagtctcttctggtaccggcggaggcggatctggcggcggaggtagcggtggcggaggatctgaattcgacgacatccagatgacacagagccctagcagcctgtctgccagcgtgggagacagagtgaccatcacctgtagagccagccaggacatccggtactacctgaactggtatcagcagaagcccggcaaggcccctaagctgctgatctatgtggcctccagcctccagagcggagtgccttctagattttctggcagcggctccggcaccgagtttaccctgacagtgtctagcttgcagcccgaggacttcgccacctactactgcctgcaagtgtacagcacccctcggacctttggacagggcaccaaggtggaaatcaaactcgagatccagaaccctgatcctgccgtgtaccagctgcgggatagcaagagcagcgacaagagcgtgtgtctgttcaccgacttcgacagccagaccaacgtgtcccagagcaaggactccgacgtgtacatcaccgataagtgcgtgctggacatgcggagcatggacttcaagagcaactccgccgtggcctggtccaacaagtccgatttcgcctgcgccaacgccttcaacaacagcattatccccgaggacacattcttcccaagccccgagagcagctgcggctttaccagcgagagctaccagcagggcgtgctgagcgccaccatcctgtacgagatcctgctgggcaaggccaccctgtacgccgtgctggtgtctgccctggtgctgatggctatggtcaagcggaaggacagccggggacgcgccaagagaagcggatctggcgtgaagcagaccctgaatttcgacctgctgaagctggctggcgacgtggaatccaacccaggccctactagtatggactggatttggcgcatccttttccttgtcggcgctgctaccggcgcgcattccttcgaagaagtgcagcttgttgaatctggcggcggactggctaagcctggcggatctctgagactgtcttgtgccgccagcggcttccggttcaccttcaacaactactacatggactgggtccgacaggcccctggacaaggacttgaatgggtgtccagaatcagcagcagcggcgaccctacttggtacgccgattctgtgaagggcagattcaccatcagcagagagaacgccaagaacaccctgttcctccagatgaactccctgagagccgaggacaccgccgtgtactattgtgcctctctgaccaccggcagcgattcttggggacagggcgtgctggttaccgtgtcatctacgcgtgaggacctgaagaacgtgttcccacctgaggtggccgtgttcgagcctagcgaggccgagatcagccacacccagaaagccaccctcgtgtgcctggctaccggcttctaccccgaccatgtggaactgtcttggtgggtcaacggcaaagaggtgcacagcggcgtgtgtaccgacccccagccactgaaagaacagcccgccctgaacgacagccggtactgcctgagcagcagactgagagtgtccgccaccttctggcagaacccccggaaccacttcagatgccaggtgcagttctacggcctgagcgagaacgacgagtggacccaggacagagccaagcccgtgacccagatcgtgtctgccgaagcctggggcagagccgattgcgacgtgaagctggtggaaaagagcttcgagacagacaccaacctgaacttccagaacctgagcgtgatcggcttcagaatcctgctgctgaaagtggccggctttaacctgctgatgaccctgcggctgtggtccagc

SEQ ID NO: 4533 - DNA, 2274 bp, synthetic construct
  source 1..2274: mol_type = other DNA
atggccttaccagtgaccgccttgctcctgccgctggccttgctgctccacgccgccaggccggaagtgcagctggttgaatctggcggaggactggttcagcctggcggatctctgagactgtcttgtgccgccagcggcttcagcttcagcgacttttggatgagctgggtccgacaggcccctggcaaaggacttgaatgggtcgccacaatcagccaggccggcagcgagaaggactacgtggactctgtgaagggcagattcaccatcagccgggacaacgccaagaagtccctgtacctccagatgaacagcctgagagccgaggacaccgccgtgtactattgtgcctctggcgtgtacagcttcgactacagaggccagggcaccctggtcacagtctcttctggtaccggcggaggcggatctggcggcggaggtagcggtggcggaggatctgaattcgagatcgtgatgacacagagccccgccacactgagtgtgtctccaggcgaaagagccacactgtcctgtagagccagccagagcgtgtccagaaacctggcctggtatcagcagaagcctggacaggctccccggctgttgatctacggcgcttctacaagagccaccggcattcccgccagattttctggctctggcagcggcaccgagttcaccctgacaatcggaagcctccagagcgaggacttcgccgtgtactactgccagcagtacaagacctggcctcggacctttggacagggcaccaacgtggaaatcaaactcgagatccagaaccctgatcctgccgtgtaccagctgcgggatagcaagagcagcgacaagagcgtgtgtctgttcaccgacttcgacagccagaccaacgtgtcccagagcaaggactccgacgtgtacatcaccgataagtgcgtgctggacatgcggagcatggacttcaagagcaactccgccgtggcctggtccaacaagtccgatttcgcctgcgccaacgccttcaacaacagcattatccccgaggacacattcttcccaagccccgagagcagctgcggctttaccagcgagagctaccagcagggcgtgctgagcgccaccatcctgtacgagatcctgctgggcaaggccaccctgtacgccgtgctggtgtctgccctggtgctgatggctatggtcaagcggaaggacagccggggacgcgccaagagaagcggatctggcgtgaagcagaccctgaatttcgacctgctgaagctggctggcgacgtggaatccaacccaggccctactagtatggactggatttggcgcatccttttccttgtcggcgctgctaccggcgcgcattccttcgaacaagttcagctgcaacaatggggagccggcctgctgaagcctagcgaaacactgtctctgacctgcgccgtgttcggcggctctttcagcggctactactggtcctggatcagacagcctcctggcaaaggactggaatggatcggcgagatcaaccaccggggcaacaccaacgacaaccccagcctgaaaagcagagtgaccatcagcgtggacaccagcaagaaccagttcgccctgaagctgagcagcgtgacagccgctgataccgccgtgtattattgcgccagagagcggggctacacctacggcaatttcgatcactggggccagggcaccctggtcacagtttcttctacgcgtgaggacctgaagaacgtgttcccacctgaggtggccgtgttcgagcctagcgaggccgagatcagccacacccagaaagccaccctcgtgtgcctggctaccggcttctaccccgaccatgtggaactgtcttggtgggtcaacggcaaagaggtgcacagcggcgtgtgtaccgacccccagccactgaaagaacagcccgccctgaacgacagccggtactgcctgagcagcagactgagagtgtccgccaccttctggcagaacccccggaaccacttcagatgccaggtgcagttctacggcctgagcgagaacgacgagtggacccaggacagagccaagcccgtgacccagatcgtgtctgccgaagcctggggcagagccgattgcgacgtgaagctggtggaaaagagcttcgagacagacaccaacctgaacttccagaacctgagcgtgatcggcttcagaatcctgctgctgaaagtggccggctttaacctgctgatgaccctgcggctgtggtccagc

SEQ ID NO: 4534 - DNA, 2277 bp, synthetic construct
  source 1..2277: mol_type = other DNA
atggccttaccagtgaccgccttgctcctgccgctggccttgctgctccacgccgccaggccggaagtgcagctggttgaatctggcggaggactggttcagcctggcggatctctgagactgtcttgtgccgccagcggcttcagcttcagcgacttttggatgagctgggtccgacaggcccctggcaaaggacttgaatgggtcgccacaatcagccaggccggcagcgagaaggactacgtggactctgtgaagggcagattcaccatcagccgggacaacgccaagaagtccctgtacctccagatgaacagcctgagagccgaggacaccgccgtgtactattgtgcctctggcgtgtacagcttcgactacagaggccagggcaccctggtcacagtctcttctggtaccggcggaggcggatctggcggcggaggtagcggtggcggaggatctgaattcgagatcgtgatgacccctagcagcgccacactgagtgtgtctccaggcgaaagagccacactgtcctgtagagccagccagagcgtgtccagaaacctggcctggtatcagcagaagcctggacaggctccccggctgttgatctacggcgcttctacaagagccaccggcattcccgccagattttctggctctggcagcggcaccgagttcaccctgacaatctctagcctccagagcgaggacttcgccgtgtactactgccaccagtacagcaactggatgtgcagcttcggccagggcaccaagctggaaatcaaactcgagatccagaaccctgatcctgccgtgtaccagctgcgggatagcaagagcagcgacaagagcgtgtgtctgttcaccgacttcgacagccagaccaacgtgtcccagagcaaggactccgacgtgtacatcaccgataagtgcgtgctggacatgcggagcatggacttcaagagcaactccgccgtggcctggtccaacaagtccgatttcgcctgcgccaacgccttcaacaacagcattatccccgaggacacattcttcccaagccccgagagcagctgcggctttaccagcgagagctaccagcagggcgtgctgagcgccaccatcctgtacgagatcctgctgggcaaggccaccctgtacgccgtgctggtgtctgccctggtgctgatggctatggtcaagcggaaggacagccggggacgcgccaagagaagcggatctggcgtgaagcagaccctgaatttcgacctgctgaagctggctggcgacgtggaatccaacccaggccctactagtatggactggatttggcgcatccttttccttgtcggcgctgctaccggcgcgcattccttcgaagaagttcagctccttgagtcaggtggcggcctggttcaacctggcggatctctgagactgagctgtgccgccagcggcttcacctttagcagatacgccatgaactgggtccgacaggcccctggcaaaggactggaatgggtgtccggcatctctggaagcggcggcagaacctactacgccgattctgtgaagggcagattcaccatcagccgggacaacagcaagaacaccctgtacctccagatgaacagcctgagagccgaggacacagccgtgtattattgcgccaaggaccgggacttttggagcggcccttttgactattggggccagggaaccctggtcaccgttagctctacgcgtgaggacctgaagaacgtgttcccacctgaggtggccgtgttcgagcctagcgaggccgagatcagccacacccagaaagccaccctcgtgtgcctggctaccggcttctaccccgaccatgtggaactgtcttggtgggtcaacggcaaagaggtgcacagcggcgtgtgtaccgacccccagccactgaaagaacagcccgccctgaacgacagccggtactgcctgagcagcagactgagagtgtccgccaccttctggcagaacccccggaaccacttcagatgccaggtgcagttctacggcctgagcgagaacgacgagtggacccaggacagagccaagcccgtgacccagatcgtgtctgccgaagcctggggcagagccgattgcgacgtgaagctggtggaaaagagcttcgagacagacaccaacctgaacttccagaacctgagcgtgatcggcttcagaatcctgctgctgaaagtggccggctttaacctgctgatgaccctgcggctgtggtccagc

SEQ ID NO: 4535 - DNA, 2292 bp, synthetic construct
  source 1..2292: mol_type = other DNA
atggccttaccagtgaccgccttgctcctgccgctggccttgctgctccacgccgccaggccggaagtgcagctggttgaatctggcggaggactggttcagcctggcggatctctgagactgtcttgtgccgccagcggcttcagcttcagcgacttttggatgagctgggtccgacaggcccctggcaaaggacttgaatgggtcgccacaatcagccaggccggcagcgagaaggactacgtggactctgtgaagggcagattcaccatcagccgggacaacgccaagaagtccctgtacctccagatgaacagcctgagagccgaggacaccgccgtgtactattgtgcctctggcgtgtacagcttcgactacagaggccagggcaccctggtcacagtctcttctggtaccggcggaggcggatctggcggcggaggtagcggtggcggaggatctgaattcgacatccagatgacccagagccccagcagcctgtctgccagcgtgggcgacagagtgaccatcacatgcaaggccagcaagaacatcagaagctacctggcctggtatcagcagaagcccggcaaggcccccaagctgctgatctacagcggcagcacactgcacagcggcgtgcccagcagattttccggctctggcagcggcaccgacttcaccctgaccatctctagcctccagcccgaggacttcgccacctactactgccagcagcaccacgagtaccccctgacattcggccagggcaccaaggtggaaatcaagagactcgagatccagaaccctgatcctgccgtgtaccagctgcgggatagcaagagcagcgacaagagcgtgtgtctgttcaccgacttcgacagccagaccaacgtgtcccagagcaaggactccgacgtgtacatcaccgataagtgcgtgctggacatgcggagcatggacttcaagagcaactccgccgtggcctggtccaacaagtccgatttcgcctgcgccaacgccttcaacaacagcattatccccgaggacacattcttcccaagccccgagagcagctgcggctttaccagcgagagctaccagcagggcgtgctgagcgccaccatcctgtacgagatcctgctgggcaaggccaccctgtacgccgtgctggtgtctgccctggtgctgatggctatggtcaagcggaaggacagccggggacgcgccaagagaagcggatctggcgtgaagcagaccctgaatttcgacctgctgaagctggctggcgacgtggaatccaacccaggccctactagtatggactggatttggcgcatccttttccttgtcggcgctgctaccggcgcgcattccttcgaacaggtgcaactccaggaatctggccccggactcgtgaagcccagcgagacactgagcctgacctgtaccgtgtccggctacaccatcaccagcggctacgactggtcctggatcagacagcctcctggcaagggcctggaatggatcggctacatcaactacggcggctccaccaactacaagcccagcctgggaagccgcgtgacaatcagcgtggacacctccaagaaccagttcagcctgaagctgagcagcgtgacagccgccgataccgccgtgtactactgcgcccggtacaacgagtacaagagctacatctacgattggtacttcgacttctggggccagggaaccctcgtgaccgtgtctagtacgcgtgaggacctgaagaacgtgttcccacctgaggtggccgtgttcgagcctagcgaggccgagatcagccacacccagaaagccaccctcgtgtgcctggctaccggcttctaccccgaccatgtggaactgtcttggtgggtcaacggcaaagaggtgcacagcggcgtgtgtaccgacccccagccactgaaagaacagcccgccctgaacgacagccggtactgcctgagcagcagactgagagtgtccgccaccttctggcagaacccccggaaccacttcagatgccaggtgcagttctacggcctgagcgagaacgacgagtggacccaggacagagccaagcccgtgacccagatcgtgtctgccgaagcctggggcagagccgattgcgacgtgaagctggtggaaaagagcttcgagacagacaccaacctgaacttccagaacctgagcgtgatcggcttcagaatcctgctgctgaaagtggccggctttaacctgctgatgaccctgcggctgtggtccagc

SEQ ID NO: 4536 - DNA, 2298 bp, synthetic construct
  source 1..2298: mol_type = other DNA
atggccttaccagtgaccgccttgctcctgccgctggccttgctgctccacgccgccaggccggaagtgcagctggttgaatctggcggaggactggttcagcctggcggatctctgagactgtcttgtgccgccagcggcttcagcttcagcgacttttggatgagctgggtccgacaggcccctggcaaaggacttgaatgggtcgccacaatcagccaggccggcagcgagaaggactacgtggactctgtgaagggcagattcaccatcagccgggacaacgccaagaagtccctgtacctccagatgaacagcctgagagccgaggacaccgccgtgtactattgtgcctctggcgtgtacagcttcgactacagaggccagggcaccctggtcacagtctcttctggtaccggcggaggcggatctggcggcggaggtagcggtggcggaggatctgaattccagtctgtggtcacacagcctccatccgtgtctgctgcccctggacagaaagtgaccatctcctgtagcggcagcagcagcaacatcggcaacaactacgtgtcctggtatcagcagctccccggcacagctcccaaactgctgatctacgacaacaacaagcggcccagcggcatccccgatagattttctggcagcaagagcggcaccagcgccacactgggaattaccggacttcagacaggcgacgaggccgactactactgtggcacatgggatggcagcctgtacaccatgcttttcggcggaggcaccaagctgacagtgcttctcgagatccagaaccctgatcctgccgtgtaccagctgcgggatagcaagagcagcgacaagagcgtgtgtctgttcaccgacttcgacagccagaccaacgtgtcccagagcaaggactccgacgtgtacatcaccgataagtgcgtgctggacatgcggagcatggacttcaagagcaactccgccgtggcctggtccaacaagtccgatttcgcctgcgccaacgccttcaacaacagcattatccccgaggacacattcttcccaagccccgagagcagctgcggctttaccagcgagagctaccagcagggcgtgctgagcgccaccatcctgtacgagatcctgctgggcaaggccaccctgtacgccgtgctggtgtctgccctggtgctgatggctatggtcaagcggaaggacagccggggacgcgccaagagaagcggatctggcgtgaagcagaccctgaatttcgacctgctgaagctggctggcgacgtggaatccaacccaggccctactagtatggactggatttggcgcatccttttccttgtcggcgctgctaccggcgcgcattccttcgaagaagtgcaactggtggaatctggcggcggactggttaagcctggcggatctctgagactgtcttgtgccgccagcggcttcaccttcagcaatgcctggatgagctgggttcgacaggcccctggaaaaggactggaatgggtcggattcatccggtccaaagcctacggcggcaccacagaatatgccgcctctgtgaagggcagattcaccatcagccgggacgacagcaagtctatcgcctacctccagatgaacaacctgaaaaccgaggacaccgccgtgtactactgcgccagagatggcctgtacagcagctcttggtacgacagcgattactggggccagggcacactggtcacagtgtcatctacgcgtgaggacctgaagaacgtgttcccacctgaggtggccgtgttcgagcctagcgaggccgagatcagccacacccagaaagccaccctcgtgtgcctggctaccggcttctaccccgaccatgtggaactgtcttggtgggtcaacggcaaagaggtgcacagcggcgtgtgtaccgacccccagccactgaaagaacagcccgccctgaacgacagccggtactgcctgagcagcagactgagagtgtccgccaccttctggcagaacccccggaaccacttcagatgccaggtgcagttctacggcctgagcgagaacgacgagtggacccaggacagagccaagcccgtgacccagatcgtgtctgccgaagcctggggcagagccgattgcgacgtgaagctggtggaaaagagcttcgagacagacaccaacctgaacttccagaacctgagcgtgatcggcttcagaatcctgctgctgaaagtggccggctttaacctgctgatgaccctgcggctgtggtccagc

SEQ ID NO: 4537 - DNA, 2313 bp, synthetic construct
  source 1..2313: mol_type = other DNA
atggccttaccagtgaccgccttgctcctgccgctggccttgctgctccacgccgccaggccggaagtgcagctggttgaatctggcggaggactggttcagcctggcggatctctgagactgtcttgtgccgccagcggcttcagcttcagcgacttttggatgagctgggtccgacaggcccctggcaaaggacttgaatgggtcgccacaatcagccaggccggcagcgagaaggactacgtggactctgtgaagggcagattcaccatcagccgggacaacgccaagaagtccctgtacctccagatgaacagcctgagagccgaggacaccgccgtgtactattgtgcctctggcgtgtacagcttcgactacagaggccagggcaccctggtcacagtctcttctggtaccggcggaggcggatctggcggcggaggtagcggtggcggaggatctgaattccagtctgtgctgacacagcctcctagtgtgtctggcgctcctggacagagagtgaccatctcttgtaccggcagcagcagcaatatcggagccggctatgacgtgcactggtatcagcagctccctggcacagcccctaaactgctgatcttcggcaacagcaacagacccagcggcgtgcccgatagattcagcggctttaagagcggcacaagcgccagcctggctatcactggactgcaagccgaggacgaggccgactacttctgccagagctacgatagcagcctgagcggcagcggagtgtttggcacaggcaccaaagtgacagtgcttggcctcgagatccagaaccctgatcctgccgtgtaccagctgcgggatagcaagagcagcgacaagagcgtgtgtctgttcaccgacttcgacagccagaccaacgtgtcccagagcaaggactccgacgtgtacatcaccgataagtgcgtgctggacatgcggagcatggacttcaagagcaactccgccgtggcctggtccaacaagtccgatttcgcctgcgccaacgccttcaacaacagcattatccccgaggacacattcttcccaagccccgagagcagctgcggctttaccagcgagagctaccagcagggcgtgctgagcgccaccatcctgtacgagatcctgctgggcaaggccaccctgtacgccgtgctggtgtctgccctggtgctgatggctatggtcaagcggaaggacagccggggacgcgccaagagaagcggatctggcgtgaagcagaccctgaatttcgacctgctgaagctggctggcgacgtggaatccaacccaggccctactagtatggactggatttggcgcatccttttccttgtcggcgctgctaccggcgcgcattccttcgaacaaatgcaactggttcaaagcggcggtggcctggtgcaacctggaagaagtctgagactgagctgtgccgccagcggcttcaccttcgatgattacgccatgcactgggtccgacaggcccctggaaaaggactggaatgggtgtccggcatctcctggaatagcggctctatcggctacgccgacagcgtgaagggcagattcaccatcagccgggacaacgccaagaacagcctgtacctccagatgaactccctgagagccgaggatacagccctgtactactgcgccaaggacatccacagcggcagctactacggcctgctgtactacgctatggacgtgtggggccagggcacaaccgtgacagtttcttctacgcgtgaggacctgaagaacgtgttcccacctgaggtggccgtgttcgagcctagcgaggccgagatcagccacacccagaaagccaccctcgtgtgcctggctaccggcttctaccccgaccatgtggaactgtcttggtgggtcaacggcaaagaggtgcacagcggcgtgtgtaccgacccccagccactgaaagaacagcccgccctgaacgacagccggtactgcctgagcagcagactgagagtgtccgccaccttctggcagaacccccggaaccacttcagatgccaggtgcagttctacggcctgagcgagaacgacgagtggacccaggacagagccaagcccgtgacccagatcgtgtctgccgaagcctggggcagagccgattgcgacgtgaagctggtggaaaagagcttcgagacagacaccaacctgaacttccagaacctgagcgtgatcggcttcagaatcctgctgctgaaagtggccggctttaacctgctgatgaccctgcggctgtggtccagc

SEQ ID NO: 4538 - DNA, 2313 bp, synthetic construct
  source 1..2313: mol_type = other DNA
atggccttaccagtgaccgccttgctcctgccgctggccttgctgctccacgccgccaggccggaagtgcagctggttgaatctggcggaggactggttcagcctggcggatctctgagactgtcttgtgccgccagcggcttcagcttcagcgacttttggatgagctgggtccgacaggcccctggcaaaggacttgaatgggtcgccacaatcagccaggccggcagcgagaaggactacgtggactctgtgaagggcagattcaccatcagccgggacaacgccaagaagtccctgtacctccagatgaacagcctgagagccgaggacaccgccgtgtactattgtgcctctggcgtgtacagcttcgactacagaggccagggcaccctggtcacagtctcttctggtaccggcggaggcggatctggcggcggaggtagcggtggcggaggatctgaattcctgcctgttctgacacagcctccatctgcctctggcacacctggacagagagtgaccatcagctgtagcggcagaagcagcaacatcggcagcaacagcgtgaactggtacagacagcttcctggcgctgcccctaagctgctgatctacagcaacaaccagcggcctcctggcgtgccagtcagattttctggcagcaagagcggcacaagcgccagcctggctatttctggactccagtctgaggacgaggccacctactactgtgccacctgggacgacaacctgaacgtgcactacgtgttcggcaccggcaccaaagtgacagtgcttggaagtagactcgagatccagaaccctgatcctgccgtgtaccagctgcgggatagcaagagcagcgacaagagcgtgtgtctgttcaccgacttcgacagccagaccaacgtgtcccagagcaaggactccgacgtgtacatcaccgataagtgcgtgctggacatgcggagcatggacttcaagagcaactccgccgtggcctggtccaacaagtccgatttcgcctgcgccaacgccttcaacaacagcattatccccgaggacacattcttcccaagccccgagagcagctgcggctttaccagcgagagctaccagcagggcgtgctgagcgccaccatcctgtacgagatcctgctgggcaaggccaccctgtacgccgtgctggtgtctgccctggtgctgatggctatggtcaagcggaaggacagccggggacgcgccaagagaagcggatctggcgtgaagcagaccctgaatttcgacctgctgaagctggctggcgacgtggaatccaacccaggccctactagtatggactggatttggcgcatccttttccttgtcggcgctgctaccggcgcgcattccttcgaacttgaaatggctcaggtgcagctggtgcagagcggagccgaagtgaagaaacctggcagcagcgtgaaggtgtcctgcaaagcttctggcggcaccttcagcagctacgccatctcttgggttcgacaggcccctggacaaggactggaatggatgggcagaatcatccccatcctgggaatcgccaactacgcccagaaattccagggcagagtgacaatcaccgccgacaagagcaccagcaccgcctacatggaactgagcagcctgagaagcgaggacaccgccgtgtactattgtgcaagaggcggctactacagccacgacatgtggagcgaagattggggccagggcacactggtcacagtgtcatctacgcgtgaggacctgaagaacgtgttcccacctgaggtggccgtgttcgagcctagcgaggccgagatcagccacacccagaaagccaccctcgtgtgcctggctaccggcttctaccccgaccatgtggaactgtcttggtgggtcaacggcaaagaggtgcacagcggcgtgtgtaccgacccccagccactgaaagaacagcccgccctgaacgacagccggtactgcctgagcagcagactgagagtgtccgccaccttctggcagaacccccggaaccacttcagatgccaggtgcagttctacggcctgagcgagaacgacgagtggacccaggacagagccaagcccgtgacccagatcgtgtctgccgaagcctggggcagagccgattgcgacgtgaagctggtggaaaagagcttcgagacagacaccaacctgaacttccagaacctgagcgtgatcggcttcagaatcctgctgctgaaagtggccggctttaacctgctgatgaccctgcggctgtggtccagc

SEQ ID NO: 4539 - DNA, 2295 bp, synthetic construct
  source 1..2295: mol_type = other DNA
atggccttaccagtgaccgccttgctcctgccgctggccttgctgctccacgccgccaggccggaagtgcagctggttgaatctggcggaggactggttcagcctggcggatctctgagactgtcttgtgccgccagcggcttcagcttcagcgacttttggatgagctgggtccgacaggcccctggcaaaggacttgaatgggtcgccacaatcagccaggccggcagcgagaaggactacgtggactctgtgaagggcagattcaccatcagccgggacaacgccaagaagtccctgtacctccagatgaacagcctgagagccgaggacaccgccgtgtactattgtgcctctggcgtgtacagcttcgactacagaggccagggcaccctggtcacagtctcttctggtaccggcggaggcggatctggcggcggaggtagcggtggcggaggatctgaattcgacttcgtgatgacacagagccctgatagcctggccgtgtctctcggcgagcgagtgaccatgagctgcaagtctagccagagcctgctgaacagcggcaaccagaagaactacctgacctggtatcagcagaagcccggccagcctcctaagctgctgatctactgggccagcaccagagaaagcggcgtgcccgatagattttctggctctggcagcggcaccgacttcaccctgacaatttctagcctgcaagccgaggacgtggccgtgtactactgccagaacgactacagctacccctacaccttcggccagggcaccaagctggaaatcaaactcgagatccagaaccctgatcctgccgtgtaccagctgcgggatagcaagagcagcgacaagagcgtgtgtctgttcaccgacttcgacagccagaccaacgtgtcccagagcaaggactccgacgtgtacatcaccgataagtgcgtgctggacatgcggagcatggacttcaagagcaactccgccgtggcctggtccaacaagtccgatttcgcctgcgccaacgccttcaacaacagcattatccccgaggacacattcttcccaagccccgagagcagctgcggctttaccagcgagagctaccagcagggcgtgctgagcgccaccatcctgtacgagatcctgctgggcaaggccaccctgtacgccgtgctggtgtctgccctggtgctgatggctatggtcaagcggaaggacagccggggacgcgccaagagaagcggatctggcgtgaagcagaccctgaatttcgacctgctgaagctggctggcgacgtggaatccaacccaggccctactagtatggactggatttggcgcatccttttccttgtcggcgctgctaccggcgcgcattccttcgaagaagtgcaactggttcagagcggagccgagctgaagaaacctggggccagcgtgaaggtgtcctgtaaagccagcggctacacctttaccgactactacatgaaatgggtccgacaggccccaggccagggactcgaatggatcggcgatattatccccagcaacggggccaccttctacaaccagaaattcaagggccgcgtgaccatcaccgtggacaagagcacaagcaccgcctacatggaactgagcagcctgagaagcgaggacaccgccgtgtattattgcgccagaagccatctgctgcgggccagttggttcgcctattggggacagggaaccctggtcaccgttagctctacgcgtgaggacctgaagaacgtgttcccacctgaggtggccgtgttcgagcctagcgaggccgagatcagccacacccagaaagccaccctcgtgtgcctggctaccggcttctaccccgaccatgtggaactgtcttggtgggtcaacggcaaagaggtgcacagcggcgtgtgtaccgacccccagccactgaaagaacagcccgccctgaacgacagccggtactgcctgagcagcagactgagagtgtccgccaccttctggcagaacccccggaaccacttcagatgccaggtgcagttctacggcctgagcgagaacgacgagtggacccaggacagagccaagcccgtgacccagatcgtgtctgccgaagcctggggcagagccgattgcgacgtgaagctggtggaaaagagcttcgagacagacaccaacctgaacttccagaacctgagcgtgatcggcttcagaatcctgctgctgaaagtggccggctttaacctgctgatgaccctgcggctgtggtccagc

SEQ ID NO: 4540 - DNA, 2295 bp, synthetic construct
  source 1..2295: mol_type = other DNA
atggccttaccagtgaccgccttgctcctgccgctggccttgctgctccacgccgccaggccggaagtgcagctggttgaatctggcggaggactggttcagcctggcggatctctgagactgtcttgtgccgccagcggcttcagcttcagcgacttttggatgagctgggtccgacaggcccctggcaaaggacttgaatgggtcgccacaatcagccaggccggcagcgagaaggactacgtggactctgtgaagggcagattcaccatcagccgggacaacgccaagaagtccctgtacctccagatgaacagcctgagagccgaggacaccgccgtgtactattgtgcctctggcgtgtacagcttcgactacagaggccagggcaccctggtcacagtctcttctggtaccggcggaggcggatctggcggcggaggtagcggtggcggaggatctgaattcgacttcgtgatgacacagagccctgatagcctggccgtgtctctcggcgagcgagtgaccatgagctgcaagtctagccagagcctgctgaacagcggcaaccagaagaactacctgacctggtatcagcagaagcccggccagcctcctaagctgctgatctactgggccagcaccagagaaagcggcgtgcccgatagattttctggctctggcagcggcaccgacttcaccctgacaatttctagcctgcaagccgaggacgtggccgtgtactactgccagaacgactacagctacccctacaccttcggccagggcaccaagctggaaatcaaactcgagatccagaaccctgatcctgccgtgtaccagctgcgggatagcaagagcagcgacaagagcgtgtgtctgttcaccgacttcgacagccagaccaacgtgtcccagagcaaggactccgacgtgtacatcaccgataagtgcgtgctggacatgcggagcatggacttcaagagcaactccgccgtggcctggtccaacaagtccgatttcgcctgcgccaacgccttcaacaacagcattatccccgaggacacattcttcccaagccccgagagcagctgcggctttaccagcgagagctaccagcagggcgtgctgagcgccaccatcctgtacgagatcctgctgggcaaggccaccctgtacgccgtgctggtgtctgccctggtgctgatggctatggtcaagcggaaggacagccggggacgcgccaagagaagcggatctggcgtgaagcagaccctgaatttcgacctgctgaagctggctggcgacgtggaatccaacccaggccctactagtatggactggatttggcgcatccttttccttgtcggcgctgctaccggcgcgcattccttcgaacaagtgcaactggttcagagcggagccgagctgaagaaacctggggccagcgtgaaggtgtcctgtaaagccagcggctacacctttaccgactactacatgaaatgggtccgacaggccccaggccagggactcgaatggatcggcgatattatccccagcaacggggccaccttctacaaccagaaattcaagggccgcgtgaccatcaccgtggacaagagcacaagcaccgcctacatggaactgagcagcctgagaagcgaggacaccgccgtgtattattgcgccagaagccatctgctgcgggccagttggttcgcctattggggacagggaaccctggtcaccgttagctctacgcgtgaggacctgaagaacgtgttcccacctgaggtggccgtgttcgagcctagcgaggccgagatcagccacacccagaaagccaccctcgtgtgcctggctaccggcttctaccccgaccatgtggaactgtcttggtgggtcaacggcaaagaggtgcacagcggcgtgtgtaccgacccccagccactgaaagaacagcccgccctgaacgacagccggtactgcctgagcagcagactgagagtgtccgccaccttctggcagaacccccggaaccacttcagatgccaggtgcagttctacggcctgagcgagaacgacgagtggacccaggacagagccaagcccgtgacccagatcgtgtctgccgaagcctggggcagagccgattgcgacgtgaagctggtggaaaagagcttcgagacagacaccaacctgaacttccagaacctgagcgtgatcggcttcagaatcctgctgctgaaagtggccggctttaacctgctgatgaccctgcggctgtggtccagc

SEQ ID NO: 4541 - DNA, 2265 bp, synthetic construct
  source 1..2265: mol_type = other DNA
atggccttaccagtgaccgccttgctcctgccgctggccttgctgctccacgccgccaggccggaagtgcagctggttgaatctggcggaggactggttcagcctggcggatctctgagactgtcttgtgccgccagcggcttcagcttcagcgacttttggatgagctgggtccgacaggcccctggcaaaggacttgaatgggtcgccacaatcagccaggccggcagcgagaaggactacgtggactctgtgaagggcagattcaccatcagccgggacaacgccaagaagtccctgtacctccagatgaacagcctgagagccgaggacaccgccgtgtactattgtgcctctggcgtgtacagcttcgactacagaggccagggcaccctggtcacagtctcttctggtaccggcggaggcggatctggcggcggaggtagcggtggcggaggatctgaattcgacgtgcagatcacacagagccctagctacctggctgcctctcctggcgagacaatcaccatcaactgtcgggccagcaagagcatcagcaaggacctggcctggtatcaagagaagcccggcaagaccaacaagctgctgatctacagcggcagcacactccagtctggcatccccagcagattttccggctctggcagcggcaccgatttcaccctgaccataagcagcctggaacctgaggacttcgccatgtactactgccagcagcacaacaagtacccctacacctttggcggaggcaccaagctggaaatcaagagactcgagatccagaaccctgatcctgccgtgtaccagctgcgggatagcaagagcagcgacaagagcgtgtgtctgttcaccgacttcgacagccagaccaacgtgtcccagagcaaggactccgacgtgtacatcaccgataagtgcgtgctggacatgcggagcatggacttcaagagcaactccgccgtggcctggtccaacaagtccgatttcgcctgcgccaacgccttcaacaacagcattatccccgaggacacattcttcccaagccccgagagcagctgcggctttaccagcgagagctaccagcagggcgtgctgagcgccaccatcctgtacgagatcctgctgggcaaggccaccctgtacgccgtgctggtgtctgccctggtgctgatggctatggtcaagcggaaggacagccggggacgcgccaagagaagcggatctggcgtgaagcagaccctgaatttcgacctgctgaagctggctggcgacgtggaatccaacccaggccctactagtatggactggatttggcgcatccttttccttgtcggcgctgctaccggcgcgcattccttcgaacaagttcaactgcaacagcctggggccgagcttgttagacctggcgcttctgtgaagctgagctgcaaggccagcggctacaccttcaccagctactggatgaactgggtcaagcagcggcctgaccagggcctcgaatggatcggcagaatcgacccctacgacagcgagacacactacaaccagaagttcaaggacaaggccatcctgaccgtggacaagagcagctccaccgcctacatgcaactgagcagcctgacctctgaggatagcgccgtgtactattgcgccagaggcaactgggacgactattggggccagggcacaaccctgacagtgtctagtacgcgtgaggacctgaagaacgtgttcccacctgaggtggccgtgttcgagcctagcgaggccgagatcagccacacccagaaagccaccctcgtgtgcctggctaccggcttctaccccgaccatgtggaactgtcttggtgggtcaacggcaaagaggtgcacagcggcgtgtgtaccgacccccagccactgaaagaacagcccgccctgaacgacagccggtactgcctgagcagcagactgagagtgtccgccaccttctggcagaacccccggaaccacttcagatgccaggtgcagttctacggcctgagcgagaacgacgagtggacccaggacagagccaagcccgtgacccagatcgtgtctgccgaagcctggggcagagccgattgcgacgtgaagctggtggaaaagagcttcgagacagacaccaacctgaacttccagaacctgagcgtgatcggcttcagaatcctgctgctgaaagtggccggctttaacctgctgatgaccctgcggctgtggtccagc

SEQ ID NO: 4542 - DNA, 2271 bp, synthetic construct
  source 1..2271: mol_type = other DNA
atggccttaccagtgaccgccttgctcctgccgctggccttgctgctccacgccgccaggccggaagtgcagctggttgaatctggcggaggactggttcagcctggcggatctctgagactgtcttgtgccgccagcggcttcagcttcagcgacttttggatgagctgggtccgacaggcccctggcaaaggacttgaatgggtcgccacaatcagccaggccggcagcgagaaggactacgtggactctgtgaagggcagattcaccatcagccgggacaacgccaagaagtccctgtacctccagatgaacagcctgagagccgaggacaccgccgtgtactattgtgcctctggcgtgtacagcttcgactacagaggccagggcaccctggtcacagtctcttctggtaccggcggaggcggatctggcggcggaggtagcggtggcggaggatctgaattcgagatcgtgctgacacagagccctaccagcatgacagcctctccaggcgagcaagtgaccatcacctgtagagccagcagcagcatcaactacatgcactggtatcagcagaagcctggcgcaagccccagaccttggatctacgagacaagcaagctggcctccggcgtgcccgatagattttctggatctgccagcggcaccagctacagcctgaccatcaacaacatggaagccgaggacgccgccacctactactgccagcagtggaattacccctcctggacctttggcggaggcaccaagctggaacttaaactcgagatccagaaccctgatcctgccgtgtaccagctgcgggatagcaagagcagcgacaagagcgtgtgtctgttcaccgacttcgacagccagaccaacgtgtcccagagcaaggactccgacgtgtacatcaccgataagtgcgtgctggacatgcggagcatggacttcaagagcaactccgccgtggcctggtccaacaagtccgatttcgcctgcgccaacgccttcaacaacagcattatccccgaggacacattcttcccaagccccgagagcagctgcggctttaccagcgagagctaccagcagggcgtgctgagcgccaccatcctgtacgagatcctgctgggcaaggccaccctgtacgccgtgctggtgtctgccctggtgctgatggctatggtcaagcggaaggacagccggggacgcgccaagagaagcggatctggcgtgaagcagaccctgaatttcgacctgctgaagctggctggcgacgtggaatccaacccaggccctactagtatggactggatttggcgcatccttttccttgtcggcgctgctaccggcgcgcattccttcgaagaagtgcagctcgttgagtctggtggcggactggttcagcctggaagaagcctgaagctgagctgtgccgccagcggcttcaccttcagcgactacaatatggcctgggtccgacaggcccctaagaaaggactggaatgggtcgccaccatcctgtacgatggcggcagaacctactaccggggcagcgtgaagggcagattcaccatcagcagagacaacgccaagagcaccctgtacctgcggatggactctctgagaagcgaggataccgccacatattactgtgccacacacagccggggcaccgactactttgattattggggccagggcgtgatggttaccgtgtctagtacgcgtgaggacctgaagaacgtgttcccacctgaggtggccgtgttcgagcctagcgaggccgagatcagccacacccagaaagccaccctcgtgtgcctggctaccggcttctaccccgaccatgtggaactgtcttggtgggtcaacggcaaagaggtgcacagcggcgtgtgtaccgacccccagccactgaaagaacagcccgccctgaacgacagccggtactgcctgagcagcagactgagagtgtccgccaccttctggcagaacccccggaaccacttcagatgccaggtgcagttctacggcctgagcgagaacgacgagtggacccaggacagagccaagcccgtgacccagatcgtgtctgccgaagcctggggcagagccgattgcgacgtgaagctggtggaaaagagcttcgagacagacaccaacctgaacttccagaacctgagcgtgatcggcttcagaatcctgctgctgaaagtggccggctttaacctgctgatgaccctgcggctgtggtccagc

SEQ ID NO: 4543 - DNA, 2298 bp, synthetic construct
  source 1..2298: mol_type = other DNA
atggccttaccagtgaccgccttgctcctgccgctggccttgctgctccacgccgccaggccggaagtgcagctggttgaatctggcggaggactggttcagcctggcggatctctgagactgtcttgtgccgccagcggcttcagcttcagcgacttttggatgagctgggtccgacaggcccctggcaaaggacttgaatgggtcgccacaatcagccaggccggcagcgagaaggactacgtggactctgtgaagggcagattcaccatcagccgggacaacgccaagaagtccctgtacctccagatgaacagcctgagagccgaggacaccgccgtgtactattgtgcctctggcgtgtacagcttcgactacagaggccagggcaccctggtcacagtctcttctggtaccggcggaggcggatctggcggcggaggtagcggtggcggaggatctgaattcgacatcgtgatgacacagagcccttctagcctggccgtgtctgagggcgagacagtgaccatcaactgcaagagcagccagagcttcctgtctagcggcgacggcaagaattacgtggcctggtatcagtacaagcccggacagagccccaagctgctgatctactgggccagcacaagacagagcggcgtgcccgatagattcatcggctctggcagcggcaccgacttcaccctgacaatctctacagtgcaggccgaggacctggctatctactactgccagcagtattacgacacccctctgacctttggctccggcaccaagctggaaatcaaactcgagatccagaaccctgatcctgccgtgtaccagctgcgggatagcaagagcagcgacaagagcgtgtgtctgttcaccgacttcgacagccagaccaacgtgtcccagagcaaggactccgacgtgtacatcaccgataagtgcgtgctggacatgcggagcatggacttcaagagcaactccgccgtggcctggtccaacaagtccgatttcgcctgcgccaacgccttcaacaacagcattatccccgaggacacattcttcccaagccccgagagcagctgcggctttaccagcgagagctaccagcagggcgtgctgagcgccaccatcctgtacgagatcctgctgggcaaggccaccctgtacgccgtgctggtgtctgccctggtgctgatggctatggtcaagcggaaggacagccggggacgcgccaagagaagcggatctggcgtgaagcagaccctgaatttcgacctgctgaagctggctggcgacgtggaatccaacccaggccctactagtatggactggatttggcgcatccttttccttgtcggcgctgctaccggcgcgcattccttcgaagaagtgaagctgcaagagtctggccccagcctggtgcagagtagccaaacactgagcctgacctgtaccgtgtccggctttagcctgaccagctaccacatccactgggtccgacagacccctggcaaaggactggaatggatgggcgtgatgtggagcgacggcgacaccagctataacagcgccctgaagtcccggctgagcatcagcagagatacaagccagagccaggtgttcctgaagatgaacagcctccagaccgaggacaccgccacctactattgtgccagaggctactacagcagctacctgtacctttggttcgcctattggggccagggcaccctggttacagtcagctctacgcgtgaggacctgaagaacgtgttcccacctgaggtggccgtgttcgagcctagcgaggccgagatcagccacacccagaaagccaccctcgtgtgcctggctaccggcttctaccccgaccatgtggaactgtcttggtgggtcaacggcaaagaggtgcacagcggcgtgtgtaccgacccccagccactgaaagaacagcccgccctgaacgacagccggtactgcctgagcagcagactgagagtgtccgccaccttctggcagaacccccggaaccacttcagatgccaggtgcagttctacggcctgagcgagaacgacgagtggacccaggacagagccaagcccgtgacccagatcgtgtctgccgaagcctggggcagagccgattgcgacgtgaagctggtggaaaagagcttcgagacagacaccaacctgaacttccagaacctgagcgtgatcggcttcagaatcctgctgctgaaagtggccggctttaacctgctgatgaccctgcggctgtggtccagc

SEQ ID NO: 4544 - DNA, 2310 bp, synthetic construct
  source 1..2310: mol_type = other DNA
atggccttaccagtgaccgccttgctcctgccgctggccttgctgctccacgccgccaggccggaagtgcagctggttgaatctggcggaggactggttcagcctggcggatctctgagactgtcttgtgccgccagcggcttcagcttcagcgacttttggatgagctgggtccgacaggcccctggcaaaggacttgaatgggtcgccacaatcagccaggccggcagcgagaaggactacgtggactctgtgaagggcagattcaccatcagccgggacaacgccaagaagtccctgtacctccagatgaacagcctgagagccgaggacaccgccgtgtactattgtgcctctggcgtgtacagcttcgactacagaggccagggcaccctggtcacagtctcttctggtaccggcggaggcggatctggcggcggaggtagcggtggcggaggatctgaattcgacgtgctgatgacccagacacctgtgtctctgccagtgtctctcggaggccaggtgtccatctcctgtagaagcagccagagcctggtgcactccgacggcgatacctacctgcactggtatctccagaagcctggacagagccctcagctcctgatctaccgggtgtccaacagattcagcggcgtgcccgatagattttccggcagcggctctggcaccgacttcaccctgaagatcagcagagtggaacccgaggacctgggcctgtactactgtctccagaccacacacttcccaccttggacctttggcggaggcaccaagctggaaatgaaactcgagatccagaaccctgatcctgccgtgtaccagctgcgggatagcaagagcagcgacaagagcgtgtgtctgttcaccgacttcgacagccagaccaacgtgtcccagagcaaggactccgacgtgtacatcaccgataagtgcgtgctggacatgcggagcatggacttcaagagcaactccgccgtggcctggtccaacaagtccgatttcgcctgcgccaacgccttcaacaacagcattatccccgaggacacattcttcccaagccccgagagcagctgcggctttaccagcgagagctaccagcagggcgtgctgagcgccaccatcctgtacgagatcctgctgggcaaggccaccctgtacgccgtgctggtgtctgccctggtgctgatggctatggtcaagcggaaggacagccggggacgcgccaagagaagcggatctggcgtgaagcagaccctgaatttcgacctgctgaagctggctggcgacgtggaatccaacccaggccctactagtatggactggatttggcgcatccttttccttgtcggcgctgctaccggcgcgcattccttcgaacaggttcagctccagcagtctggacccgagcttagaaggccaggatctagcgtcagactgagctgcaaggccagcggctaccggatcaaggacttcctgatccactggattaagaacagacccgagcacggcctggaatggatcggatggattgaccctgaggacggcgagactaagtacgcccagaagttccagaccaaggccacactgaccgccgacacctctagcaacaccgcctacatgcaactgagcagcctgaccagcgaggacaccgccacctacttttgtgctagatggggcgacgtgtactacggcctgatgagaggccatgtgatggatgcctggggccagggaacaagcgtgacagtctcttctacgcgtgaggacctgaagaacgtgttcccacctgaggtggccgtgttcgagcctagcgaggccgagatcagccacacccagaaagccaccctcgtgtgcctggctaccggcttctaccccgaccatgtggaactgtcttggtgggtcaacggcaaagaggtgcacagcggcgtgtgtaccgacccccagccactgaaagaacagcccgccctgaacgacagccggtactgcctgagcagcagactgagagtgtccgccaccttctggcagaacccccggaaccacttcagatgccaggtgcagttctacggcctgagcgagaacgacgagtggacccaggacagagccaagcccgtgacccagatcgtgtctgccgaagcctggggcagagccgattgcgacgtgaagctggtggaaaagagcttcgagacagacaccaacctgaacttccagaacctgagcgtgatcggcttcagaatcctgctgctgaaagtggccggctttaacctgctgatgaccctgcggctgtggtccagc

SEQ ID NO: 4545 - DNA, 2295 bp, synthetic construct
  source 1..2295: mol_type = other DNA
atggccttaccagtgaccgccttgctcctgccgctggccttgctgctccacgccgccaggccggaagtgcagctggttgaatctggcggaggactggttcagcctggcggatctctgagactgtcttgtgccgccagcggcttcagcttcagcgacttttggatgagctgggtccgacaggcccctggcaaaggacttgaatgggtcgccacaatcagccaggccggcagcgagaaggactacgtggactctgtgaagggcagattcaccatcagccgggacaacgccaagaagtccctgtacctccagatgaacagcctgagagccgaggacaccgccgtgtactattgtgcctctggcgtgtacagcttcgactacagaggccagggcaccctggtcacagtctcttctggtaccggcggaggcggatctggcggcggaggtagcggtggcggaggatctgaattcgacatcgtgatgacacagagccccgccacactgtcactgtctccaggcgaaagagccacactgagctgtcggagcagcaagagcctccagaacgtgaacggcaacacctacctgtactggttccagcagaagcccggccagtctcctcagctcctgatctacagaatgagcaacctgaacagcggcgtgcccgacagattttctggcagcggaagcggcaccgagttcaccctgaccataagcagcctggaacctgaggacttcgccgtgtactactgtatgcagcacctggaataccccatcaccttcggagccggcaccaagctggaaatcaaactcgagatccagaaccctgatcctgccgtgtaccagctgcgggatagcaagagcagcgacaagagcgtgtgtctgttcaccgacttcgacagccagaccaacgtgtcccagagcaaggactccgacgtgtacatcaccgataagtgcgtgctggacatgcggagcatggacttcaagagcaactccgccgtggcctggtccaacaagtccgatttcgcctgcgccaacgccttcaacaacagcattatccccgaggacacattcttcccaagccccgagagcagctgcggctttaccagcgagagctaccagcagggcgtgctgagcgccaccatcctgtacgagatcctgctgggcaaggccaccctgtacgccgtgctggtgtctgccctggtgctgatggctatggtcaagcggaaggacagccggggacgcgccaagagaagcggatctggcgtgaagcagaccctgaatttcgacctgctgaagctggctggcgacgtggaatccaacccaggccctactagtatggactggatttggcgcatccttttccttgtcggcgctgctaccggcgcgcattccttcgaagaagtgcaactggttgaatctggcggcggactggttaagcctggcggatctctgaagctgagctgtgccgccagcggctacacctttaccagctacgtgatgcactgggtccgacaggcccctggcaaaggacttgagtggatcggctacatcaacccctacaacgatggcaccaagtacaacgagaagttccagggcagagtgaccatcagctccgacaagagcatcagcaccgcctacatggaactgagcagcctgagaagcgaggataccgccatgtactattgcgccagaggcacctactactacggcaccagagtgttcgactactggggccagggaaccctggtcacagtctcttctacgcgtgaggacctgaagaacgtgttcccacctgaggtggccgtgttcgagcctagcgaggccgagatcagccacacccagaaagccaccctcgtgtgcctggctaccggcttctaccccgaccatgtggaactgtcttggtgggtcaacggcaaagaggtgcacagcggcgtgtgtaccgacccccagccactgaaagaacagcccgccctgaacgacagccggtactgcctgagcagcagactgagagtgtccgccaccttctggcagaacccccggaaccacttcagatgccaggtgcagttctacggcctgagcgagaacgacgagtggacccaggacagagccaagcccgtgacccagatcgtgtctgccgaagcctggggcagagccgattgcgacgtgaagctggtggaaaagagcttcgagacagacaccaacctgaacttccagaacctgagcgtgatcggcttcagaatcctgctgctgaaagtggccggctttaacctgctgatgaccctgcggctgtggtccagc

SEQ ID NO: 4546 - DNA, 2283 bp, synthetic construct
  source 1..2283: mol_type = other DNA
atggccttaccagtgaccgccttgctcctgccgctggccttgctgctccacgccgccaggccggaagtgcagctggttgaatctggcggaggactggttcagcctggcggatctctgagactgtcttgtgccgccagcggcttcagcttcagcgacttttggatgagctgggtccgacaggcccctggcaaaggacttgaatgggtcgccacaatcagccaggccggcagcgagaaggactacgtggactctgtgaagggcagattcaccatcagccgggacaacgccaagaagtccctgtacctccagatgaacagcctgagagccgaggacaccgccgtgtactattgtgcctctggcgtgtacagcttcgactacagaggccagggcaccctggtcacagtctcttctggtaccggcggaggcggatctggcggcggaggtagcggtggcggaggatctgaattcgacatccagatgacacagagccctagcagcctgtctgccagcgtgggagacagagtgaccatcacatgcaaggccagcgaccacatcaacaactggctggcctggtatcagcagaagcctggacaggcccctaagctgctgatctacggcgctaccacactggaaacaggcgtgcccagcagattttctggcagcggctctggcaccgactacaccctgacaatatccagcctccagcctgaggacttcgccacctactactgtcagcagagctggaacaccccttggacattcggccagggcaccaagctggaaatcaagagactcgagatccagaaccctgatcctgccgtgtaccagctgcgggatagcaagagcagcgacaagagcgtgtgtctgttcaccgacttcgacagccagaccaacgtgtcccagagcaaggactccgacgtgtacatcaccgataagtgcgtgctggacatgcggagcatggacttcaagagcaactccgccgtggcctggtccaacaagtccgatttcgcctgcgccaacgccttcaacaacagcattatccccgaggacacattcttcccaagccccgagagcagctgcggctttaccagcgagagctaccagcagggcgtgctgagcgccaccatcctgtacgagatcctgctgggcaaggccaccctgtacgccgtgctggtgtctgccctggtgctgatggctatggtcaagcggaaggacagccggggacgcgccaagagaagcggatctggcgtgaagcagaccctgaatttcgacctgctgaagctggctggcgacgtggaatccaacccaggccctactagtatggactggatttggcgcatccttttccttgtcggcgctgctaccggcgcgcattccttcgaacaagttcagcttcaacagcctggcgctgagctggtcaaacctggcgcttctgtgaagatgagctgcaaagccagcggctacgccttcagcagctactggatcaactggatgaagcagaaacccggccagggactcgaatggatcggccaaatctatcccggcgacggcgacaccaactacaacggcaagttcaagggcagagccacactgaccgccgatacctctagcagcacagcctacatgcagctgagcagcctgaccagcgaagatagcgccgtgtacttctgtgcccggtccatcacaacagtcgtgggctgcgctatggactattggggccagggaacaagcgtgaccgtgtctagtacgcgtgaggacctgaagaacgtgttcccacctgaggtggccgtgttcgagcctagcgaggccgagatcagccacacccagaaagccaccctcgtgtgcctggctaccggcttctaccccgaccatgtggaactgtcttggtgggtcaacggcaaagaggtgcacagcggcgtgtgtaccgacccccagccactgaaagaacagcccgccctgaacgacagccggtactgcctgagcagcagactgagagtgtccgccaccttctggcagaacccccggaaccacttcagatgccaggtgcagttctacggcctgagcgagaacgacgagtggacccaggacagagccaagcccgtgacccagatcgtgtctgccgaagcctggggcagagccgattgcgacgtgaagctggtggaaaagagcttcgagacagacaccaacctgaacttccagaacctgagcgtgatcggcttcagaatcctgctgctgaaagtggccggctttaacctgctgatgaccctgcggctgtggtccagc

SEQ ID NO: 4547 - DNA, 2289 bp, synthetic construct
  source 1..2289: mol_type = other DNA
atggccttaccagtgaccgccttgctcctgccgctggccttgctgctccacgccgccaggccggaagtgcagctggttgaatctggcggaggactggttcagcctggcggatctctgagactgtcttgtgccgccagcggcttcagcttcagcgacttttggatgagctgggtccgacaggcccctggcaaaggacttgaatgggtcgccacaatcagccaggccggcagcgagaaggactacgtggactctgtgaagggcagattcaccatcagccgggacaacgccaagaagtccctgtacctccagatgaacagcctgagagccgaggacaccgccgtgtactattgtgcctctggcgtgtacagcttcgactacagaggccagggcaccctggtcacagtctcttctggtaccggcggaggcggatctggcggcggaggtagcggtggcggaggatctgaattccagatcgtgctgtctcagtctcctgccatcctgagcgcttccccaggcgagaaagtgaccatgacctgtagagccagcagcagcgtgtcctacatgcactggtatcagcagaagcccggcagcagccctaagccttggatctacgccaccagcaatctggcctctggcgtgccagccagattttctggctctggcagcggcaccagctacagcttcacaatcagcagagtggaagccgaggacgccgccacctactattgtcagcagtggaccttcaatcctcctaccttcggcggaggcacccggctggaaatcaaaagaacagtggctgctctcgagatccagaaccctgatcctgccgtgtaccagctgcgggatagcaagagcagcgacaagagcgtgtgtctgttcaccgacttcgacagccagaccaacgtgtcccagagcaaggactccgacgtgtacatcaccgataagtgcgtgctggacatgcggagcatggacttcaagagcaactccgccgtggcctggtccaacaagtccgatttcgcctgcgccaacgccttcaacaacagcattatccccgaggacacattcttcccaagccccgagagcagctgcggctttaccagcgagagctaccagcagggcgtgctgagcgccaccatcctgtacgagatcctgctgggcaaggccaccctgtacgccgtgctggtgtctgccctggtgctgatggctatggtcaagcggaaggacagccggggacgcgccaagagaagcggatctggcgtgaagcagaccctgaatttcgacctgctgaagctggctggcgacgtggaatccaacccaggccctactagtatggactggatttggcgcatccttttccttgtcggcgctgctaccggcgcgcattccttcgaacaggcttatctgcaacagagcggagccgaactcgtcagacctggcgcttctgtgaagatgagctgcaaggccagcggctacaccttcaccagctataatatgcactgggtcaagcagacccctcggcagggactcgaatggatcggcggaatctatcccggcaacggcgacacctcctacaaccagaagttcaagggcaaagccacactgaccgtgggcaagagcagcagcaccgcctatatgcagctcagcagcctgaccagcgaggacagcgccgtgtacttctgcgccagatacgactacaactacgctatggactactggggccagggcaccagcgtgacagttagctctgccagcacgcgtgaggacctgaagaacgtgttcccacctgaggtggccgtgttcgagcctagcgaggccgagatcagccacacccagaaagccaccctcgtgtgcctggctaccggcttctaccccgaccatgtggaactgtcttggtgggtcaacggcaaagaggtgcacagcggcgtgtgtaccgacccccagccactgaaagaacagcccgccctgaacgacagccggtactgcctgagcagcagactgagagtgtccgccaccttctggcagaacccccggaaccacttcagatgccaggtgcagttctacggcctgagcgagaacgacgagtggacccaggacagagccaagcccgtgacccagatcgtgtctgccgaagcctggggcagagccgattgcgacgtgaagctggtggaaaagagcttcgagacagacaccaacctgaacttccagaacctgagcgtgatcggcttcagaatcctgctgctgaaagtggccggctttaacctgctgatgaccctgcggctgtggtccagc

SEQ ID NO: 4548 - DNA, 2283 bp, synthetic construct
  source 1..2283: mol_type = other DNA
atggccttaccagtgaccgccttgctcctgccgctggccttgctgctccacgccgccaggccggaagtgcagctggttgaatctggcggaggactggttcagcctggcggatctctgagactgtcttgtgccgccagcggcttcagcttcagcgacttttggatgagctgggtccgacaggcccctggcaaaggacttgaatgggtcgccacaatcagccaggccggcagcgagaaggactacgtggactctgtgaagggcagattcaccatcagccgggacaacgccaagaagtccctgtacctccagatgaacagcctgagagccgaggacaccgccgtgtactattgtgcctctggcgtgtacagcttcgactacagaggccagggcaccctggtcacagtctcttctggtaccggcggaggcggatctggcggcggaggtagcggtggcggaggatctgaattcgagatcgtgctgacacagagccctgccaccctgtctctgagccctggcgaaagagccaccctgagctgtagagccagccagagcgtgtccagctacctggcctggtatcagcagaagcccggccaggctccccggctgctgatctacgatgccagcaatagagccaccggcatccccgccagattttccggctctggcagcggcaccgacttcaccctgaccatcagctccctggaacccgaggacttcgccgtgtactactgccagcagcggagcaactggcccatcacattcggccagggcacccggctggaaatcaaactcgagatccagaaccctgatcctgccgtgtaccagctgcgggatagcaagagcagcgacaagagcgtgtgtctgttcaccgacttcgacagccagaccaacgtgtcccagagcaaggactccgacgtgtacatcaccgataagtgcgtgctggacatgcggagcatggacttcaagagcaactccgccgtggcctggtccaacaagtccgatttcgcctgcgccaacgccttcaacaacagcattatccccgaggacacattcttcccaagccccgagagcagctgcggctttaccagcgagagctaccagcagggcgtgctgagcgccaccatcctgtacgagatcctgctgggcaaggccaccctgtacgccgtgctggtgtctgccctggtgctgatggctatggtcaagcggaaggacagccggggacgcgccaagagaagcggatctggcgtgaagcagaccctgaatttcgacctgctgaagctggctggcgacgtggaatccaacccaggccctactagtatggactggatttggcgcatccttttccttgtcggcgctgctaccggcgcgcattccttcgaagaggtgcagcttgttgagtctggcggaggactggtgcagcccgatagaagcctgagactgtcttgtgccgccagcggcttcaccttccacgattatgccatgcactgggtccgacaggcccctggcaaaggacttgaatgggtgtccaccatctcttggaacagcggcacaatcggctacgccgactctgtgaagggcagattcaccatcagccgggacaacgccaagaacagcctgtacctccagatgaactccctgagagccgaggacacagccctgtactactgcgccaaggacatccagtacggcaactactactacggcatggacgtgtggggccagggcacaacagtgacagtctcttctacgcgtgaggacctgaagaacgtgttcccacctgaggtggccgtgttcgagcctagcgaggccgagatcagccacacccagaaagccaccctcgtgtgcctggctaccggcttctaccccgaccatgtggaactgtcttggtgggtcaacggcaaagaggtgcacagcggcgtgtgtaccgacccccagccactgaaagaacagcccgccctgaacgacagccggtactgcctgagcagcagactgagagtgtccgccaccttctggcagaacccccggaaccacttcagatgccaggtgcagttctacggcctgagcgagaacgacgagtggacccaggacagagccaagcccgtgacccagatcgtgtctgccgaagcctggggcagagccgattgcgacgtgaagctggtggaaaagagcttcgagacagacaccaacctgaacttccagaacctgagcgtgatcggcttcagaatcctgctgctgaaagtggccggctttaacctgctgatgaccctgcggctgtggtccagc

SEQ ID NO: 4549 - DNA, 2268 bp, synthetic construct
  source 1..2268: mol_type = other DNA
atggccttaccagtgaccgccttgctcctgccgctggccttgctgctccacgccgccaggccggaagtgcagctggttgaatctggcggaggactggttcagcctggcggatctctgagactgtcttgtgccgccagcggcttcagcttcagcgacttttggatgagctgggtccgacaggcccctggcaaaggacttgaatgggtcgccacaatcagccaggccggcagcgagaaggactacgtggactctgtgaagggcagattcaccatcagccgggacaacgccaagaagtccctgtacctccagatgaacagcctgagagccgaggacaccgccgtgtactattgtgcctctggcgtgtacagcttcgactacagaggccagggcaccctggtcacagtctcttctggtaccggcggaggcggatctggcggcggaggtagcggtggcggaggatctgaattcgacatccagatgacacagagccctagcagcctgtctgccagcgtgggagatagagtgaccatcaactgcaaggccagccaggacatcaacagctacctgagctggttccagcagaagcctggcaaggcccctaagacactgatctaccgggccaacagactggtggatggcgtgccaagcagattttctggcagcggcagcggccaggattacaccctgacaatatccagcctccagcctgaggacttcgccacctactactgcctccagtacgacgagttccctctgacctttggcggaggcaccaaggtggaaatcaaactcgagatccagaaccctgatcctgccgtgtaccagctgcgggatagcaagagcagcgacaagagcgtgtgtctgttcaccgacttcgacagccagaccaacgtgtcccagagcaaggactccgacgtgtacatcaccgataagtgcgtgctggacatgcggagcatggacttcaagagcaactccgccgtggcctggtccaacaagtccgatttcgcctgcgccaacgccttcaacaacagcattatccccgaggacacattcttcccaagccccgagagcagctgcggctttaccagcgagagctaccagcagggcgtgctgagcgccaccatcctgtacgagatcctgctgggcaaggccaccctgtacgccgtgctggtgtctgccctggtgctgatggctatggtcaagcggaaggacagccggggacgcgccaagagaagcggatctggcgtgaagcagaccctgaatttcgacctgctgaagctggctggcgacgtggaatccaacccaggccctactagtatggactggatttggcgcatccttttccttgtcggcgctgctaccggcgcgcattccttcgaacaggtgcaactggtgcagtctggggccgaagtgaagaaacctggggcctctgtgaaggtgtcctgcaaagccagcggctacacctttaccaactacgacatcaactgggtccgacaggctccaggccaaggactggaatggatcggctggatctatcctggcgacggcagcaccaagtacaacgagaagttcaaggccaaggccacactgaccgccgataccagcacaagcaccgcctacatggaactgcggagcctgagaagcgacgacaccgccgtgtactattgtgcctccggctacgaggacgctatggactattggggccagggcaccaccgtgacagtgtctagtacgcgtgaggacctgaagaacgtgttcccacctgaggtggccgtgttcgagcctagcgaggccgagatcagccacacccagaaagccaccctcgtgtgcctggctaccggcttctaccccgaccatgtggaactgtcttggtgggtcaacggcaaagaggtgcacagcggcgtgtgtaccgacccccagccactgaaagaacagcccgccctgaacgacagccggtactgcctgagcagcagactgagagtgtccgccaccttctggcagaacccccggaaccacttcagatgccaggtgcagttctacggcctgagcgagaacgacgagtggacccaggacagagccaagcccgtgacccagatcgtgtctgccgaagcctggggcagagccgattgcgacgtgaagctggtggaaaagagcttcgagacagacaccaacctgaacttccagaacctgagcgtgatcggcttcagaatcctgctgctgaaagtggccggctttaacctgctgatgaccctgcggctgtggtccagc

SEQ ID NO: 4550 - DNA, 2274 bp, synthetic construct
  source 1..2274: mol_type = other DNA
atggccttaccagtgaccgccttgctcctgccgctggccttgctgctccacgccgccaggccggaagtgcagctggttgaatctggcggaggactggttcagcctggcggatctctgagactgtcttgtgccgccagcggcttcagcttcagcgacttttggatgagctgggtccgacaggcccctggcaaaggacttgaatgggtcgccacaatcagccaggccggcagcgagaaggactacgtggactctgtgaagggcagattcaccatcagccgggacaacgccaagaagtccctgtacctccagatgaacagcctgagagccgaggacaccgccgtgtactattgtgcctctggcgtgtacagcttcgactacagaggccagggcaccctggtcacagtctcttctggtaccggcggaggcggatctggcggcggaggtagcggtggcggaggatctgaattcgacatcgtgatgacccagacacctctgagcctgagcgtgacacctggacagcctgccagcattagctgcaagagcagccagtctctgctggacggcgacggcaagacctacctgaattggctgctccagaagcctggacagagccctcagcggctgatctacctggtgtccaagctggatagcggcgtgcccgatagattttctggcagcggctctggcaccgacttcaccctgaagatcagcagagtggaagccgaggacgtgggcgtgtactactgttggcagggcacacacttccccagaacattcggccagggcacaaagctggaaatcaaactcgagatccagaaccctgatcctgccgtgtaccagctgcgggatagcaagagcagcgacaagagcgtgtgtctgttcaccgacttcgacagccagaccaacgtgtcccagagcaaggactccgacgtgtacatcaccgataagtgcgtgctggacatgcggagcatggacttcaagagcaactccgccgtggcctggtccaacaagtccgatttcgcctgcgccaacgccttcaacaacagcattatccccgaggacacattcttcccaagccccgagagcagctgcggctttaccagcgagagctaccagcagggcgtgctgagcgccaccatcctgtacgagatcctgctgggcaaggccaccctgtacgccgtgctggtgtctgccctggtgctgatggctatggtcaagcggaaggacagccggggacgcgccaagagaagcggatctggcgtgaagcagaccctgaatttcgacctgctgaagctggctggcgacgtggaatccaacccaggccctactagtatggactggatttggcgcatccttttccttgtcggcgctgctaccggcgcgcattccttcgaacaagtgcaactggttcagagcggagccgaagtgaagaaacctggggcctctgtgaaggtgtcctgcaaggccagcggctacaccttcaaggacacctacatccactgggtccgacaggcccctggacaaggacttgagtggatgggcagaatcgaccccgccaacggcaacaccaaatacgaccccaagttccagggcagagtgaccatgaccagagacaccagcatcagcaccgcctacatggaactgagccggctgagatccgatgacaccgccgtgtactattgcgctagaagaggcggagtggattggggccagggaacactggttaccgtgtctagtacgcgtgaggacctgaagaacgtgttcccacctgaggtggccgtgttcgagcctagcgaggccgagatcagccacacccagaaagccaccctcgtgtgcctggctaccggcttctaccccgaccatgtggaactgtcttggtgggtcaacggcaaagaggtgcacagcggcgtgtgtaccgacccccagccactgaaagaacagcccgccctgaacgacagccggtactgcctgagcagcagactgagagtgtccgccaccttctggcagaacccccggaaccacttcagatgccaggtgcagttctacggcctgagcgagaacgacgagtggacccaggacagagccaagcccgtgacccagatcgtgtctgccgaagcctggggcagagccgattgcgacgtgaagctggtggaaaagagcttcgagacagacaccaacctgaacttccagaacctgagcgtgatcggcttcagaatcctgctgctgaaagtggccggctttaacctgctgatgaccctgcggctgtggtccagc

SEQ ID NO: 4551 - DNA, 2277 bp, synthetic construct
  source 1..2277: mol_type = other DNA
atggccttaccagtgaccgccttgctcctgccgctggccttgctgctccacgccgccaggccggaagtgcagctggttgaatctggcggaggactggttcagcctggcggatctctgagactgtcttgtgccgccagcggcttcagcttcagcgacttttggatgagctgggtccgacaggcccctggcaaaggacttgaatgggtcgccacaatcagccaggccggcagcgagaaggactacgtggactctgtgaagggcagattcaccatcagccgggacaacgccaagaagtccctgtacctccagatgaacagcctgagagccgaggacaccgccgtgtactattgtgcctctggcgtgtacagcttcgactacagaggccagggcaccctggtcacagtctcttctggtaccggcggaggcggatctggcggcggaggtagcggtggcggaggatctgaattcgacatccagatgacacagagccctagcagcctgtctgccagcgtgggagacagagtgaccatcacatgcaaggccagccaggatgtgtctacagccgtggcctggttccagcagaagcctggaaaagcccctaagctgctgatctacagccccagctacagatacaccggcgtgcccagcagattttctggcagcggctctggcaccgacttcaccctgacaatatccagcctccagcctgaggacttcacctactactgccagcagctctacagcaccccttacacattcggccagggcaccaaggtggaaatcaaactcgagatccagaaccctgatcctgccgtgtaccagctgcgggatagcaagagcagcgacaagagcgtgtgtctgttcaccgacttcgacagccagaccaacgtgtcccagagcaaggactccgacgtgtacatcaccgataagtgcgtgctggacatgcggagcatggacttcaagagcaactccgccgtggcctggtccaacaagtccgatttcgcctgcgccaacgccttcaacaacagcattatccccgaggacacattcttcccaagccccgagagcagctgcggctttaccagcgagagctaccagcagggcgtgctgagcgccaccatcctgtacgagatcctgctgggcaaggccaccctgtacgccgtgctggtgtctgccctggtgctgatggctatggtcaagcggaaggacagccggggacgcgccaagagaagcggatctggcgtgaagcagaccctgaatttcgacctgctgaagctggctggcgacgtggaatccaacccaggccctactagtatggactggatttggcgcatccttttccttgtcggcgctgctaccggcgcgcattccttcgaagaagtgcaactggttcagagcggagccgaagtgaagaaacctggggcctctgtgaaggtgtcctgcaaagccagcggctacacctttaccgactactacctggacgtggtcgtgcggcaagctcctggacaaggactggaatggatcggcagagtgaacccctacaacggcggcaccatctacaaccagaaattcaagggaagagtgaccctgaccagagacaccagcacctccacagcctacctggaactgagcagcctgagaagcgaagataccgccgtgtactactgcgccagggaccactacagatatgaccctctgctggactactggggccagggaaccctggttacagtgtctagtacgcgtgaggacctgaagaacgtgttcccacctgaggtggccgtgttcgagcctagcgaggccgagatcagccacacccagaaagccaccctcgtgtgcctggctaccggcttctaccccgaccatgtggaactgtcttggtgggtcaacggcaaagaggtgcacagcggcgtgtgtaccgacccccagccactgaaagaacagcccgccctgaacgacagccggtactgcctgagcagcagactgagagtgtccgccaccttctggcagaacccccggaaccacttcagatgccaggtgcagttctacggcctgagcgagaacgacgagtggacccaggacagagccaagcccgtgacccagatcgtgtctgccgaagcctggggcagagccgattgcgacgtgaagctggtggaaaagagcttcgagacagacaccaacctgaacttccagaacctgagcgtgatcggcttcagaatcctgctgctgaaagtggccggctttaacctgctgatgaccctgcggctgtggtccagc

SEQ ID NO: 4552 - DNA, 2295 bp, synthetic construct
  source 1..2295: mol_type = other DNA
atggccttaccagtgaccgccttgctcctgccgctggccttgctgctccacgccgccaggccggaagtgcagctggttgaatctggcggaggactggttcagcctggcggatctctgagactgtcttgtgccgccagcggcttcagcttcagcgacttttggatgagctgggtccgacaggcccctggcaaaggacttgaatgggtcgccacaatcagccaggccggcagcgagaaggactacgtggactctgtgaagggcagattcaccatcagccgggacaacgccaagaagtccctgtacctccagatgaacagcctgagagccgaggacaccgccgtgtactattgtgcctctggcgtgtacagcttcgactacagaggccagggcaccctggtcacagtctcttctggtaccggcggaggcggatctggcggcggaggtagcggtggcggaggatctgaattcgacatccagatgacacagagccctagcagcctgtctgccagcgtgggagacagagtgaccatcacctgtagagccagccagagcgtgtccaccagcagctacaactacatgcactggtatcagcagaagcccggcaagcctcctaagctgctgattaagtacgccagcaacctggaaagcggcgtgcccagcagattttctggcagcggctctggcaccgacttcaccctgacaatatccagcctccagcctgaggacttcgccacctactactgtcagcactcctgggagatccctctgacattcggccagggcaccaaggtggaaatcaaactcgagatccagaaccctgatcctgccgtgtaccagctgcgggatagcaagagcagcgacaagagcgtgtgtctgttcaccgacttcgacagccagaccaacgtgtcccagagcaaggactccgacgtgtacatcaccgataagtgcgtgctggacatgcggagcatggacttcaagagcaactccgccgtggcctggtccaacaagtccgatttcgcctgcgccaacgccttcaacaacagcattatccccgaggacacattcttcccaagccccgagagcagctgcggctttaccagcgagagctaccagcagggcgtgctgagcgccaccatcctgtacgagatcctgctgggcaaggccaccctgtacgccgtgctggtgtctgccctggtgctgatggctatggtcaagcggaaggacagccggggacgcgccaagagaagcggatctggcgtgaagcagaccctgaatttcgacctgctgaagctggctggcgacgtggaatccaacccaggccctactagtatggactggatttggcgcatccttttccttgtcggcgctgctaccggcgcgcattccttcgaagaagtgcaactggttcagagcggagccgaagtgaagaaacctggggcctctgtgaaggtgtcctgcaaggccagcggctacagcttcaccgactattatatgcactgggtccgacaggctccaggccagggacttgagtggatcggcagaatcaacccctacaacggcgctgccttctacagccagaacttcaaggatagagtgaccctgaccgtggacaccagcaccagcacagcctacctggaactgagcagcctgagaagcgaggacaccgccgtgtactactgcgccattgagagaggcgctgacctggaaggctacgctatggattattggggccagggaaccctggtcaccgtgtcatctacgcgtgaggacctgaagaacgtgttcccacctgaggtggccgtgttcgagcctagcgaggccgagatcagccacacccagaaagccaccctcgtgtgcctggctaccggcttctaccccgaccatgtggaactgtcttggtgggtcaacggcaaagaggtgcacagcggcgtgtgtaccgacccccagccactgaaagaacagcccgccctgaacgacagccggtactgcctgagcagcagactgagagtgtccgccaccttctggcagaacccccggaaccacttcagatgccaggtgcagttctacggcctgagcgagaacgacgagtggacccaggacagagccaagcccgtgacccagatcgtgtctgccgaagcctggggcagagccgattgcgacgtgaagctggtggaaaagagcttcgagacagacaccaacctgaacttccagaacctgagcgtgatcggcttcagaatcctgctgctgaaagtggccggctttaacctgctgatgaccctgcggctgtggtccagc

SEQ ID NO: 4553 - DNA, 2289 bp, synthetic construct
  source 1..2289: mol_type = other DNA
atggccttaccagtgaccgccttgctcctgccgctggccttgctgctccacgccgccaggccggaagtgcagctggttgaatctggcggaggactggttcagcctggcggatctctgagactgtcttgtgccgccagcggcttcagcttcagcgacttttggatgagctgggtccgacaggcccctggcaaaggacttgaatgggtcgccacaatcagccaggccggcagcgagaaggactacgtggactctgtgaagggcagattcaccatcagccgggacaacgccaagaagtccctgtacctccagatgaacagcctgagagccgaggacaccgccgtgtactattgtgcctctggcgtgtacagcttcgactacagaggccagggcaccctggtcacagtctcttctggtaccggcggaggcggatctggcggcggaggtagcggtggcggaggatctgaattcgagatcgtgctgacacagtctccagccacactgagcgcttctccaggcgagagagtgaccctgacctgtagagccagcagcaacgtgatctccagctacgtgcactggtatcagcagaagcctggcagcagccccagactgtttctgtacagcaccagcaatctggcctccggcgtgccaagcagattttctggctctggcagcggcaccgacttcacctttaccatctctagcctggaagccgaggacgccgccacctactactgtcagcagtacagcggctaccctctgaccttcggccagggcacaagactggaaatcaaactcgagatccagaaccctgatcctgccgtgtaccagctgcgggatagcaagagcagcgacaagagcgtgtgtctgttcaccgacttcgacagccagaccaacgtgtcccagagcaaggactccgacgtgtacatcaccgataagtgcgtgctggacatgcggagcatggacttcaagagcaactccgccgtggcctggtccaacaagtccgatttcgcctgcgccaacgccttcaacaacagcattatccccgaggacacattcttcccaagccccgagagcagctgcggctttaccagcgagagctaccagcagggcgtgctgagcgccaccatcctgtacgagatcctgctgggcaaggccaccctgtacgccgtgctggtgtctgccctggtgctgatggctatggtcaagcggaaggacagccggggacgcgccaagagaagcggatctggcgtgaagcagaccctgaatttcgacctgctgaagctggctggcgacgtggaatccaacccaggccctactagtatggactggatttggcgcatccttttccttgtcggcgctgctaccggcgcgcattccttcgaacaagttcagctgcaagagtctggccctggcctggtcaagcctagcgaaacactgagcctgacctgcgccgtgtctggctactctatcaccagcgcctactattggaactggatcagacagcctcctggcaaaggactggaatggatcggctacatcagctacgacggcagaaacaactacaaccccagcctgaagaaccggatcaccatcaatcccgacaccagcaagaaccagttcagcctccagctgaacagcgtgacccctgaggataccgccgtgtactactgtgccagagaaggcgactacgacgtgggcaactactacgctatggactactggggccagggaaccctggtcacagtctcttctacgcgtgaggacctgaagaacgtgttcccacctgaggtggccgtgttcgagcctagcgaggccgagatcagccacacccagaaagccaccctcgtgtgcctggctaccggcttctaccccgaccatgtggaactgtcttggtgggtcaacggcaaagaggtgcacagcggcgtgtgtaccgacccccagccactgaaagaacagcccgccctgaacgacagccggtactgcctgagcagcagactgagagtgtccgccaccttctggcagaacccccggaaccacttcagatgccaggtgcagttctacggcctgagcgagaacgacgagtggacccaggacagagccaagcccgtgacccagatcgtgtctgccgaagcctggggcagagccgattgcgacgtgaagctggtggaaaagagcttcgagacagacaccaacctgaacttccagaacctgagcgtgatcggcttcagaatcctgctgctgaaagtggccggctttaacctgctgatgaccctgcggctgtggtccagc

SEQ ID NO: 4554 - DNA, 2289 bp, synthetic construct
  source 1..2289: mol_type = other DNA
atggccttaccagtgaccgccttgctcctgccgctggccttgctgctccacgccgccaggccggaagtgcagctggttgaatctggcggaggactggttcagcctggcggatctctgagactgtcttgtgccgccagcggcttcagcttcagcgacttttggatgagctgggtccgacaggcccctggcaaaggacttgaatgggtcgccacaatcagccaggccggcagcgagaaggactacgtggactctgtgaagggcagattcaccatcagccgggacaacgccaagaagtccctgtacctccagatgaacagcctgagagccgaggacaccgccgtgtactattgtgcctctggcgtgtacagcttcgactacagaggccagggcaccctggtcacagtctcttctggtaccggcggaggcggatctggcggcggaggtagcggtggcggaggatctgaattcgagatcgtgctgacacagtctcccgccacactgtcactgtctccaggcgaaagagccacactgagctgtagagccagcagcaacgtgatctccagctacgtgcactggtatcagcagaagcctggacaggcccctcggctgctgatctacagcacaagcaatctggcctctggcatccccgccagattttctggctctggaagcggcaccgacttcaccctgaccataagcagcctggaacctgaggacttcgccgtgtactactgccagcagtatagcggctaccctctgaccttcggccagggcacaagactggaaatcaaactcgagatccagaaccctgatcctgccgtgtaccagctgcgggatagcaagagcagcgacaagagcgtgtgtctgttcaccgacttcgacagccagaccaacgtgtcccagagcaaggactccgacgtgtacatcaccgataagtgcgtgctggacatgcggagcatggacttcaagagcaactccgccgtggcctggtccaacaagtccgatttcgcctgcgccaacgccttcaacaacagcattatccccgaggacacattcttcccaagccccgagagcagctgcggctttaccagcgagagctaccagcagggcgtgctgagcgccaccatcctgtacgagatcctgctgggcaaggccaccctgtacgccgtgctggtgtctgccctggtgctgatggctatggtcaagcggaaggacagccggggacgcgccaagagaagcggatctggcgtgaagcagaccctgaatttcgacctgctgaagctggctggcgacgtggaatccaacccaggccctactagtatggactggatttggcgcatccttttccttgtcggcgctgctaccggcgcgcattccttcgaagaagtgcaactggtggaaagtggcggcggactggtgcaacctggaagaagcctgagactgtcctgtgccgccagcggctactctatcacaagcgcctactactggaactgggtccgacaggctcctggcaaaggactggaatgggtgtcctacatcagctacgacggcagaaacaactacaaccccagcctgaagaaccgcttcaccatcagccgggacaacgccaagaagtccctgtacctccagatgaacagcctgagagccgaggacacagccctgtactattgcgccaaagagggcgactacgacgtcggcaactactacgctatggactactggggccagggaaccaccgtgactgtctcttctacgcgtgaggacctgaagaacgtgttcccacctgaggtggccgtgttcgagcctagcgaggccgagatcagccacacccagaaagccaccctcgtgtgcctggctaccggcttctaccccgaccatgtggaactgtcttggtgggtcaacggcaaagaggtgcacagcggcgtgtgtaccgacccccagccactgaaagaacagcccgccctgaacgacagccggtactgcctgagcagcagactgagagtgtccgccaccttctggcagaacccccggaaccacttcagatgccaggtgcagttctacggcctgagcgagaacgacgagtggacccaggacagagccaagcccgtgacccagatcgtgtctgccgaagcctggggcagagccgattgcgacgtgaagctggtggaaaagagcttcgagacagacaccaacctgaacttccagaacctgagcgtgatcggcttcagaatcctgctgctgaaagtggccggctttaacctgctgatgaccctgcggctgtggtccagc

SEQ ID NO: 4555 - DNA, 2286 bp, synthetic construct
  source 1..2286: mol_type = other DNA
atggccttaccagtgaccgccttgctcctgccgctggccttgctgctccacgccgccaggccggaagtgcagctggttgaatctggcggaggactggttcagcctggcggatctctgagactgtcttgtgccgccagcggcttcagcttcagcgacttttggatgagctgggtccgacaggcccctggcaaaggacttgaatgggtcgccacaatcagccaggccggcagcgagaaggactacgtggactctgtgaagggcagattcaccatcagccgggacaacgccaagaagtccctgtacctccagatgaacagcctgagagccgaggacaccgccgtgtactattgtgcctctggcgtgtacagcttcgactacagaggccagggcaccctggtcacagtctcttctggtaccggcggaggcggatctggcggcggaggtagcggtggcggaggatctgaattcgacgtggtcatgacacagaccccactgagcctgcctgtgtctctgggagatcaggccagcatctcctgtagaagcagccagagcctggtgcacagcaacggcaacacctacctgcggtggtatctccagaagcctggacagagccccaaggtgctgatctacaaggtgtccaacagagtgtccggcgtgcccgatagattttctggcagcggctctggcaccgacttcaccctgaagatcaatagagtggaagccgaggacctgggcgtgtacttctgtagccagagcacccatgtgccttggacctttggcggaggcaccaagctggaaatcaagctcgagatccagaaccctgatcctgccgtgtaccagctgcgggatagcaagagcagcgacaagagcgtgtgtctgttcaccgacttcgacagccagaccaacgtgtcccagagcaaggactccgacgtgtacatcaccgataagtgcgtgctggacatgcggagcatggacttcaagagcaactccgccgtggcctggtccaacaagtccgatttcgcctgcgccaacgccttcaacaacagcattatccccgaggacacattcttcccaagccccgagagcagctgcggctttaccagcgagagctaccagcagggcgtgctgagcgccaccatcctgtacgagatcctgctgggcaaggccaccctgtacgccgtgctggtgtctgccctggtgctgatggctatggtcaagcggaaggacagccggggacgcgccaagagaagcggatctggcgtgaagcagaccctgaatttcgacctgctgaagctggctggcgacgtggaatccaacccaggccctactagtatggactggatttggcgcatccttttccttgtcggcgctgctaccggcgcgcattccttcgaaggcgtgaagctggacgagacaggcggaggacttgttcaacctggcggagccatgaagctgagctgtgtgaccagcggctttaccttcggccactactggatgaactgggtccgacagtcccctgagaaaggactggaatgggtcgcccagttcagaaacaagccctacaactacgaaacctactacagcgacagcgtgaagggcagattcaccatcagccgggacgacagcaagtccagcgtgtacctccagatgaacaacctgcgcgtggaagataccggcatctactactgtaccggggccagctacggcatggaatatctcggccagggcaccagcgtgaccgtgtctacaacgcgtgaggacctgaagaacgtgttcccacctgaggtggccgtgttcgagcctagcgaggccgagatcagccacacccagaaagccaccctcgtgtgcctggctaccggcttctaccccgaccatgtggaactgtcttggtgggtcaacggcaaagaggtgcacagcggcgtgtgtaccgacccccagccactgaaagaacagcccgccctgaacgacagccggtactgcctgagcagcagactgagagtgtccgccaccttctggcagaacccccggaaccacttcagatgccaggtgcagttctacggcctgagcgagaacgacgagtggacccaggacagagccaagcccgtgacccagatcgtgtctgccgaagcctggggcagagccgattgcgacgtgaagctggtggaaaagagcttcgagacagacaccaacctgaacttccagaacctgagcgtgatcggcttcagaatcctgctgctgaaagtggccggctttaacctgctgatgaccctgcggctgtggtccagc

SEQ ID NO: 4556 - DNA, 2304 bp, synthetic construct
  source 1..2304: mol_type = other DNA
atggccttaccagtgaccgccttgctcctgccgctggccttgctgctccacgccgccaggccggaagtgcagctggttgaatctggcggaggactggttcagcctggcggatctctgagactgtcttgtgccgccagcggcttcagcttcagcgacttttggatgagctgggtccgacaggcccctggcaaaggacttgaatgggtcgccacaatcagccaggccggcagcgagaaggactacgtggactctgtgaagggcagattcaccatcagccgggacaacgccaagaagtccctgtacctccagatgaacagcctgagagccgaggacaccgccgtgtactattgtgcctctggcgtgtacagcttcgactacagaggccagggcaccctggtcacagtctcttctggtaccggcggaggcggatctggcggcggaggtagcggtggcggaggatctgaattccaggtgcaactggtggaatctggcggcaatctggttcagcctggcggctctctgagactgtcttgtgccgccagcggcttcaccttcggcagcttttctatgagctgggtccgacaagctcctggcggaggacttgaatgggtggcaggactgtctgccagaagcagcctgacacactacgccgactctgtgaagggcagattcaccatcagccgggacaacgccaagaacagcgtgtacctccagatgaacagcctgagagtggaagataccgccgtgtactactgcgccagaagaagctacgacagcagcggctactggggccacttctacagctacatggatgtgtggggccagggcaccctggttacagtttctctcgagatccagaaccctgatcctgccgtgtaccagctgcgggatagcaagagcagcgacaagagcgtgtgtctgttcaccgacttcgacagccagaccaacgtgtcccagagcaaggactccgacgtgtacatcaccgataagtgcgtgctggacatgcggagcatggacttcaagagcaactccgccgtggcctggtccaacaagtccgatttcgcctgcgccaacgccttcaacaacagcattatccccgaggacacattcttcccaagccccgagagcagctgcggctttaccagcgagagctaccagcagggcgtgctgagcgccaccatcctgtacgagatcctgctgggcaaggccaccctgtacgccgtgctggtgtctgccctggtgctgatggctatggtcaagcggaaggacagccggggacgcgccaagagaagcggatctggcgtgaagcagaccctgaatttcgacctgctgaagctggctggcgacgtggaatccaacccaggccctactagtatggactggatttggcgcatccttttccttgtcggcgctgctaccggcgcgcattccttcgaatctgtgctgacccagcctagctccgtgtctgctgctcctggacagaaagtgaccatctcctgtagcggcagcaccagcaacatcggcaacaactacgtgtcctggtatcagcagcaccccggcaaggcccctaagctgatgatctacgacgtgtccaagaggcccagcggcgtgccagatagattttccggcagcaagagcggcaacagcgccagcctggatattagcggactccagtctgaggacgaggccgactactattgcgccgcctgggatgatagcctgagcgagtttctgtttggcaccggcaccaagctgacagtgcttggaacgcgtgaggacctgaagaacgtgttcccacctgaggtggccgtgttcgagcctagcgaggccgagatcagccacacccagaaagccaccctcgtgtgcctggctaccggcttctaccccgaccatgtggaactgtcttggtgggtcaacggcaaagaggtgcacagcggcgtgtgtaccgacccccagccactgaaagaacagcccgccctgaacgacagccggtactgcctgagcagcagactgagagtgtccgccaccttctggcagaacccccggaaccacttcagatgccaggtgcagttctacggcctgagcgagaacgacgagtggacccaggacagagccaagcccgtgacccagatcgtgtctgccgaagcctggggcagagccgattgcgacgtgaagctggtggaaaagagcttcgagacagacaccaacctgaacttccagaacctgagcgtgatcggcttcagaatcctgctgctgaaagtggccggctttaacctgctgatgaccctgcggctgtggtccagc

SEQ ID NO: 4557 - DNA, 2289 bp, synthetic construct
  source 1..2289: mol_type = other DNA
atggccttaccagtgaccgccttgctcctgccgctggccttgctgctccacgccgccaggccggaagtgcagctggttgaatctggcggaggactggttcagcctggcggatctctgagactgtcttgtgccgccagcggcttcagcttcagcgacttttggatgagctgggtccgacaggcccctggcaaaggacttgaatgggtcgccacaatcagccaggccggcagcgagaaggactacgtggactctgtgaagggcagattcaccatcagccgggacaacgccaagaagtccctgtacctccagatgaacagcctgagagccgaggacaccgccgtgtactattgtgcctctggcgtgtacagcttcgactacagaggccagggcaccctggtcacagtctcttctggtaccggcggaggcggatctggcggcggaggtagcggtggcggaggatctgaattcgacgtggtcatgacacagagcccttctagcctgtctgccagcgtgggcgacagagtgacaatcacctgtcagagcagcctggacatcagccactacctgaactggtatcagcagaagcccggcaaggcccctaagctgctgatctacgacgccagcaatctggaaaccggcgtgcccagcagattttctggcagcggaagcggcacccacttcaccttcacaatatccagcctccagcctgaggacttcgccacctactactgccagcagtacgacaacctgcctctgacctttggcggaggcaccaagctggaaatcaagagactcgagatccagaaccctgatcctgccgtgtaccagctgcgggatagcaagagcagcgacaagagcgtgtgtctgttcaccgacttcgacagccagaccaacgtgtcccagagcaaggactccgacgtgtacatcaccgataagtgcgtgctggacatgcggagcatggacttcaagagcaactccgccgtggcctggtccaacaagtccgatttcgcctgcgccaacgccttcaacaacagcattatccccgaggacacattcttcccaagccccgagagcagctgcggctttaccagcgagagctaccagcagggcgtgctgagcgccaccatcctgtacgagatcctgctgggcaaggccaccctgtacgccgtgctggtgtctgccctggtgctgatggctatggtcaagcggaaggacagccggggacgcgccaagagaagcggatctggcgtgaagcagaccctgaatttcgacctgctgaagctggctggcgacgtggaatccaacccaggccctactagtatggactggatttggcgcatccttttccttgtcggcgctgctaccggcgcgcattccttcgaacaagttcaactggttcaatcaggcggaggcgtggtgcaacctggtggctctctgagagtgtcttgtgctgcctctggcgtgaccctgagcgactatggaatgcactgggtccgacaggcccctggcaaaggacttgagtgggtcgccttcatcagaaacgacggcagcgacaagtattacgccgacagcgtgaagggcagattcaccatcagccgggacaacagcgagaaaaccgtgtctctccagatgtctagcctgagagccgaggacaccgccgtgtactactgtgccaagaatggcgagagcggccctctggactactggtatctggatctgtggggcagaggcaccctggtcacagtctcttctacgcgtgaggacctgaagaacgtgttcccacctgaggtggccgtgttcgagcctagcgaggccgagatcagccacacccagaaagccaccctcgtgtgcctggctaccggcttctaccccgaccatgtggaactgtcttggtgggtcaacggcaaagaggtgcacagcggcgtgtgtaccgacccccagccactgaaagaacagcccgccctgaacgacagccggtactgcctgagcagcagactgagagtgtccgccaccttctggcagaacccccggaaccacttcagatgccaggtgcagttctacggcctgagcgagaacgacgagtggacccaggacagagccaagcccgtgacccagatcgtgtctgccgaagcctggggcagagccgattgcgacgtgaagctggtggaaaagagcttcgagacagacaccaacctgaacttccagaacctgagcgtgatcggcttcagaatcctgctgctgaaagtggccggctttaacctgctgatgaccctgcggctgtggtccagc

SEQ ID NO: 4558 - DNA, 2301 bp, synthetic construct
  source 1..2301: mol_type = other DNA
atggccttaccagtgaccgccttgctcctgccgctggccttgctgctccacgccgccaggccggaagtgcagctggttgaatctggcggaggactggttcagcctggcggatctctgagactgtcttgtgccgccagcggcttcagcttcagcgacttttggatgagctgggtccgacaggcccctggcaaaggacttgaatgggtcgccacaatcagccaggccggcagcgagaaggactacgtggactctgtgaagggcagattcaccatcagccgggacaacgccaagaagtccctgtacctccagatgaacagcctgagagccgaggacaccgccgtgtactattgtgcctctggcgtgtacagcttcgactacagaggccagggcaccctggtcacagtctcttctggtaccggcggaggcggatctggcggcggaggtagcggtggcggaggatctgaattcagctacgagctgacacagcctccatccgtgtctggcacacctggacagagagtggctatctcctgtagcggcagcagcagcaacatcggcaccagaatggtcacctggtatcagcacgtgccaggcacagcccctaagctgctgatcttcaacaacaaccagcggcctagcggcgtgcccgatagattttctgccagcaagagcggcacaagcgccagcctggctatcatcggactccagtctgacgacgaggccgactactactgtgccacctgggacgacaacgtgaagtcctacgtgttcggcaccggcaccaaagtgacagtgcttggaagtagactcgagatccagaaccctgatcctgccgtgtaccagctgcgggatagcaagagcagcgacaagagcgtgtgtctgttcaccgacttcgacagccagaccaacgtgtcccagagcaaggactccgacgtgtacatcaccgataagtgcgtgctggacatgcggagcatggacttcaagagcaactccgccgtggcctggtccaacaagtccgatttcgcctgcgccaacgccttcaacaacagcattatccccgaggacacattcttcccaagccccgagagcagctgcggctttaccagcgagagctaccagcagggcgtgctgagcgccaccatcctgtacgagatcctgctgggcaaggccaccctgtacgccgtgctggtgtctgccctggtgctgatggctatggtcaagcggaaggacagccggggacgcgccaagagaagcggatctggcgtgaagcagaccctgaatttcgacctgctgaagctggctggcgacgtggaatccaacccaggccctactagtatggactggatttggcgcatccttttccttgtcggcgctgctaccggcgcgcattccttcgaacttgaaatggcccaggttcagctccagcagtggggagctggactgctgaagcctagcgagacactgagcctgacctgtgctgtgtacggcggcagcttcagcggctactactggtcctggatcagacagcctcctggcaaaggactggaatggatcggcgagatcaaccacagcggctccaccaactacaaccccagcctgaagtccagagtgaccatcagcgtggacaccagcaagaaccagttctccctgaagctgagcagcgtgacagccgctgataccgccgtgtactattgcgctagagcccctcagtcttggtacgtgggagatgtgtggggccagggcacactggttacagtgtcatctacgcgtgaggacctgaagaacgtgttcccacctgaggtggccgtgttcgagcctagcgaggccgagatcagccacacccagaaagccaccctcgtgtgcctggctaccggcttctaccccgaccatgtggaactgtcttggtgggtcaacggcaaagaggtgcacagcggcgtgtgtaccgacccccagccactgaaagaacagcccgccctgaacgacagccggtactgcctgagcagcagactgagagtgtccgccaccttctggcagaacccccggaaccacttcagatgccaggtgcagttctacggcctgagcgagaacgacgagtggacccaggacagagccaagcccgtgacccagatcgtgtctgccgaagcctggggcagagccgattgcgacgtgaagctggtggaaaagagcttcgagacagacaccaacctgaacttccagaacctgagcgtgatcggcttcagaatcctgctgctgaaagtggccggctttaacctgctgatgaccctgcggctgtggtccagc

SEQ ID NO: 4559 - DNA, 2292 bp, synthetic construct
  source 1..2292: mol_type = other DNA
atggccttaccagtgaccgccttgctcctgccgctggccttgctgctccacgccgccaggccggaagtgcagctggttgaatctggcggaggactggttcagcctggcggatctctgagactgtcttgtgccgccagcggcttcagcttcagcgacttttggatgagctgggtccgacaggcccctggcaaaggacttgaatgggtcgccacaatcagccaggccggcagcgagaaggactacgtggactctgtgaagggcagattcaccatcagccgggacaacgccaagaagtccctgtacctccagatgaacagcctgagagccgaggacaccgccgtgtactattgtgcctctggcgtgtacagcttcgactacagaggccagggcaccctggtcacagtctcttctggtaccggcggaggcggatctggcggcggaggtagcggtggcggaggatctgaattccagtctgtgctgacacagcctcctagcctgtctgtggcccctggaaagacagccagcatcacatgcggcggcaacaacatcggcatgaagtccgtgcactggtatcagcagaggccaggacaggctcctgtgctggtcatctactacgacagcgacagaccctctggcatccccggcagattttccggcagcaactctggcaataccgccacactgaccatctccagagtggaagctggcgacgaggccgactactactgccaagtgtgggataccaccggcgatcaccctggctatgtgtttggcaccggcaccaaagtgacagtgcttctcgagatccagaaccctgatcctgccgtgtaccagctgcgggatagcaagagcagcgacaagagcgtgtgtctgttcaccgacttcgacagccagaccaacgtgtcccagagcaaggactccgacgtgtacatcaccgataagtgcgtgctggacatgcggagcatggacttcaagagcaactccgccgtggcctggtccaacaagtccgatttcgcctgcgccaacgccttcaacaacagcattatccccgaggacacattcttcccaagccccgagagcagctgcggctttaccagcgagagctaccagcagggcgtgctgagcgccaccatcctgtacgagatcctgctgggcaaggccaccctgtacgccgtgctggtgtctgccctggtgctgatggctatggtcaagcggaaggacagccggggacgcgccaagagaagcggatctggcgtgaagcagaccctgaatttcgacctgctgaagctggctggcgacgtggaatccaacccaggccctactagtatggactggatttggcgcatccttttccttgtcggcgctgctaccggcgcgcattccttcgaacaagttcaactggttcagagcggagccgaagtgaagaaacctggcagcagcgtgaaggtgtcctgcaaagcaagcggcggcacctttagcagctacgccatctcttgggtccgacaggcacctggacaaggactggaatggatgggcggcatcatccccatcttcggcacagccaattacgcccagaaattccagggcagagtgaccatcaccgccgacgagtctacaagcaccgcctacatggaactgagcagcctgagaagcgaggacaccgccgtgtactattgtgccagaggcgtgtacggctacagcggctctgccccttatgatgagtggggccagggaaccctggtcaccgtttcttctacgcgtgaggacctgaagaacgtgttcccacctgaggtggccgtgttcgagcctagcgaggccgagatcagccacacccagaaagccaccctcgtgtgcctggctaccggcttctaccccgaccatgtggaactgtcttggtgggtcaacggcaaagaggtgcacagcggcgtgtgtaccgacccccagccactgaaagaacagcccgccctgaacgacagccggtactgcctgagcagcagactgagagtgtccgccaccttctggcagaacccccggaaccacttcagatgccaggtgcagttctacggcctgagcgagaacgacgagtggacccaggacagagccaagcccgtgacccagatcgtgtctgccgaagcctggggcagagccgattgcgacgtgaagctggtggaaaagagcttcgagacagacaccaacctgaacttccagaacctgagcgtgatcggcttcagaatcctgctgctgaaagtggccggctttaacctgctgatgaccctgcggctgtggtccagc

SEQ ID NO: 4560 - DNA, 2286 bp, synthetic construct
  source 1..2286: mol_type = other DNA
atggccttaccagtgaccgccttgctcctgccgctggccttgctgctccacgccgccaggccggaagtgcagctggttgaatctggcggaggactggttcagcctggcggatctctgagactgtcttgtgccgccagcggcttcagcttcagcgacttttggatgagctgggtccgacaggcccctggcaaaggacttgaatgggtcgccacaatcagccaggccggcagcgagaaggactacgtggactctgtgaagggcagattcaccatcagccgggacaacgccaagaagtccctgtacctccagatgaacagcctgagagccgaggacaccgccgtgtactattgtgcctctggcgtgtacagcttcgactacagaggccagggcaccctggtcacagtctcttctggtaccggcggaggcggatctggcggcggaggtagcggtggcggaggatctgaattcgaggtgcaactggttgagtctggcggaggactggtgcagcctggaagaagcctgagactgtcttgtgccgccagcggcttcaccttcgacgattatgccatgcactgggtccgacaggcccctggcaaaggacttgaatgggtgtccggcatctcctggaacagcggctctatcggctacgccgattccgtgaagggcagattcaccatcagccgggacaacgccaagaacagcctgtacctccagatgaactccctgagagccgaggacacagccctgtactactgcgccaaagacaaaggcggaggctactacgacttttggagcggcagcgattattggggccagggcacactggtcacagtgtctagcctcgagatccagaaccctgatcctgccgtgtaccagctgcgggatagcaagagcagcgacaagagcgtgtgtctgttcaccgacttcgacagccagaccaacgtgtcccagagcaaggactccgacgtgtacatcaccgataagtgcgtgctggacatgcggagcatggacttcaagagcaactccgccgtggcctggtccaacaagtccgatttcgcctgcgccaacgccttcaacaacagcattatccccgaggacacattcttcccaagccccgagagcagctgcggctttaccagcgagagctaccagcagggcgtgctgagcgccaccatcctgtacgagatcctgctgggcaaggccaccctgtacgccgtgctggtgtctgccctggtgctgatggctatggtcaagcggaaggacagccggggacgcgccaagagaagcggatctggcgtgaagcagaccctgaatttcgacctgctgaagctggctggcgacgtggaatccaacccaggccctactagtatggactggatttggcgcatccttttccttgtcggcgctgctaccggcgcgcattccttcgaatcttctgagctgacacaggaccctgccgtgtctgttgctctgggccagacagtgcggattacctgtcagggcgatagcctgagaagctactacgcctcctggtatcagcagaagccaggccaggctcctgtgctggtcatctacggcaagaacaacagacccagcggcatccccgatagattcagcggaagcagctctggcaataccgccagcctgacaattactggcgctcaggccgaggacgaggccgactactactgcaacagcagagatagcagcggctgggttttcggcggaggcacaaaactgacagtgctgacgcgtgaggacctgaagaacgtgttcccacctgaggtggccgtgttcgagcctagcgaggccgagatcagccacacccagaaagccaccctcgtgtgcctggctaccggcttctaccccgaccatgtggaactgtcttggtgggtcaacggcaaagaggtgcacagcggcgtgtgtaccgacccccagccactgaaagaacagcccgccctgaacgacagccggtactgcctgagcagcagactgagagtgtccgccaccttctggcagaacccccggaaccacttcagatgccaggtgcagttctacggcctgagcgagaacgacgagtggacccaggacagagccaagcccgtgacccagatcgtgtctgccgaagcctggggcagagccgattgcgacgtgaagctggtggaaaagagcttcgagacagacaccaacctgaacttccagaacctgagcgtgatcggcttcagaatcctgctgctgaaagtggccggctttaacctgctgatgaccctgcggctgtggtccagc

SEQ ID NO: 4561 - DNA, 2313 bp, synthetic construct
  source 1..2313: mol_type = other DNA
atggccttaccagtgaccgccttgctcctgccgctggccttgctgctccacgccgccaggccggaagtgcagctggttgaatctggcggaggactggttcagcctggcggatctctgagactgtcttgtgccgccagcggcttcagcttcagcgacttttggatgagctgggtccgacaggcccctggcaaaggacttgaatgggtcgccacaatcagccaggccggcagcgagaaggactacgtggactctgtgaagggcagattcaccatcagccgggacaacgccaagaagtccctgtacctccagatgaacagcctgagagccgaggacaccgccgtgtactattgtgcctctggcgtgtacagcttcgactacagaggccagggcaccctggtcacagtctcttctggtaccggcggaggcggatctggcggcggaggtagcggtggcggaggatctgaattcgaagtgcagctccagcagtctggacctggcctggttaagcctagccagacactgagcctgacctgtgccatcagcggcgatagcgtgctgagcaacagcgacacctggaactggatcagacagagccctagcagaggactggaatggctgggcagaacctaccacagaagcacttggtacgacgactacgccagctctgtgcggggcagagtgtccatcaatgtggacaccagcaagaaccagtacagcctgcaactgaacgccgtgacacctgaggataccggcgtgtactactgcgccagagacagactccaggacggcaactcttggagcgacgcctttgatgtgtggggccagggcacaatggtcaccgtttctagcctcgagatccagaaccctgatcctgccgtgtaccagctgcgggatagcaagagcagcgacaagagcgtgtgtctgttcaccgacttcgacagccagaccaacgtgtcccagagcaaggactccgacgtgtacatcaccgataagtgcgtgctggacatgcggagcatggacttcaagagcaactccgccgtggcctggtccaacaagtccgatttcgcctgcgccaacgccttcaacaacagcattatccccgaggacacattcttcccaagccccgagagcagctgcggctttaccagcgagagctaccagcagggcgtgctgagcgccaccatcctgtacgagatcctgctgggcaaggccaccctgtacgccgtgctggtgtctgccctggtgctgatggctatggtcaagcggaaggacagccggggacgcgccaagagaagcggatctggcgtgaagcagaccctgaatttcgacctgctgaagctggctggcgacgtggaatccaacccaggccctactagtatggactggatttggcgcatccttttccttgtcggcgctgctaccggcgcgcattccttcgaacaatctgctctgacacagcctgccagcgtgtcaggatctcctggacagagcatcaccatctcttgcaccggcaccagctctgatgtcggcggctacaattacgtgtcctggtatcagcagcaccccggcaaggcccctaagctgatgatctacgacgtgtccaacagacccagcggcgtgtccaatagattctccggcagcaagagcggcaacaccgccagcctgacaatttctggactgcaagccgaggacgaggccgactactactgtagcagctacaccagcagcagcacactggtgtacgtgttcggcacaggcaccaaagtgaccgtgcttacgcgtgaggacctgaagaacgtgttcccacctgaggtggccgtgttcgagcctagcgaggccgagatcagccacacccagaaagccaccctcgtgtgcctggctaccggcttctaccccgaccatgtggaactgtcttggtgggtcaacggcaaagaggtgcacagcggcgtgtgtaccgacccccagccactgaaagaacagcccgccctgaacgacagccggtactgcctgagcagcagactgagagtgtccgccaccttctggcagaacccccggaaccacttcagatgccaggtgcagttctacggcctgagcgagaacgacgagtggacccaggacagagccaagcccgtgacccagatcgtgtctgccgaagcctggggcagagccgattgcgacgtgaagctggtggaaaagagcttcgagacagacaccaacctgaacttccagaacctgagcgtgatcggcttcagaatcctgctgctgaaagtggccggctttaacctgctgatgaccctgcggctgtggtccagc

SEQ ID NO: 4562 - DNA, 2247 bp, synthetic construct
  source 1..2247: mol_type = other DNA
atggccttaccagtgaccgccttgctcctgccgctggccttgctgctccacgccgccaggccggaagtgcagctggttgaatctggcggaggactggttcagcctggcggatctctgagactgtcttgtgccgccagcggcttcagcttcagcgacttttggatgagctgggtccgacaggcccctggcaaaggacttgaatgggtcgccacaatcagccaggccggcagcgagaaggactacgtggactctgtgaagggcagattcaccatcagccgggacaacgccaagaagtccctgtacctccagatgaacagcctgagagccgaggacaccgccgtgtactattgtgcctctggcgtgtacagcttcgactacagaggccagggcaccctggtcacagtctcttctggtaccggcggaggcggatctggcggcggaggtagcggtggcggaggatctgaattccaggtgcaactggttcagtctggggccgaagtgaagaaacctggggcctctgtgaaggtgtcctgcaaggcttccggctacacctttaccagctacgacatcaactgggtccgacaggccacaggccaaggactggaatggatgggctggatgaaccccaacagcggcaataccggctacgcccagaaattccagggcagagtgaccatgaccagaaacaccagcatcagcaccgcctacatggaactgagcagcctgagaagcgaggacaccgccgtgtactattgcgccagaggcgacagcaccaaggtggaaatcaaactcgagatccagaaccctgatcctgccgtgtaccagctgcgggatagcaagagcagcgacaagagcgtgtgtctgttcaccgacttcgacagccagaccaacgtgtcccagagcaaggactccgacgtgtacatcaccgataagtgcgtgctggacatgcggagcatggacttcaagagcaactccgccgtggcctggtccaacaagtccgatttcgcctgcgccaacgccttcaacaacagcattatccccgaggacacattcttcccaagccccgagagcagctgcggctttaccagcgagagctaccagcagggcgtgctgagcgccaccatcctgtacgagatcctgctgggcaaggccaccctgtacgccgtgctggtgtctgccctggtgctgatggctatggtcaagcggaaggacagccggggacgcgccaagagaagcggatctggcgtgaagcagaccctgaatttcgacctgctgaagctggctggcgacgtggaatccaacccaggccctactagtatggactggatttggcgcatccttttccttgtcggcgctgctaccggcgcgcattccttcgaacaatctgtgctgacccagcctagatccgtgtctggctctcctggacagagcgtgaccatctcttgtaccggcaccagctctgatgtcggcggctacaattacgtgtcctggtatcagcagcaccccggcgaagcccctaagctgattatctacgacgccgacaagcggcccagcggcatcagcaatagattcagctctggcaagagcggcaacaccgccagcctgacaatcagcggactccaggtggaagatgaggccgactactactgctgctcctatgccggcggaagcacctgggttttcggaggcggtacaaaagtgaccgtgctgacgcgtgaggacctgaagaacgtgttcccacctgaggtggccgtgttcgagcctagcgaggccgagatcagccacacccagaaagccaccctcgtgtgcctggctaccggcttctaccccgaccatgtggaactgtcttggtgggtcaacggcaaagaggtgcacagcggcgtgtgtaccgacccccagccactgaaagaacagcccgccctgaacgacagccggtactgcctgagcagcagactgagagtgtccgccaccttctggcagaacccccggaaccacttcagatgccaggtgcagttctacggcctgagcgagaacgacgagtggacccaggacagagccaagcccgtgacccagatcgtgtctgccgaagcctggggcagagccgattgcgacgtgaagctggtggaaaagagcttcgagacagacaccaacctgaacttccagaacctgagcgtgatcggcttcagaatcctgctgctgaaagtggccggctttaacctgctgatgaccctgcggctgtggtccagc

SEQ ID NO: 4563 - DNA, 2313 bp, synthetic construct
  source 1..2313: mol_type = other DNA
atggccttaccagtgaccgccttgctcctgccgctggccttgctgctccacgccgccaggccggaagtgcagctggttgaatctggcggaggactggttcagcctggcggatctctgagactgtcttgtgccgccagcggcttcagcttcagcgacttttggatgagctgggtccgacaggcccctggcaaaggacttgaatgggtcgccacaatcagccaggccggcagcgagaaggactacgtggactctgtgaagggcagattcaccatcagccgggacaacgccaagaagtccctgtacctccagatgaacagcctgagagccgaggacaccgccgtgtactattgtgcctctggcgtgtacagcttcgactacagaggccagggcaccctggtcacagtctcttctggtaccggcggaggcggatctggcggcggaggtagcggtggcggaggatctgaattcgaagtgcagctccagcagtctggacctggcctggttaagcctagccagacactgagcctgacctgtgccatcagcggcgatagcgtgtcctctaatagcgccgcctggaactggatcagacagagccctagcagaggactggaatggctgggcagaacctactaccgcagcaagtggtacagcgactacgccgtgtccgtgaagtcccggatcaccatcaatcccgacaccagcaagaaccagttcagcctgcaactgaacagcgtgacccctgaggataccgccgtgtactactgcgccagagatccctacgacttttggagcggctaccccgacgcctttgacatctggggacagggcacaatggtcaccgtttctagcctcgagatccagaaccctgatcctgccgtgtaccagctgcgggatagcaagagcagcgacaagagcgtgtgtctgttcaccgacttcgacagccagaccaacgtgtcccagagcaaggactccgacgtgtacatcaccgataagtgcgtgctggacatgcggagcatggacttcaagagcaactccgccgtggcctggtccaacaagtccgatttcgcctgcgccaacgccttcaacaacagcattatccccgaggacacattcttcccaagccccgagagcagctgcggctttaccagcgagagctaccagcagggcgtgctgagcgccaccatcctgtacgagatcctgctgggcaaggccaccctgtacgccgtgctggtgtctgccctggtgctgatggctatggtcaagcggaaggacagccggggacgcgccaagagaagcggatctggcgtgaagcagaccctgaatttcgacctgctgaagctggctggcgacgtggaatccaacccaggccctactagtatggactggatttggcgcatccttttccttgtcggcgctgctaccggcgcgcattccttcgaacaatctgctctgacacagcctgccagcgtgtcaggatctcctggacagagcatcaccatctcttgcaccggcaccagctctgatgtcggcggctacaattacgtgtcctggtatcagcagcaccccggcaaggcccctaaagtgattatcagcgaagtgaacaacagacccagcggcgtgtcccacagattcagcggctctaagtctggcaacaccgccagcctgacaatctctggactgcaagccgaggacgaggccgactacttctgtagcagctacaccagcggcagaaccctgtacgtgttcggcacaggcagcaaagtgacagtgctgggaacgcgtgaggacctgaagaacgtgttcccacctgaggtggccgtgttcgagcctagcgaggccgagatcagccacacccagaaagccaccctcgtgtgcctggctaccggcttctaccccgaccatgtggaactgtcttggtgggtcaacggcaaagaggtgcacagcggcgtgtgtaccgacccccagccactgaaagaacagcccgccctgaacgacagccggtactgcctgagcagcagactgagagtgtccgccaccttctggcagaacccccggaaccacttcagatgccaggtgcagttctacggcctgagcgagaacgacgagtggacccaggacagagccaagcccgtgacccagatcgtgtctgccgaagcctggggcagagccgattgcgacgtgaagctggtggaaaagagcttcgagacagacaccaacctgaacttccagaacctgagcgtgatcggcttcagaatcctgctgctgaaagtggccggctttaacctgctgatgaccctgcggctgtggtccagc

SEQ ID NO: 4564 - DNA, 2310 bp, synthetic construct
  source 1..2310: mol_type = other DNA
atggccttaccagtgaccgccttgctcctgccgctggccttgctgctccacgccgccaggccggaagtgcagctggttgaatctggcggaggactggttcagcctggcggatctctgagactgtcttgtgccgccagcggcttcagcttcagcgacttttggatgagctgggtccgacaggcccctggcaaaggacttgaatgggtcgccacaatcagccaggccggcagcgagaaggactacgtggactctgtgaagggcagattcaccatcagccgggacaacgccaagaagtccctgtacctccagatgaacagcctgagagccgaggacaccgccgtgtactattgtgcctctggcgtgtacagcttcgactacagaggccagggcaccctggtcacagtctcttctggtaccggcggaggcggatctggcggcggaggtagcggtggcggaggatctgaattccaatctgctctgacacagcctgccagcgcctctggatctcctggacagagcgtgaccatctcctgtaccggcacctcttctgatgtcggcggctacaactacgtgtcctggtatcagcagcaccccggcaaggcccctaagctgatgatctacgacgtgtccaacagacccagcggcgtgtccaatagattctccggcagcaagagcggcaacaccgccagcctgacaatttctggactgcaagccgaggacgaggccgactactactgtagcagctacaccagcagcagcacactgtacgtgttcggcacaggcacccagctcacagttcttctcgagatccagaaccctgatcctgccgtgtaccagctgcgggatagcaagagcagcgacaagagcgtgtgtctgttcaccgacttcgacagccagaccaacgtgtcccagagcaaggactccgacgtgtacatcaccgataagtgcgtgctggacatgcggagcatggacttcaagagcaactccgccgtggcctggtccaacaagtccgatttcgcctgcgccaacgccttcaacaacagcattatccccgaggacacattcttcccaagccccgagagcagctgcggctttaccagcgagagctaccagcagggcgtgctgagcgccaccatcctgtacgagatcctgctgggcaaggccaccctgtacgccgtgctggtgtctgccctggtgctgatggctatggtcaagcggaaggacagccggggacgcgccaagagaagcggatctggcgtgaagcagaccctgaatttcgacctgctgaagctggctggcgacgtggaatccaacccaggccctactagtatggactggatttggcgcatccttttccttgtcggcgctgctaccggcgcgcattccttcgaagaagtgcagctccagcagtctggacctggcctggttaagcctagccagacactgagcctgacctgtgccatcagcggcgattccatgctgagcaacagcgacacctggaactggatcagacagagccccagcagaggcctggaatggctgggcagaacataccacagaagcacttggtacgacgactacgccagctctgtgcggggcagagtgtccatcaatgtggacaccagcaagaaccagtacagcctgcaactgaacgccgtgacacctgaggataccggcgtgtactactgtgccagagtgcggctccaggacggcaattcttggagcgacgcctttgatgtgtggggccagggcacaatggtcaccgtttctagcacgcgtgaggacctgaagaacgtgttcccacctgaggtggccgtgttcgagcctagcgaggccgagatcagccacacccagaaagccaccctcgtgtgcctggctaccggcttctaccccgaccatgtggaactgtcttggtgggtcaacggcaaagaggtgcacagcggcgtgtgtaccgacccccagccactgaaagaacagcccgccctgaacgacagccggtactgcctgagcagcagactgagagtgtccgccaccttctggcagaacccccggaaccacttcagatgccaggtgcagttctacggcctgagcgagaacgacgagtggacccaggacagagccaagcccgtgacccagatcgtgtctgccgaagcctggggcagagccgattgcgacgtgaagctggtggaaaagagcttcgagacagacaccaacctgaacttccagaacctgagcgtgatcggcttcagaatcctgctgctgaaagtggccggctttaacctgctgatgaccctgcggctgtggtccagc

SEQ ID NO: 4565 - DNA, 2310 bp, synthetic construct
  source 1..2310: mol_type = other DNA
atggccttaccagtgaccgccttgctcctgccgctggccttgctgctccacgccgccaggccggaagtgcagctggttgaatctggcggaggactggttcagcctggcggatctctgagactgtcttgtgccgccagcggcttcagcttcagcgacttttggatgagctgggtccgacaggcccctggcaaaggacttgaatgggtcgccacaatcagccaggccggcagcgagaaggactacgtggactctgtgaagggcagattcaccatcagccgggacaacgccaagaagtccctgtacctccagatgaacagcctgagagccgaggacaccgccgtgtactattgtgcctctggcgtgtacagcttcgactacagaggccagggcaccctggtcacagtctcttctggtaccggcggaggcggatctggcggcggaggtagcggtggcggaggatctgaattcgacgtgatgctgacccagacaccactgagcctgcctgtgtctctgggcgatcaggccagcatctcctgtagaagcagccagagcatcctgcacagcaccggcgatacctacctggaatggtatctccagaagcctggacagagccccaagctgctgattaacaaggtgtccaaccggctgagcggcgtgcccgatagattttctggcagcggctctggcaccgacttcaccctgaagatcagcagagtggaagccgaggacctgggcgtgtactactgcttccaaggcagccatgttccttggacctttggcggaggcaccaagctggaaatcaagagagctgacgccgctcctaccgtgtccatctttcctctcgagatccagaaccctgatcctgccgtgtaccagctgcgggatagcaagagcagcgacaagagcgtgtgtctgttcaccgacttcgacagccagaccaacgtgtcccagagcaaggactccgacgtgtacatcaccgataagtgcgtgctggacatgcggagcatggacttcaagagcaactccgccgtggcctggtccaacaagtccgatttcgcctgcgccaacgccttcaacaacagcattatccccgaggacacattcttcccaagccccgagagcagctgcggctttaccagcgagagctaccagcagggcgtgctgagcgccaccatcctgtacgagatcctgctgggcaaggccaccctgtacgccgtgctggtgtctgccctggtgctgatggctatggtcaagcggaaggacagccggggacgcgccaagagaagcggatctggcgtgaagcagaccctgaatttcgacctgctgaagctggctggcgacgtggaatccaacccaggccctactagtatggactggatttggcgcatccttttccttgtcggcgctgctaccggcgcgcattccttcgaacaagtgaagctccagcagagcggccctagccttgtgaaacctggcgcttccgtgaagatgagctgcaaggccagcggctacaccttcaccgatttctacatgaaatgggtcaagcagagccacggcaagtctctggaatggatcggcgacatcaaccccaacatcggagacaccttctacaaccagaagttcaagggcaaagccacactgaccgtggacaagagcagcagcaccgcctacatgcagctcaacagcctgaccagcgaggacagcgccgtgtacttttgttccgtgggctacttcgacgtgtggggagccggaacaaccgtgacagtctcttctacgcgtgaggacctgaagaacgtgttcccacctgaggtggccgtgttcgagcctagcgaggccgagatcagccacacccagaaagccaccctcgtgtgcctggctaccggcttctaccccgaccatgtggaactgtcttggtgggtcaacggcaaagaggtgcacagcggcgtgtgtaccgacccccagccactgaaagaacagcccgccctgaacgacagccggtactgcctgagcagcagactgagagtgtccgccaccttctggcagaacccccggaaccacttcagatgccaggtgcagttctacggcctgagcgagaacgacgagtggacccaggacagagccaagcccgtgacccagatcgtgtctgccgaagcctggggcagagccgattgcgacgtgaagctggtggaaaagagcttcgagacagacaccaacctgaacttccagaacctgagcgtgatcggcttcagaatcctgctgctgaaagtggccggctttaacctgctgatgaccctgcggctgtggtccagc

SEQ ID NO: 4566 - DNA, 2298 bp, synthetic construct
  source 1..2298: mol_type = other DNA
atggccttaccagtgaccgccttgctcctgccgctggccttgctgctccacgccgccaggccggaagtgcagctggttgaatctggcggaggactggttcagcctggcggatctctgagactgtcttgtgccgccagcggcttcagcttcagcgacttttggatgagctgggtccgacaggcccctggcaaaggacttgaatgggtcgccacaatcagccaggccggcagcgagaaggactacgtggactctgtgaagggcagattcaccatcagccgggacaacgccaagaagtccctgtacctccagatgaacagcctgagagccgaggacaccgccgtgtactattgtgcctctggcgtgtacagcttcgactacagaggccagggcaccctggtcacagtctcttctggtaccggcggaggcggatctggcggcggaggtagcggtggcggaggatctgaattcgagatcgtgctgacacagtctcccgccacactgtcactgtctccaggcgaaagagccacactgagctgtagagccagccagagcgtgtccatctacctggcctggtatcagcagaagcctggacaggctccccggctgctgatctacgatgccagcaatagagccacaggcatccccgccagattttctggctctggcagcggcaccgatttcaccctgaccataagcagcctggaacctgaggacttcgccgtgtactactgccagcagagaagcaactggcctcctttcacattcggccctggcaccaaggtggacatcaaactcgagatccagaaccctgatcctgccgtgtaccagctgcgggatagcaagagcagcgacaagagcgtgtgtctgttcaccgacttcgacagccagaccaacgtgtcccagagcaaggactccgacgtgtacatcaccgataagtgcgtgctggacatgcggagcatggacttcaagagcaactccgccgtggcctggtccaacaagtccgatttcgcctgcgccaacgccttcaacaacagcattatccccgaggacacattcttcccaagccccgagagcagctgcggctttaccagcgagagctaccagcagggcgtgctgagcgccaccatcctgtacgagatcctgctgggcaaggccaccctgtacgccgtgctggtgtctgccctggtgctgatggctatggtcaagcggaaggacagccggggacgcgccaagagaagcggatctggcgtgaagcagaccctgaatttcgacctgctgaagctggctggcgacgtggaatccaacccaggccctactagtatggactggatttggcgcatccttttccttgtcggcgctgctaccggcgcgcattccttcgaacaggtgcagcttgttgaaagcggaggcggagttgtgcagcctggcagaagtctgagactgtcttgtgccgccagcggcttcaccttcagcagctatggaatgcactgggtccgacaggcccctggcaaaggacttgaatgggttgccgtgatctgggacgacggcagcaacaagtattacgtggacagcgtgaagggcagattcaccatcagccgggacaacagcaagaacaccctgtacctccagatgaacagcctgagagccgaggacacagccgtgtattattgcgccagagatgactactacggcagcggctccttcaacagctactatggcacagacgtgtggggccagggcacaacagttaccgttagctctacgcgtgaggacctgaagaacgtgttcccacctgaggtggccgtgttcgagcctagcgaggccgagatcagccacacccagaaagccaccctcgtgtgcctggctaccggcttctaccccgaccatgtggaactgtcttggtgggtcaacggcaaagaggtgcacagcggcgtgtgtaccgacccccagccactgaaagaacagcccgccctgaacgacagccggtactgcctgagcagcagactgagagtgtccgccaccttctggcagaacccccggaaccacttcagatgccaggtgcagttctacggcctgagcgagaacgacgagtggacccaggacagagccaagcccgtgacccagatcgtgtctgccgaagcctggggcagagccgattgcgacgtgaagctggtggaaaagagcttcgagacagacaccaacctgaacttccagaacctgagcgtgatcggcttcagaatcctgctgctgaaagtggccggctttaacctgctgatgaccctgcggctgtggtccagc

SEQ ID NO: 4567 - DNA, 2253 bp, synthetic construct
  source 1..2253: mol_type = other DNA
atggccttaccagtgaccgccttgctcctgccgctggccttgctgctccacgccgccaggccggaagtgcagctggttgaatctggcggaggactggttcagcctggcggatctctgagactgtcttgtgccgccagcggcttcagcttcagcgacttttggatgagctgggtccgacaggcccctggcaaaggacttgaatgggtcgccacaatcagccaggccggcagcgagaaggactacgtggactctgtgaagggcagattcaccatcagccgggacaacgccaagaagtccctgtacctccagatgaacagcctgagagccgaggacaccgccgtgtactattgtgcctctggcgtgtacagcttcgactacagaggccagggcaccctggtcacagtctcttctggtaccggcggaggcggatctggcggcggaggtagcggtggcggaggatctgaattcgacatccagatgacacagagccctagcagcctgtctgccagcgtgggagacagagtgaccatcacctgtagagccagccagggcatctcttcttggctggcctggtatcagcagaagcccgagaaggcccctaagagcctgatctatgccgccagctctctccagagcggagtgcctagcagattttctggcagcggctccggcaccgatttcaccctgacaatatccagcctccagcctgaggacttcgccacctactactgccagcagtacaacagctacccctacaccttcggccagggcaccaagctggaaatcaaactcgagatccagaaccctgatcctgccgtgtaccagctgcgggatagcaagagcagcgacaagagcgtgtgtctgttcaccgacttcgacagccagaccaacgtgtcccagagcaaggactccgacgtgtacatcaccgataagtgcgtgctggacatgcggagcatggacttcaagagcaactccgccgtggcctggtccaacaagtccgatttcgcctgcgccaacgccttcaacaacagcattatccccgaggacacattcttcccaagccccgagagcagctgcggctttaccagcgagagctaccagcagggcgtgctgagcgccaccatcctgtacgagatcctgctgggcaaggccaccctgtacgccgtgctggtgtctgccctggtgctgatggctatggtcaagcggaaggacagccggggacgcgccaagagaagcggatctggcgtgaagcagaccctgaatttcgacctgctgaagctggctggcgacgtggaatccaacccaggccctactagtatggactggatttggcgcatccttttccttgtcggcgctgctaccggcgcgcattccttcgaagaagtgcaactggttcaatctggcggcggactggttcatccaggcggttctctgagactgagctgtgccggctctggcttcaccttcagcacctacctgatgtactgggtccgacaggcccctggcaagacactggaatgggtgtccgctattggcagcggaggcgatacctactacgccgactctgtgaagggcagattcaccatcagccgggacaacgccaagaacagcctgtacctccagatgaactccctgagagccgaggacatggccgtgtactactgtgccagaggactcggctattggggccagggaacactggtcacagtgtcctctacgcgtgaggacctgaagaacgtgttcccacctgaggtggccgtgttcgagcctagcgaggccgagatcagccacacccagaaagccaccctcgtgtgcctggctaccggcttctaccccgaccatgtggaactgtcttggtgggtcaacggcaaagaggtgcacagcggcgtgtgtaccgacccccagccactgaaagaacagcccgccctgaacgacagccggtactgcctgagcagcagactgagagtgtccgccaccttctggcagaacccccggaaccacttcagatgccaggtgcagttctacggcctgagcgagaacgacgagtggacccaggacagagccaagcccgtgacccagatcgtgtctgccgaagcctggggcagagccgattgcgacgtgaagctggtggaaaagagcttcgagacagacaccaacctgaacttccagaacctgagcgtgatcggcttcagaatcctgctgctgaaagtggccggctttaacctgctgatgaccctgcggctgtggtccagc

SEQ ID NO: 4568 - DNA, 2310 bp, synthetic construct
  source 1..2310: mol_type = other DNA
atggccttaccagtgaccgccttgctcctgccgctggccttgctgctccacgccgccaggccggaagtgcagctggttgaatctggcggaggactggttcagcctggcggatctctgagactgtcttgtgccgccagcggcttcagcttcagcgacttttggatgagctgggtccgacaggcccctggcaaaggacttgaatgggtcgccacaatcagccaggccggcagcgagaaggactacgtggactctgtgaagggcagattcaccatcagccgggacaacgccaagaagtccctgtacctccagatgaacagcctgagagccgaggacaccgccgtgtactattgtgcctctggcgtgtacagcttcgactacagaggccagggcaccctggtcacagtctcttctggtaccggcggaggcggatctggcggcggaggtagcggtggcggaggatctgaattcctgcctgttctgacacagcctccatccgtgtctgtggcccctggaaagaccgccagaatcacatgcggcggcaacaacatcggcagcaagagcgtgcactggtatcagcagaagcctggacaggctcctgtgctggtggtgtacgacgacagcgatagacctagcggcatccccgagagattcagcggcagcaattccggcaataccgccacactgaccatcagcagagtggaagctggcgacgaggccgactactactgccaagtgtgggacagcagcagcgactacgtggtgtttggcggcggaacaaagctgacagtgcttctcgagatccagaaccctgatcctgccgtgtaccagctgcgggatagcaagagcagcgacaagagcgtgtgtctgttcaccgacttcgacagccagaccaacgtgtcccagagcaaggactccgacgtgtacatcaccgataagtgcgtgctggacatgcggagcatggacttcaagagcaactccgccgtggcctggtccaacaagtccgatttcgcctgcgccaacgccttcaacaacagcattatccccgaggacacattcttcccaagccccgagagcagctgcggctttaccagcgagagctaccagcagggcgtgctgagcgccaccatcctgtacgagatcctgctgggcaaggccaccctgtacgccgtgctggtgtctgccctggtgctgatggctatggtcaagcggaaggacagccggggacgcgccaagagaagcggatctggcgtgaagcagaccctgaatttcgacctgctgaagctggctggcgacgtggaatccaacccaggccctactagtatggactggatttggcgcatccttttccttgtcggcgctgctaccggcgcgcattccttcgaagaagttcaactggtgcagagcggagccgaagtgaagaagccaggcgagagcctgaagattagctgcaaaggcagcggctacagcttcaccagctactggatcggctgggtccgacagatgcctggcaaaggactggaatggatgggcatcatctaccccggcgacagcgacaccagatacagccctagctttcagggccaagtgaccatctccgccgacaagagcatcagcacagcctacctccagtggtcctctctgaaggccagcgataccgccatgtactactgcgccagacaagtctggggatggcaaggcggcatgtaccccaggtctaactggtggtacaacctggactcttggggccagggcacactggtcacagtctcttctacgcgtgaggacctgaagaacgtgttcccacctgaggtggccgtgttcgagcctagcgaggccgagatcagccacacccagaaagccaccctcgtgtgcctggctaccggcttctaccccgaccatgtggaactgtcttggtgggtcaacggcaaagaggtgcacagcggcgtgtgtaccgacccccagccactgaaagaacagcccgccctgaacgacagccggtactgcctgagcagcagactgagagtgtccgccaccttctggcagaacccccggaaccacttcagatgccaggtgcagttctacggcctgagcgagaacgacgagtggacccaggacagagccaagcccgtgacccagatcgtgtctgccgaagcctggggcagagccgattgcgacgtgaagctggtggaaaagagcttcgagacagacaccaacctgaacttccagaacctgagcgtgatcggcttcagaatcctgctgctgaaagtggccggctttaacctgctgatgaccctgcggctgtggtccagc

SEQ ID NO: 4569 - DNA, 2289 bp, synthetic construct
  source 1..2289: mol_type = other DNA
atggccttaccagtgaccgccttgctcctgccgctggccttgctgctccacgccgccaggccggaagtgcagctggttgaatctggcggaggactggttcagcctggcggatctctgagactgtcttgtgccgccagcggcttcagcttcagcgacttttggatgagctgggtccgacaggcccctggcaaaggacttgaatgggtcgccacaatcagccaggccggcagcgagaaggactacgtggactctgtgaagggcagattcaccatcagccgggacaacgccaagaagtccctgtacctccagatgaacagcctgagagccgaggacaccgccgtgtactattgtgcctctggcgtgtacagcttcgactacagaggccagggcaccctggtcacagtctcttctggtaccggcggaggcggatctggcggcggaggtagcggtggcggaggatctgaattcgagctggtcatgacacagagccctgcttctctggccgtgtcactgggacagagagccaccatctcttgcagagccagcgagagcgtggacagctacggcaagagcttcatgcactggtatcagctcaagcccggccagcctcctaagctgctgatctacagagcctccaacctggaaagcggcgtgccagccagattttctggcagcggcagcagaaccgacttcaccctgaccattgatcccgtggaagccgatgatgccgccacctactactgccagcagaacaacgaggacccctggacatttggcggaggcaccaagctggaaatcaaactcgagatccagaaccctgatcctgccgtgtaccagctgcgggatagcaagagcagcgacaagagcgtgtgtctgttcaccgacttcgacagccagaccaacgtgtcccagagcaaggactccgacgtgtacatcaccgataagtgcgtgctggacatgcggagcatggacttcaagagcaactccgccgtggcctggtccaacaagtccgatttcgcctgcgccaacgccttcaacaacagcattatccccgaggacacattcttcccaagccccgagagcagctgcggctttaccagcgagagctaccagcagggcgtgctgagcgccaccatcctgtacgagatcctgctgggcaaggccaccctgtacgccgtgctggtgtctgccctggtgctgatggctatggtcaagcggaaggacagccggggacgcgccaagagaagcggatctggcgtgaagcagaccctgaatttcgacctgctgaagctggctggcgacgtggaatccaacccaggccctactagtatggactggatttggcgcatccttttccttgtcggcgctgctaccggcgcgcattccttcgaagaagtgcagctcgaacagtctggccccgagcttgtgaaacctggcgcttccgtgaagatgagctgcaaggccagcggctacaccttcaccaactactacatgaaatgggtcaagcagagccacggcaagtccctggaatggatcggcgatctgaaccccaacaacggcgacaccttctacaaccagaagttcaagggcaaagccacactgaccgtggacaagagcagcaacaccgcctacatgcagctcaactccctgaccagcgaggacagcgccgtgtactactgtgccagaaccggcagatacgaagagaacgctatggactactggggccagggcacaagcgtgacagtctcttctacgcgtgaggacctgaagaacgtgttcccacctgaggtggccgtgttcgagcctagcgaggccgagatcagccacacccagaaagccaccctcgtgtgcctggctaccggcttctaccccgaccatgtggaactgtcttggtgggtcaacggcaaagaggtgcacagcggcgtgtgtaccgacccccagccactgaaagaacagcccgccctgaacgacagccggtactgcctgagcagcagactgagagtgtccgccaccttctggcagaacccccggaaccacttcagatgccaggtgcagttctacggcctgagcgagaacgacgagtggacccaggacagagccaagcccgtgacccagatcgtgtctgccgaagcctggggcagagccgattgcgacgtgaagctggtggaaaagagcttcgagacagacaccaacctgaacttccagaacctgagcgtgatcggcttcagaatcctgctgctgaaagtggccggctttaacctgctgatgaccctgcggctgtggtccagc

SEQ ID NO: 4570 - DNA, 2271 bp, synthetic construct
  source 1..2271: mol_type = other DNA
atggccttaccagtgaccgccttgctcctgccgctggccttgctgctccacgccgccaggccggaagtgcagctggttgaatctggcggaggactggttcagcctggcggatctctgagactgtcttgtgccgccagcggcttcagcttcagcgacttttggatgagctgggtccgacaggcccctggcaaaggacttgaatgggtcgccacaatcagccaggccggcagcgagaaggactacgtggactctgtgaagggcagattcaccatcagccgggacaacgccaagaagtccctgtacctccagatgaacagcctgagagccgaggacaccgccgtgtactattgtgcctctggcgtgtacagcttcgactacagaggccagggcaccctggtcacagtctcttctggtaccggcggaggcggatctggcggcggaggtagcggtggcggaggatctgaattcgacgtggtcatgacacagagcccttctagcctgtctgccagcgtgggcgacagagtgaccatcacctgtatggcctccgaggacatctacatccggctggcctggtatcagcagaagcctggaaacgcccctaagctgctgatctacgccgccacctctctggaaacaggcgtgccaagcagattttccggcagcggctctggcaccgatttcaccctgacaatatccagcctccagcctgaggacttcgccacctactactgccagcagtattggagcagcccctggacatttggcggaggcaccaaggtggaaatcaaactcgagatccagaaccctgatcctgccgtgtaccagctgcgggatagcaagagcagcgacaagagcgtgtgtctgttcaccgacttcgacagccagaccaacgtgtcccagagcaaggactccgacgtgtacatcaccgataagtgcgtgctggacatgcggagcatggacttcaagagcaactccgccgtggcctggtccaacaagtccgatttcgcctgcgccaacgccttcaacaacagcattatccccgaggacacattcttcccaagccccgagagcagctgcggctttaccagcgagagctaccagcagggcgtgctgagcgccaccatcctgtacgagatcctgctgggcaaggccaccctgtacgccgtgctggtgtctgccctggtgctgatggctatggtcaagcggaaggacagccggggacgcgccaagagaagcggatctggcgtgaagcagaccctgaatttcgacctgctgaagctggctggcgacgtggaatccaacccaggccctactagtatggactggatttggcgcatccttttccttgtcggcgctgctaccggcgcgcattccttcgaacaggttcagctgcaagagtctggccccggactggtcaagcctagccaaacactgagcctgacctgtaccgtgtccggctacagcatcaccagcgactacacctggaactggatcagacagcctcctggcaacggactggaatggatcggctacatcacctacagcggcagcaccagctacaaccccagcctgaaaagccgggtgctgatctccgtggacaccagcaagaatcaggtgtccctgaagctgagcagcgtgacagccgctgataccgccgtgtactactgtgccagactggggagaagatacacaatggactactggggccagggcaccaccgtgacagtttcttctacgcgtgaggacctgaagaacgtgttcccacctgaggtggccgtgttcgagcctagcgaggccgagatcagccacacccagaaagccaccctcgtgtgcctggctaccggcttctaccccgaccatgtggaactgtcttggtgggtcaacggcaaagaggtgcacagcggcgtgtgtaccgacccccagccactgaaagaacagcccgccctgaacgacagccggtactgcctgagcagcagactgagagtgtccgccaccttctggcagaacccccggaaccacttcagatgccaggtgcagttctacggcctgagcgagaacgacgagtggacccaggacagagccaagcccgtgacccagatcgtgtctgccgaagcctggggcagagccgattgcgacgtgaagctggtggaaaagagcttcgagacagacaccaacctgaacttccagaacctgagcgtgatcggcttcagaatcctgctgctgaaagtggccggctttaacctgctgatgaccctgcggctgtggtccagc

SEQ ID NO: 4571 - DNA, 2283 bp, synthetic construct
  source 1..2283: mol_type = other DNA
atggccttaccagtgaccgccttgctcctgccgctggccttgctgctccacgccgccaggccggaagtgcagctggttgaatctggcggaggactggttcagcctggcggatctctgagactgtcttgtgccgccagcggcttcagcttcagcgacttttggatgagctgggtccgacaggcccctggcaaaggacttgaatgggtcgccacaatcagccaggccggcagcgagaaggactacgtggactctgtgaagggcagattcaccatcagccgggacaacgccaagaagtccctgtacctccagatgaacagcctgagagccgaggacaccgccgtgtactattgtgcctctggcgtgtacagcttcgactacagaggccagggcaccctggtcacagtctcttctggtaccggcggaggcggatctggcggcggaggtagcggtggcggaggatctgaattcgatattgtgctgactcagagccctgccactctgagccttagtccaggcgacagagctaccatctcctgtagggcctctgaatccgtgaccattctgggctctcatctcatatattggtatcaacaaaagccgggccagcctccacggctgctcattcaactggcctctaacgtgcagaccggcgtgccagctagattttctggctctggctcccggaccgactttacactgacaatcagctccgtggaacccgaagattttgccgtctattattgcctccagtccaggaccattcctcggacattcggccagggaacaaaactcgaaatcaagcggctcgagatccagaaccctgatcctgccgtgtaccagctgcgggatagcaagagcagcgacaagagcgtgtgtctgttcaccgacttcgacagccagaccaacgtgtcccagagcaaggactccgacgtgtacatcaccgataagtgcgtgctggacatgcggagcatggacttcaagagcaactccgccgtggcctggtccaacaagtccgatttcgcctgcgccaacgccttcaacaacagcattatccccgaggacacattcttcccaagccccgagagcagctgcggctttaccagcgagagctaccagcagggcgtgctgagcgccaccatcctgtacgagatcctgctgggcaaggccaccctgtacgccgtgctggtgtctgccctggtgctgatggctatggtcaagcggaaggacagccggggacgcgccaagagaagcggatctggcgtgaagcagaccctgaatttcgacctgctgaagctggctggcgacgtggaatccaacccaggccctactagtatggactggatttggcgcatccttttccttgtcggcgctgctaccggcgcgcattccttcgaacaggtgcagctcgttcagagtggccccgaagtgaaaaagccaggcgagtccgtgaagatttcctgcaaagcctccggctacacattccggcactactctatgaattgggtcaagcaggccccaggccagggccttaagtggatgggacgcatcaataccgagtccggcgtgccaatctacgccgatgacttcaaaggccggttcagcttcaccgtggatacctctgcctccaccgcctacctggaaatcagcagcctgaccagcgaggatacagctgtgtacttctgtagcaacgattacctctacagcctggatttctggggacagggaaccacactgaccgtgtctagcacgcgtgaggacctgaagaacgtgttcccacctgaggtggccgtgttcgagcctagcgaggccgagatcagccacacccagaaagccaccctcgtgtgcctggctaccggcttctaccccgaccatgtggaactgtcttggtgggtcaacggcaaagaggtgcacagcggcgtgtgtaccgacccccagccactgaaagaacagcccgccctgaacgacagccggtactgcctgagcagcagactgagagtgtccgccaccttctggcagaacccccggaaccacttcagatgccaggtgcagttctacggcctgagcgagaacgacgagtggacccaggacagagccaagcccgtgacccagatcgtgtctgccgaagcctggggcagagccgattgcgacgtgaagctggtggaaaagagcttcgagacagacaccaacctgaacttccagaacctgagcgtgatcggcttcagaatcctgctgctgaaagtggccggctttaacctgctgatgaccctgcggctgtggtccagc

SEQ ID NO: 4572 - DNA, 2283 bp, synthetic construct
  source 1..2283: mol_type = other DNA
atggccttaccagtgaccgccttgctcctgccgctggccttgctgctccacgccgccaggccggaagtgcagctggttgaatctggcggaggactggttcagcctggcggatctctgagactgtcttgtgccgccagcggcttcagcttcagcgacttttggatgagctgggtccgacaggcccctggcaaaggacttgaatgggtcgccacaatcagccaggccggcagcgagaaggactacgtggactctgtgaagggcagattcaccatcagccgggacaacgccaagaagtccctgtacctccagatgaacagcctgagagccgaggacaccgccgtgtactattgtgcctctggcgtgtacagcttcgactacagaggccagggcaccctggtcacagtctcttctggtaccggcggaggcggatctggcggcggaggtagcggtggcggaggatctgaattcgacatcgtgctgacacagtctcccgccacactgtcactgagccctggcgatagagccacactgagctgtagagccagcgagagcgtgacaatcctgggcagccacctgatctactggtatcagcagaagcccggacaggcccctagactgctgattcagctcgccagcaatgtgcagacaggcatccctgccagattttccggcagcggcagcagaaccgatttcaccctgaccataagcagcctggaacctgaggacttcgccgtgtactactgcctccagagccggacaatccccagaacctttggacagggcaccaagctggaaatcaagagactcgagatccagaaccctgatcctgccgtgtaccagctgcgggatagcaagagcagcgacaagagcgtgtgtctgttcaccgacttcgacagccagaccaacgtgtcccagagcaaggactccgacgtgtacatcaccgataagtgcgtgctggacatgcggagcatggacttcaagagcaactccgccgtggcctggtccaacaagtccgatttcgcctgcgccaacgccttcaacaacagcattatccccgaggacacattcttcccaagccccgagagcagctgcggctttaccagcgagagctaccagcagggcgtgctgagcgccaccatcctgtacgagatcctgctgggcaaggccaccctgtacgccgtgctggtgtctgccctggtgctgatggctatggtcaagcggaaggacagccggggacgcgccaagagaagcggatctggcgtgaagcagaccctgaatttcgacctgctgaagctggctggcgacgtggaatccaacccaggccctactagtatggactggatttggcgcatccttttccttgtcggcgctgctaccggcgcgcattccttcgaacaggttcagctggtgcagtctggcagcgagctgaagaaacctggcgagagcgtgaagatcagctgcaaggccagcggctacaccttcacacactacagcatgaactgggtccgacaggcccctggacaaggactggaatggatgggcagaatcaacaccgagacaggcgagcccctgtacgccgacgatttcaagggcagattcgtgttcagcctggacaccagcgccagcacagcctatctccagatcagctctctgaaggccgaggacaccgccgtgtactactgctccaacgactacctgtactccctggactattggggccagggcacactggtcacagtgtctagtacgcgtgaggacctgaagaacgtgttcccacctgaggtggccgtgttcgagcctagcgaggccgagatcagccacacccagaaagccaccctcgtgtgcctggctaccggcttctaccccgaccatgtggaactgtcttggtgggtcaacggcaaagaggtgcacagcggcgtgtgtaccgacccccagccactgaaagaacagcccgccctgaacgacagccggtactgcctgagcagcagactgagagtgtccgccaccttctggcagaacccccggaaccacttcagatgccaggtgcagttctacggcctgagcgagaacgacgagtggacccaggacagagccaagcccgtgacccagatcgtgtctgccgaagcctggggcagagccgattgcgacgtgaagctggtggaaaagagcttcgagacagacaccaacctgaacttccagaacctgagcgtgatcggcttcagaatcctgctgctgaaagtggccggctttaacctgctgatgaccctgcggctgtggtccagc

SEQ ID NO: 4573 - DNA, 2286 bp, synthetic construct
  source 1..2286: mol_type = other DNA
atggccttaccagtgaccgccttgctcctgccgctggccttgctgctccacgccgccaggccggaagtgcagctggttgaatctggcggaggactggttcagcctggcggatctctgagactgtcttgtgccgccagcggcttcagcttcagcgacttttggatgagctgggtccgacaggcccctggcaaaggacttgaatgggtcgccacaatcagccaggccggcagcgagaaggactacgtggactctgtgaagggcagattcaccatcagccgggacaacgccaagaagtccctgtacctccagatgaacagcctgagagccgaggacaccgccgtgtactattgtgcctctggcgtgtacagcttcgactacagaggccagggcaccctggtcacagtctcttctggtaccggcggaggcggatctggcggcggaggtagcggtggcggaggatctgaattcgacatccagctgactcagagccctagctttctgagcgccagcgtgggcgacagagtgaccattacatgtagagccagccagggcatcagcaccgacctgaactggtatcagcagaagcctggcaaggcccctaagctgctgatctacgccgccagcaatctggaaagcggcgtgccaagcagattttccggctctggcagcggcaccgagttcaccctgacaatatctagcctccagcctgaggacttcgccacctactactgccagcagagctacaactggccctacacctttggcggaggcaccaaggtggaaatcaagagactcgagatccagaaccctgatcctgccgtgtaccagctgcgggatagcaagagcagcgacaagagcgtgtgtctgttcaccgacttcgacagccagaccaacgtgtcccagagcaaggactccgacgtgtacatcaccgataagtgcgtgctggacatgcggagcatggacttcaagagcaactccgccgtggcctggtccaacaagtccgatttcgcctgcgccaacgccttcaacaacagcattatccccgaggacacattcttcccaagccccgagagcagctgcggctttaccagcgagagctaccagcagggcgtgctgagcgccaccatcctgtacgagatcctgctgggcaaggccaccctgtacgccgtgctggtgtctgccctggtgctgatggctatggtcaagcggaaggacagccggggacgcgccaagagaagcggatctggcgtgaagcagaccctgaatttcgacctgctgaagctggctggcgacgtggaatccaacccaggccctactagtatggactggatttggcgcatccttttccttgtcggcgctgctaccggcgcgcattccttcgaagaagttcagctggttgaatcaggcggaggactcgtgaaacctggcggctctctgagactgtcttgtgccgccagcggcttcaccttcagcaacttcgagatgaactgggtccgacaggccccaggcaaaggactggaatgggtgtccggcatcagctccaatggccggtacatcaactacgccgacagcgtgaagggcagattcaccatcagccgggacaacgccaagaacagcctgtacctccagatgaactccctgagagccgaggacaccgccgtgtactattgtgccagagtggtggacttcgaccaggactacaacggcttcgactattggggccagggcaccctggttaccgttagctctacgcgtgaggacctgaagaacgtgttcccacctgaggtggccgtgttcgagcctagcgaggccgagatcagccacacccagaaagccaccctcgtgtgcctggctaccggcttctaccccgaccatgtggaactgtcttggtgggtcaacggcaaagaggtgcacagcggcgtgtgtaccgacccccagccactgaaagaacagcccgccctgaacgacagccggtactgcctgagcagcagactgagagtgtccgccaccttctggcagaacccccggaaccacttcagatgccaggtgcagttctacggcctgagcgagaacgacgagtggacccaggacagagccaagcccgtgacccagatcgtgtctgccgaagcctggggcagagccgattgcgacgtgaagctggtggaaaagagcttcgagacagacaccaacctgaacttccagaacctgagcgtgatcggcttcagaatcctgctgctgaaagtggccggctttaacctgctgatgaccctgcggctgtggtccagc

SEQ ID NO: 4574 - DNA, 2280 bp, synthetic construct
  source 1..2280: mol_type = other DNA
atggccttaccagtgaccgccttgctcctgccgctggccttgctgctccacgccgccaggccggaagtgcagctggttgaatctggcggaggactggttcagcctggcggatctctgagactgtcttgtgccgccagcggcttcagcttcagcgacttttggatgagctgggtccgacaggcccctggcaaaggacttgaatgggtcgccacaatcagccaggccggcagcgagaaggactacgtggactctgtgaagggcagattcaccatcagccgggacaacgccaagaagtccctgtacctccagatgaacagcctgagagccgaggacaccgccgtgtactattgtgcctctggcgtgtacagcttcgactacagaggccagggcaccctggtcacagtctcttctggtaccggcggaggcggatctggcggcggaggtagcggtggcggaggatctgaattcgacatccaactgactcagagccccagctttctgagcgcctctgtgggcgacagagtgaccatcacatgtagtctcagcctgggcatcagcacatggcgggattggtttccgccgaggcttggcaggggccttgagccgctgacctacgccgccagcacactgcaaagcggagtgcctagcagattttccggcagcggctctggcaccgagttcaccctgacaatatccagcctccagcctgaggacttcgccacctactactgccagcagctcaacagctaccctctgacctttggcggaggcaccaaggtggaaatcaagagactcgagatccagaaccctgatcctgccgtgtaccagctgcgggatagcaagagcagcgacaagagcgtgtgtctgttcaccgacttcgacagccagaccaacgtgtcccagagcaaggactccgacgtgtacatcaccgataagtgcgtgctggacatgcggagcatggacttcaagagcaactccgccgtggcctggtccaacaagtccgatttcgcctgcgccaacgccttcaacaacagcattatccccgaggacacattcttcccaagccccgagagcagctgcggctttaccagcgagagctaccagcagggcgtgctgagcgccaccatcctgtacgagatcctgctgggcaaggccaccctgtacgccgtgctggtgtctgccctggtgctgatggctatggtcaagcggaaggacagccggggacgcgccaagagaagcggatctggcgtgaagcagaccctgaatttcgacctgctgaagctggctggcgacgtggaatccaacccaggccctactagtatggactggatttggcgcatccttttccttgtcggcgctgctaccggcgcgcattccttcgaagaagttcaactggttgagtctggtggcggcctggttaagcctggcggatctctgagactgagctgtgccgccagcggcttcacctttagcacatacggcatgagctgggtccgacaggcccctggaaaaggacttgagtgggtcgcctacatcaacaacggctccggctacatctactacgccgacagcgtgaagggcagattcaccatcagccgggacaacgccaagaacagcctgtacctccagatgaactccctgagagccgaggacaccgccgtgtactattgtgccagaggacagtggtggagcggcggagactttgattattggggccagggcaccctggtcaccgtttcttctacgcgtgaggacctgaagaacgtgttcccacctgaggtggccgtgttcgagcctagcgaggccgagatcagccacacccagaaagccaccctcgtgtgcctggctaccggcttctaccccgaccatgtggaactgtcttggtgggtcaacggcaaagaggtgcacagcggcgtgtgtaccgacccccagccactgaaagaacagcccgccctgaacgacagccggtactgcctgagcagcagactgagagtgtccgccaccttctggcagaacccccggaaccacttcagatgccaggtgcagttctacggcctgagcgagaacgacgagtggacccaggacagagccaagcccgtgacccagatcgtgtctgccgaagcctggggcagagccgattgcgacgtgaagctggtggaaaagagcttcgagacagacaccaacctgaacttccagaacctgagcgtgatcggcttcagaatcctgctgctgaaagtggccggctttaacctgctgatgaccctgcggctgtggtccagc

SEQ ID NO: 4575 - DNA, 2283 bp, synthetic construct
  source 1..2283: mol_type = other DNA
atggccttaccagtgaccgccttgctcctgccgctggccttgctgctccacgccgccaggccggaagtgcagctggttgaatctggcggaggactggttcagcctggcggatctctgagactgtcttgtgccgccagcggcttcagcttcagcgacttttggatgagctgggtccgacaggcccctggcaaaggacttgaatgggtcgccacaatcagccaggccggcagcgagaaggactacgtggactctgtgaagggcagattcaccatcagccgggacaacgccaagaagtccctgtacctccagatgaacagcctgagagccgaggacaccgccgtgtactattgtgcctctggcgtgtacagcttcgactacagaggccagggcaccctggtcacagtctcttctggtaccggcggaggcggatctggcggcggaggtagcggtggcggaggatctgaattcgagatcgtgctgacacagtctcccgccacactgtcactgtctccaggcgaaagagccacactgagctgtagcgccagcagcagcgtgtcctacatgtactggtatcagcagaagcccggacaggcccctagactgctgatctacagaaccagcaacctggcctctggcatccccgccagattttctggctctggcagcggcaccgatttcaccctgaccataagcagcctggaacctgaggacttcgccgtgtactactgccagcagtaccacagctaccccaccacctttggacagggcaccaaggtggaaatcaagcggacagttctcgagatccagaaccctgatcctgccgtgtaccagctgcgggatagcaagagcagcgacaagagcgtgtgtctgttcaccgacttcgacagccagaccaacgtgtcccagagcaaggactccgacgtgtacatcaccgataagtgcgtgctggacatgcggagcatggacttcaagagcaactccgccgtggcctggtccaacaagtccgatttcgcctgcgccaacgccttcaacaacagcattatccccgaggacacattcttcccaagccccgagagcagctgcggctttaccagcgagagctaccagcagggcgtgctgagcgccaccatcctgtacgagatcctgctgggcaaggccaccctgtacgccgtgctggtgtctgccctggtgctgatggctatggtcaagcggaaggacagccggggacgcgccaagagaagcggatctggcgtgaagcagaccctgaatttcgacctgctgaagctggctggcgacgtggaatccaacccaggccctactagtatggactggatttggcgcatccttttccttgtcggcgctgctaccggcgcgcattccttcgaagaagtgcagctggttgaatcaggtggcggcctggttcaacctggcggatctctgagactgtcttgtgccgccagcggcttcagcttcaacacctacgccatgaactgggtccgacaggctcctggcaaaggactggaatgggtgtcccacatcagaagcaagagcaacaacttcgccacctactacgccgacagcgtgaaggacagattcaccatcagccgggacaacgccaagaacagcctgtacctccagatgaactccctgagagccgaggacaccgccgtgtattattgcgccagacaaggcggcgacttccctatggattattggggccagggcaccctggtcaccgtttcttctacgcgtgaggacctgaagaacgtgttcccacctgaggtggccgtgttcgagcctagcgaggccgagatcagccacacccagaaagccaccctcgtgtgcctggctaccggcttctaccccgaccatgtggaactgtcttggtgggtcaacggcaaagaggtgcacagcggcgtgtgtaccgacccccagccactgaaagaacagcccgccctgaacgacagccggtactgcctgagcagcagactgagagtgtccgccaccttctggcagaacccccggaaccacttcagatgccaggtgcagttctacggcctgagcgagaacgacgagtggacccaggacagagccaagcccgtgacccagatcgtgtctgccgaagcctggggcagagccgattgcgacgtgaagctggtggaaaagagcttcgagacagacaccaacctgaacttccagaacctgagcgtgatcggcttcagaatcctgctgctgaaagtggccggctttaacctgctgatgaccctgcggctgtggtccagc

SEQ ID NO: 4576 - DNA, 2271 bp, synthetic construct
  source 1..2271: mol_type = other DNA
atggccttaccagtgaccgccttgctcctgccgctggccttgctgctccacgccgccaggccggaagtgcagctggttgaatctggcggaggactggttcagcctggcggatctctgagactgtcttgtgccgccagcggcttcagcttcagcgacttttggatgagctgggtccgacaggcccctggcaaaggacttgaatgggtcgccacaatcagccaggccggcagcgagaaggactacgtggactctgtgaagggcagattcaccatcagccgggacaacgccaagaagtccctgtacctccagatgaacagcctgagagccgaggacaccgccgtgtactattgtgcctctggcgtgtacagcttcgactacagaggccagggcaccctggtcacagtctcttctggtaccggcggaggcggatctggcggcggaggtagcggtggcggaggatctgaattcgacgtggtcatgacacagagcccttctagcctgtctgccagcgtgggcgacagagtgaccatcacctgtaaagccagcgaggacatctacatccggctggcctggtatcagcagaagcctggaaaggcccctaagctgctgatctacgccgccacctctctggaaacaggcgtgccaagcagattttccggcagcggctctggcaccgatttcaccctgacaatatccagcctccagcctgaggacttcgccacctactactgccagcagtattggaccacaccttggacctttggcggaggcaccaaggtggaaatcaaactcgagatccagaaccctgatcctgccgtgtaccagctgcgggatagcaagagcagcgacaagagcgtgtgtctgttcaccgacttcgacagccagaccaacgtgtcccagagcaaggactccgacgtgtacatcaccgataagtgcgtgctggacatgcggagcatggacttcaagagcaactccgccgtggcctggtccaacaagtccgatttcgcctgcgccaacgccttcaacaacagcattatccccgaggacacattcttcccaagccccgagagcagctgcggctttaccagcgagagctaccagcagggcgtgctgagcgccaccatcctgtacgagatcctgctgggcaaggccaccctgtacgccgtgctggtgtctgccctggtgctgatggctatggtcaagcggaaggacagccggggacgcgccaagagaagcggatctggcgtgaagcagaccctgaatttcgacctgctgaagctggctggcgacgtggaatccaacccaggccctactagtatggactggatttggcgcatccttttccttgtcggcgctgctaccggcgcgcattccttcgaacaggtgcagctccaagagtctggccctggactggtcaagcctagccagacactgagcctgacctgtaccgtgtccggctacagcatcaccatcgactacacctggaactggatcagacagcctcctggcaaaggactggaatggatcggctacatcacctacagcggcagcaccgactacaaccccagcctgaaaagccgggtgctgatctccgtggacaccagcaagaatcaggtgtccctgaagctgagcagcgtgacagccgctgataccgccgtgtactactgtgccagactgggcagaagatacgccctggattattggggccagggcaccaccgtgacagtgtcatctacgcgtgaggacctgaagaacgtgttcccacctgaggtggccgtgttcgagcctagcgaggccgagatcagccacacccagaaagccaccctcgtgtgcctggctaccggcttctaccccgaccatgtggaactgtcttggtgggtcaacggcaaagaggtgcacagcggcgtgtgtaccgacccccagccactgaaagaacagcccgccctgaacgacagccggtactgcctgagcagcagactgagagtgtccgccaccttctggcagaacccccggaaccacttcagatgccaggtgcagttctacggcctgagcgagaacgacgagtggacccaggacagagccaagcccgtgacccagatcgtgtctgccgaagcctggggcagagccgattgcgacgtgaagctggtggaaaagagcttcgagacagacaccaacctgaacttccagaacctgagcgtgatcggcttcagaatcctgctgctgaaagtggccggctttaacctgctgatgaccctgcggctgtggtccagc

SEQ ID NO: 4577 - DNA, 2283 bp, synthetic construct
  source 1..2283: mol_type = other DNA
atggccttaccagtgaccgccttgctcctgccgctggccttgctgctccacgccgccaggccggaagtgcagctggttgaatctggcggaggactggttcagcctggcggatctctgagactgtcttgtgccgccagcggcttcagcttcagcgacttttggatgagctgggtccgacaggcccctggcaaaggacttgaatgggtcgccacaatcagccaggccggcagcgagaaggactacgtggactctgtgaagggcagattcaccatcagccgggacaacgccaagaagtccctgtacctccagatgaacagcctgagagccgaggacaccgccgtgtactattgtgcctctggcgtgtacagcttcgactacagaggccagggcaccctggtcacagtctcttctggtaccggcggaggcggatctggcggcggaggtagcggtggcggaggatctgaattcgacatccagatgacccagaccacaagcagcctgtctgccagcctgggcgacagagtgaccatctcttgtagagccagccaggacatcagcaactacctgaactggtatcagcagaaacccgacggcaccgtgaagctgctgatctactacaccagcatcctgcacagcggcgtgcccagcagattttctggctctggcagcggcaccgactacagcctgaccatcagcaatctggaacaagaggacttcgctacctacttctgccagcaaggcaacaccctgccttggacatttggcggaggcaccaagctggaaatcaaagctctcgagatccagaaccctgatcctgccgtgtaccagctgcgggatagcaagagcagcgacaagagcgtgtgtctgttcaccgacttcgacagccagaccaacgtgtcccagagcaaggactccgacgtgtacatcaccgataagtgcgtgctggacatgcggagcatggacttcaagagcaactccgccgtggcctggtccaacaagtccgatttcgcctgcgccaacgccttcaacaacagcattatccccgaggacacattcttcccaagccccgagagcagctgcggctttaccagcgagagctaccagcagggcgtgctgagcgccaccatcctgtacgagatcctgctgggcaaggccaccctgtacgccgtgctggtgtctgccctggtgctgatggctatggtcaagcggaaggacagccggggacgcgccaagagaagcggatctggcgtgaagcagaccctgaatttcgacctgctgaagctggctggcgacgtggaatccaacccaggccctactagtatggactggatttggcgcatccttttccttgtcggcgctgctaccggcgcgcattccttcgaagtgcaactggttgaatctggcggcggactggttaagcctggcggatctctgaagctgagctgtgccgcctctggcttcgccttcagcatctacgatatgagctgggtccgacagacccctgagaagagactggaatgggtcgcctacatctctagcggcggagggacctactatcccgacacagtgaagggcagattcaccatctccagagacaacgccaagaacaccctgtacctccagatgagcagcctgaagtccgaggacaccgccatgtactactgcgccagacacagcggctatggcacacattggggagtgctgtttgcctactggggccagggaacactggtcacagtttctgctacgcgtgaggacctgaagaacgtgttcccacctgaggtggccgtgttcgagcctagcgaggccgagatcagccacacccagaaagccaccctcgtgtgcctggctaccggcttctaccccgaccatgtggaactgtcttggtgggtcaacggcaaagaggtgcacagcggcgtgtgtaccgacccccagccactgaaagaacagcccgccctgaacgacagccggtactgcctgagcagcagactgagagtgtccgccaccttctggcagaacccccggaaccacttcagatgccaggtgcagttctacggcctgagcgagaacgacgagtggacccaggacagagccaagcccgtgacccagatcgtgtctgccgaagcctggggcagagccgattgcgacgtgaagctggtggaaaagagcttcgagacagacaccaacctgaacttccagaacctgagcgtgatcggcttcagaatcctgctgctgaaagtggccggctttaacctgctgatgaccctgcggctgtggtccagc

SEQ ID NO: 4578 - DNA, 2316 bp, synthetic construct
  source 1..2316: mol_type = other DNA
atggccttaccagtgaccgccttgctcctgccgctggccttgctgctccacgccgccaggccggaagtgcagctggttgaatctggcggaggactggttcagcctggcggatctctgagactgtcttgtgccgccagcggcttcagcttcagcgacttttggatgagctgggtccgacaggcccctggcaaaggacttgaatgggtcgccacaatcagccaggccggcagcgagaaggactacgtggactctgtgaagggcagattcaccatcagccgggacaacgccaagaagtccctgtacctccagatgaacagcctgagagccgaggacaccgccgtgtactattgtgcctctggcgtgtacagcttcgactacagaggccagggcaccctggtcacagtctcttctggtaccggcggaggcggatctggcggcggaggtagcggtggcggaggatctgaattcgacatcgtgatgacacagagccctgatagcctggccgtgtctctgggagagagagccaccatcaactgcaagagcagccagagcctgctgtacagaagcaaccagaagaactacctggcctggtatcagcagaagcccggccagcctcctaagctgctgatctactgggccagcaccagagaaagcggcgtgcccgatagattttctggctctggcagcggcaccgacttcaccctgacaatttctagcctgcaagccgaggacgtggccgtgtactactgccagcagtattacaactaccccagaaccttcggccagggcaccaaggtggaaatcaagagaacagttctcgagatccagaaccctgatcctgccgtgtaccagctgcgggatagcaagagcagcgacaagagcgtgtgtctgttcaccgacttcgacagccagaccaacgtgtcccagagcaaggactccgacgtgtacatcaccgataagtgcgtgctggacatgcggagcatggacttcaagagcaactccgccgtggcctggtccaacaagtccgatttcgcctgcgccaacgccttcaacaacagcattatccccgaggacacattcttcccaagccccgagagcagctgcggctttaccagcgagagctaccagcagggcgtgctgagcgccaccatcctgtacgagatcctgctgggcaaggccaccctgtacgccgtgctggtgtctgccctggtgctgatggctatggtcaagcggaaggacagccggggacgcgccaagagaagcggatctggcgtgaagcagaccctgaatttcgacctgctgaagctggctggcgacgtggaatccaacccaggccctactagtatggactggatttggcgcatccttttccttgtcggcgctgctaccggcgcgcattccttcgaagaagttcagctgcttgaatcaggcggcggactggttcaacctggcggatctctgagactgagctgtgccgccagcggctacagcatcacaagcgactatgcctggaactgggtccgacaggcccctggcaaaggactggaatgggtgtcctacatcagcaacagcggcagcaccagctacaaccccagcctgaagtcccggttcaccatcagcagagacaacagcaagaacaccctgtacctccagatgaacagcctgagagctgaggacaccgccgtgtattattgcgccaaagagcggaactacgactacgacgattactactacgctatggactactggggccagggaaccctggtcacagtctcttctacgcgtgaggacctgaagaacgtgttcccacctgaggtggccgtgttcgagcctagcgaggccgagatcagccacacccagaaagccaccctcgtgtgcctggctaccggcttctaccccgaccatgtggaactgtcttggtgggtcaacggcaaagaggtgcacagcggcgtgtgtaccgacccccagccactgaaagaacagcccgccctgaacgacagccggtactgcctgagcagcagactgagagtgtccgccaccttctggcagaacccccggaaccacttcagatgccaggtgcagttctacggcctgagcgagaacgacgagtggacccaggacagagccaagcccgtgacccagatcgtgtctgccgaagcctggggcagagccgattgcgacgtgaagctggtggaaaagagcttcgagacagacaccaacctgaacttccagaacctgagcgtgatcggcttcagaatcctgctgctgaaagtggccggctttaacctgctgatgaccctgcggctgtggtccagc

SEQ ID NO: 4579 - DNA, 2295 bp, synthetic construct
  source 1..2295: mol_type = other DNA
atggccttaccagtgaccgccttgctcctgccgctggccttgctgctccacgccgccaggccggaagtgcagctggttgaatctggcggaggactggttcagcctggcggatctctgagactgtcttgtgccgccagcggcttcagcttcagcgacttttggatgagctgggtccgacaggcccctggcaaaggacttgaatgggtcgccacaatcagccaggccggcagcgagaaggactacgtggactctgtgaagggcagattcaccatcagccgggacaacgccaagaagtccctgtacctccagatgaacagcctgagagccgaggacaccgccgtgtactattgtgcctctggcgtgtacagcttcgactacagaggccagggcaccctggtcacagtctcttctggtaccggcggaggcggatctggcggcggaggtagcggtggcggaggatctgaattcgacgtggtcatgacacagagccctctgagcctgcctgtgacacttggacagcctgccagcatcagctgtagaagcagccagagcctgctgcacagcagcggcaatacctacctggaatggtatcagcagaggcccggacagagccccagacctctgatctacaagatcagcacccggttcagcggcgtgcccgatagattttctggctctggcagcggcaccgacttcaccctgaagattagcagagtggaagccgaggacgtgggcgtgtactactgcttccaaggcagccacgtgccatacacctttggcggcggaacaaaggtggaaatcaagagactcgagatccagaaccctgatcctgccgtgtaccagctgcgggatagcaagagcagcgacaagagcgtgtgtctgttcaccgacttcgacagccagaccaacgtgtcccagagcaaggactccgacgtgtacatcaccgataagtgcgtgctggacatgcggagcatggacttcaagagcaactccgccgtggcctggtccaacaagtccgatttcgcctgcgccaacgccttcaacaacagcattatccccgaggacacattcttcccaagccccgagagcagctgcggctttaccagcgagagctaccagcagggcgtgctgagcgccaccatcctgtacgagatcctgctgggcaaggccaccctgtacgccgtgctggtgtctgccctggtgctgatggctatggtcaagcggaaggacagccggggacgcgccaagagaagcggatctggcgtgaagcagaccctgaatttcgacctgctgaagctggctggcgacgtggaatccaacccaggccctactagtatggactggatttggcgcatccttttccttgtcggcgctgctaccggcgcgcattccttcgaacaagttcagctggttcagagcggagccgaagtgaagaaacctggggcctctgtgaaggtgtcctgcaaagcctctggcctgaccatcgaggactactacatgcactgggtccgacaggcccctggacaaggacttgaatggatgggctggatcgaccccgagaacggcgatacagagtacggccctaagttccagggcagagtgaccatgaccagagacaccagcatcaacaccgcctacatggaactgagccggctgagatccgatgacaccgccgtgtactattgcgccgtgcacaatgcccactacggcacttggtttgcctattggggccagggcacactggtcaccgttagctctacgcgtgaggacctgaagaacgtgttcccacctgaggtggccgtgttcgagcctagcgaggccgagatcagccacacccagaaagccaccctcgtgtgcctggctaccggcttctaccccgaccatgtggaactgtcttggtgggtcaacggcaaagaggtgcacagcggcgtgtgtaccgacccccagccactgaaagaacagcccgccctgaacgacagccggtactgcctgagcagcagactgagagtgtccgccaccttctggcagaacccccggaaccacttcagatgccaggtgcagttctacggcctgagcgagaacgacgagtggacccaggacagagccaagcccgtgacccagatcgtgtctgccgaagcctggggcagagccgattgcgacgtgaagctggtggaaaagagcttcgagacagacaccaacctgaacttccagaacctgagcgtgatcggcttcagaatcctgctgctgaaagtggccggctttaacctgctgatgaccctgcggctgtggtccagc

SEQ ID NO: 4580 - DNA, 2271 bp, synthetic construct
  source 1..2271: mol_type = other DNA
atggccttaccagtgaccgccttgctcctgccgctggccttgctgctccacgccgccaggccggaagtgcagctggttgaatctggcggaggactggttcagcctggcggatctctgagactgtcttgtgccgccagcggcttcagcttcagcgacttttggatgagctgggtccgacaggcccctggcaaaggacttgaatgggtcgccacaatcagccaggccggcagcgagaaggactacgtggactctgtgaagggcagattcaccatcagccgggacaacgccaagaagtccctgtacctccagatgaacagcctgagagccgaggacaccgccgtgtactattgtgcctctggcgtgtacagcttcgactacagaggccagggcaccctggtcacagtctcttctggtaccggcggaggcggatctggcggcggaggtagcggtggcggaggatctgaattcgacatccagatgacacagagccctagcagcctgtctgccagcgtgggagacagagtgaccatcacctgtagagccagcgagaacatctacagcaacctggcctggtatcagcagaagcctggcaaggcccctaagctgctgatctacgccgccaccaatctggctgatggcgtgccaagcagattttccggctctggcagcggcaccgatttcaccctgacaatatccagcctccagcctgaggacttcgccacctactactgccagcacttttggggcacccctacattcggccagggcaccaaggtggaaatcaagagaacagttctcgagatccagaaccctgatcctgccgtgtaccagctgcgggatagcaagagcagcgacaagagcgtgtgtctgttcaccgacttcgacagccagaccaacgtgtcccagagcaaggactccgacgtgtacatcaccgataagtgcgtgctggacatgcggagcatggacttcaagagcaactccgccgtggcctggtccaacaagtccgatttcgcctgcgccaacgccttcaacaacagcattatccccgaggacacattcttcccaagccccgagagcagctgcggctttaccagcgagagctaccagcagggcgtgctgagcgccaccatcctgtacgagatcctgctgggcaaggccaccctgtacgccgtgctggtgtctgccctggtgctgatggctatggtcaagcggaaggacagccggggacgcgccaagagaagcggatctggcgtgaagcagaccctgaatttcgacctgctgaagctggctggcgacgtggaatccaacccaggccctactagtatggactggatttggcgcatccttttccttgtcggcgctgctaccggcgcgcattccttcgaagaagtgcagctggttgaatcaggtggcggcctggttcaacctggcggatctctgagactgagctgtgccgcctctggcttcagcctgacaaattacggcgtgcactgggtccgacaggcccctggaaaaggactggaatgggtgtccgtgatttggagcggcggcagcaccgattacaacgccgccttcatcagccggttcaccatcagcgccgacaccagcaagaataccgcctacctccagatgaactccctgagagccgaggacaccgccgtgtactattgcgccagagaactgatccacgctatggacaactggggccagggaaccctggtcacagtctcttctacgcgtgaggacctgaagaacgtgttcccacctgaggtggccgtgttcgagcctagcgaggccgagatcagccacacccagaaagccaccctcgtgtgcctggctaccggcttctaccccgaccatgtggaactgtcttggtgggtcaacggcaaagaggtgcacagcggcgtgtgtaccgacccccagccactgaaagaacagcccgccctgaacgacagccggtactgcctgagcagcagactgagagtgtccgccaccttctggcagaacccccggaaccacttcagatgccaggtgcagttctacggcctgagcgagaacgacgagtggacccaggacagagccaagcccgtgacccagatcgtgtctgccgaagcctggggcagagccgattgcgacgtgaagctggtggaaaagagcttcgagacagacaccaacctgaacttccagaacctgagcgtgatcggcttcagaatcctgctgctgaaagtggccggctttaacctgctgatgaccctgcggctgtggtccagc

SEQ ID NO: 4581 - DNA, 2292 bp, synthetic construct
  source 1..2292: mol_type = other DNA
atggccttaccagtgaccgccttgctcctgccgctggccttgctgctccacgccgccaggccggaagtgcagctggttgaatctggcggaggactggttcagcctggcggatctctgagactgtcttgtgccgccagcggcttcagcttcagcgacttttggatgagctgggtccgacaggcccctggcaaaggacttgaatgggtcgccacaatcagccaggccggcagcgagaaggactacgtggactctgtgaagggcagattcaccatcagccgggacaacgccaagaagtccctgtacctccagatgaacagcctgagagccgaggacaccgccgtgtactattgtgcctctggcgtgtacagcttcgactacagaggccagggcaccctggtcacagtctcttctggtaccggcggaggcggatctggcggcggaggtagcggtggcggaggatctgaattcgacttcgtgatgacacagagccctctgagcctgcctgtgacacctggcgaacctgccagcatcagctgtagaagcagccagagcatcgtgcacagcaacggcaacacctacctggaatggtatctccagaagcctggacagagcccacagctgctgatctacaaggtgtccaacagattcagcggcgtgcccgacagattttctggcagcggctctggcaccgacttcaccctgaagattagcagagtggaagccgaggacgtgggcgtgtactactgcttccaaggctctcacgtgcccctgacctttggacagggcaccaagctggaaatcaagagactcgagatccagaaccctgatcctgccgtgtaccagctgcgggatagcaagagcagcgacaagagcgtgtgtctgttcaccgacttcgacagccagaccaacgtgtcccagagcaaggactccgacgtgtacatcaccgataagtgcgtgctggacatgcggagcatggacttcaagagcaactccgccgtggcctggtccaacaagtccgatttcgcctgcgccaacgccttcaacaacagcattatccccgaggacacattcttcccaagccccgagagcagctgcggctttaccagcgagagctaccagcagggcgtgctgagcgccaccatcctgtacgagatcctgctgggcaaggccaccctgtacgccgtgctggtgtctgccctggtgctgatggctatggtcaagcggaaggacagccggggacgcgccaagagaagcggatctggcgtgaagcagaccctgaatttcgacctgctgaagctggctggcgacgtggaatccaacccaggccctactagtatggactggatttggcgcatccttttccttgtcggcgctgctaccggcgcgcattccttcgaagaagtgcagctggttgaaagcggagccgaagtgaagaaacctggggcctctgtgaaggtgtcctgcaaggccagcggctacacctttaccagctactggattcactgggtccgacaggcccctggacaaggacttgagtggatgggcgagaacgacccctccaacggcaggaccaactacaacgagaagttcaagaaccgcgtgaccctgaccgtggacaccagcatctctaccgcctacatggaactgagccggctgagatccgatgacaccgccgtgtactattgcgccagaggacccaactacttttacagcatggactactggggccagggcacaatggtcaccgttagctctacgcgtgaggacctgaagaacgtgttcccacctgaggtggccgtgttcgagcctagcgaggccgagatcagccacacccagaaagccaccctcgtgtgcctggctaccggcttctaccccgaccatgtggaactgtcttggtgggtcaacggcaaagaggtgcacagcggcgtgtgtaccgacccccagccactgaaagaacagcccgccctgaacgacagccggtactgcctgagcagcagactgagagtgtccgccaccttctggcagaacccccggaaccacttcagatgccaggtgcagttctacggcctgagcgagaacgacgagtggacccaggacagagccaagcccgtgacccagatcgtgtctgccgaagcctggggcagagccgattgcgacgtgaagctggtggaaaagagcttcgagacagacaccaacctgaacttccagaacctgagcgtgatcggcttcagaatcctgctgctgaaagtggccggctttaacctgctgatgaccctgcggctgtggtccagc

SEQ ID NO: 4582 - DNA, 2271 bp, synthetic construct
  source 1..2271: mol_type = other DNA
atggccttaccagtgaccgccttgctcctgccgctggccttgctgctccacgccgccaggccggaagtgcagctggttgaatctggcggaggactggttcagcctggcggatctctgagactgtcttgtgccgccagcggcttcagcttcagcgacttttggatgagctgggtccgacaggcccctggcaaaggacttgaatgggtcgccacaatcagccaggccggcagcgagaaggactacgtggactctgtgaagggcagattcaccatcagccgggacaacgccaagaagtccctgtacctccagatgaacagcctgagagccgaggacaccgccgtgtactattgtgcctctggcgtgtacagcttcgactacagaggccagggcaccctggtcacagtctcttctggtaccggcggaggcggatctggcggcggaggtagcggtggcggaggatctgaattcgacatccagctgactcagagccctagctttctgagcgccagcgtgggcgacagagtgaccatcacatgtagcgccagatccagcatcagcttcatgtactggtatcagcagaagcccggcaaggcccctaagctgctgatctacgacaccagcaatctggcctctggcgtgcccagcagattttctggaagcggcagcggcaccgagttcaccctgacaatctctagcctggaagccgaggatgccgccacctactattgccagcagtggtccagctatcccctgacatttggacagggcaccaagctggaaatcaaactcgagatccagaaccctgatcctgccgtgtaccagctgcgggatagcaagagcagcgacaagagcgtgtgtctgttcaccgacttcgacagccagaccaacgtgtcccagagcaaggactccgacgtgtacatcaccgataagtgcgtgctggacatgcggagcatggacttcaagagcaactccgccgtggcctggtccaacaagtccgatttcgcctgcgccaacgccttcaacaacagcattatccccgaggacacattcttcccaagccccgagagcagctgcggctttaccagcgagagctaccagcagggcgtgctgagcgccaccatcctgtacgagatcctgctgggcaaggccaccctgtacgccgtgctggtgtctgccctggtgctgatggctatggtcaagcggaaggacagccggggacgcgccaagagaagcggatctggcgtgaagcagaccctgaatttcgacctgctgaagctggctggcgacgtggaatccaacccaggccctactagtatggactggatttggcgcatccttttccttgtcggcgctgctaccggcgcgcattccttcgaacaggttcagctggttcagtctggggccgaagtgaagaaacctggggcctctgtgaaggtgtcctgcaaggcttccggctacacctttaccggctcttggatgaactgggtccgacaggctcctggacagggactcgaatggatcggcagaatctatcctggcgacggcgagacaaactacaacggcaagttcaaggaccgcgtgacaatcaccgccgacaagagcacaagcaccgcctacatggaactgagcagcctgcggagcgaagataccgccgtgtactactgcgcccggatctacggcaacaacgtgtacttcgatgtgtggggccagggcacaaccgtgacagtctcttctacgcgtgaggacctgaagaacgtgttcccacctgaggtggccgtgttcgagcctagcgaggccgagatcagccacacccagaaagccaccctcgtgtgcctggctaccggcttctaccccgaccatgtggaactgtcttggtgggtcaacggcaaagaggtgcacagcggcgtgtgtaccgacccccagccactgaaagaacagcccgccctgaacgacagccggtactgcctgagcagcagactgagagtgtccgccaccttctggcagaacccccggaaccacttcagatgccaggtgcagttctacggcctgagcgagaacgacgagtggacccaggacagagccaagcccgtgacccagatcgtgtctgccgaagcctggggcagagccgattgcgacgtgaagctggtggaaaagagcttcgagacagacaccaacctgaacttccagaacctgagcgtgatcggcttcagaatcctgctgctgaaagtggccggctttaacctgctgatgaccctgcggctgtggtccagc

SEQ ID NO: 4583 - DNA, 2295 bp, synthetic construct
  source 1..2295: mol_type = other DNA
atggccttaccagtgaccgccttgctcctgccgctggccttgctgctccacgccgccaggccggaagtgcagctggttgaatctggcggaggactggttcagcctggcggatctctgagactgtcttgtgccgccagcggcttcagcttcagcgacttttggatgagctgggtccgacaggcccctggcaaaggacttgaatgggtcgccacaatcagccaggccggcagcgagaaggactacgtggactctgtgaagggcagattcaccatcagccgggacaacgccaagaagtccctgtacctccagatgaacagcctgagagccgaggacaccgccgtgtactattgtgcctctggcgtgtacagcttcgactacagaggccagggcaccctggtcacagtctcttctggtaccggcggaggcggatctggcggcggaggtagcggtggcggaggatctgaattccagctggtgctgacacagtctccaagcgcctctgccagcctgggatctagcgtgaagctgacctgtacactgagcagcggccacaagaccgacaccatcgactggtatcagcagcagcctggcaaggcccctagatacctgatgaagctggaaggcagcggcagctacaacaaaggctctggcgtgcccgatagattcagcggcagttcttctggcgctgattggtatctgaccatcagcagcctccagagcgaggacgaggccgattactactgcggcacagactaccccggcaactacctgtttggcggcggaacacagctgacagtgcttggcctcgagatccagaaccctgatcctgccgtgtaccagctgcgggatagcaagagcagcgacaagagcgtgtgtctgttcaccgacttcgacagccagaccaacgtgtcccagagcaaggactccgacgtgtacatcaccgataagtgcgtgctggacatgcggagcatggacttcaagagcaactccgccgtggcctggtccaacaagtccgatttcgcctgcgccaacgccttcaacaacagcattatccccgaggacacattcttcccaagccccgagagcagctgcggctttaccagcgagagctaccagcagggcgtgctgagcgccaccatcctgtacgagatcctgctgggcaaggccaccctgtacgccgtgctggtgtctgccctggtgctgatggctatggtcaagcggaaggacagccggggacgcgccaagagaagcggatctggcgtgaagcagaccctgaatttcgacctgctgaagctggctggcgacgtggaatccaacccaggccctactagtatggactggatttggcgcatccttttccttgtcggcgctgctaccggcgcgcattccttcgaacaagaacagctggttgaaagcggcggaggactggttcaacctggcggttctctgagactgagctgtgccgccagcggcttcaccttcagcgactactacatgagctggatcagacaggccccaggcaaaggactggaatgggtcgccacaatctaccccagcagcggcaagacctactacgccgattctgccaagggcagactgaccatctccagcgacaacgccaaggacagcctgtacctccagatgaacagcctgagagccgaggacaccgccgtgtactactgcaccagagatagctacgccgacgacgccgctctgtttgacatttggggccagggcaccaccgtgaccgtttcttctacgcgtgaggacctgaagaacgtgttcccacctgaggtggccgtgttcgagcctagcgaggccgagatcagccacacccagaaagccaccctcgtgtgcctggctaccggcttctaccccgaccatgtggaactgtcttggtgggtcaacggcaaagaggtgcacagcggcgtgtgtaccgacccccagccactgaaagaacagcccgccctgaacgacagccggtactgcctgagcagcagactgagagtgtccgccaccttctggcagaacccccggaaccacttcagatgccaggtgcagttctacggcctgagcgagaacgacgagtggacccaggacagagccaagcccgtgacccagatcgtgtctgccgaagcctggggcagagccgattgcgacgtgaagctggtggaaaagagcttcgagacagacaccaacctgaacttccagaacctgagcgtgatcggcttcagaatcctgctgctgaaagtggccggctttaacctgctgatgaccctgcggctgtggtccagc

SEQ ID NO: 4584 - DNA, 2271 bp, synthetic construct; identical to SEQ ID NO: 4580
  source 1..2271: mol_type = other DNA

SEQ ID NO: 4585 - DNA, 2292 bp, synthetic construct; identical to SEQ ID NO: 4581
  source 1..2292: mol_type = other DNA

SEQ ID NO: 4586 - DNA, 2271 bp, synthetic construct; identical to SEQ ID NO: 4582
  source 1..2271: mol_type = other DNA

SEQ ID NO: 4587 - DNA, 2295 bp, synthetic construct; identical to SEQ ID NO: 4583
  source 1..2295: mol_type = other DNA

SEQ ID NO: 4588 - DNA, 2292 bp, synthetic construct
  source 1..2292: mol_type = other DNA
atggccttaccagtgaccgccttgctcctgccgctggccttgctgctccacgccgccaggccggaagtgcagctggttgaatctggcggaggactggttcagcctggcggatctctgagactgtcttgtgccgccagcggcttcagcttcagcgacttttggatgagctgggtccgacaggcccctggcaaaggacttgaatgggtcgccacaatcagccaggccggcagcgagaaggactacgtggactctgtgaagggcagattcaccatcagccgggacaacgccaagaagtccctgtacctccagatgaacagcctgagagccgaggacaccgccgtgtactattgtgcctctggcgtgtacagcttcgactacagaggccagggcaccctggtcacagtctcttctggtaccggcggaggcggatctggcggcggaggtagcggtggcggaggatctgaattcgatatccagctcactcaaagcccctctagtctctctgcctcagtgggggatcgggtcagttttacttgtcaagcttcacaggatatcaacaacttccttaattggtatcagcagaagccaggaaaagcacccaagctgctcatctatgatgcctcaaatttggagacgggtgttcccagtcgattctctgggtcagggtccgggaccgactttacgtttacgatctcctctctgcagcccgaagacatcgccacatactattgtcaacagtacggcaacttgcctttcacatttgggggcgggactaaggttgaaatcaagaggctcgagatccagaaccctgatcctgccgtgtaccagctgcgggatagcaagagcagcgacaagagcgtgtgtctgttcaccgacttcgacagccagaccaacgtgtcccagagcaaggactccgacgtgtacatcaccgataagtgcgtgctggacatgcggagcatggacttcaagagcaactccgccgtggcctggtccaacaagtccgatttcgcctgcgccaacgccttcaacaacagcattatccccgaggacacattcttcccaagccccgagagcagctgcggctttaccagcgagagctaccagcagggcgtgctgagcgccaccatcctgtacgagatcctgctgggcaaggccaccctgtacgccgtgctggtgtctgccctggtgctgatggctatggtcaagcggaaggacagccggggacgcgccaagagaagcggatctggcgtgaagcagaccctgaatttcgacctgctgaagctggctggcgacgtggaatccaacccaggccctactagtatggactggatttggcgcatccttttccttgtcggcgctgctaccggcgcgcattccttcgaacaggtacagctgcaggaatctgggcccggacttgtcaagccaagtcagacactttctcttacatgtaccgtgagcggcggaagtataagcagtggaggcttttactggtcttggatacggcagcacccaggcaaaggcttggagtggattggatacattcatcattcaggatctacacactataatccatcccttaagtcccgggtcaccattagcattgatacgtctaagaatctgttcagtctcaggctgtcctccgtcactgctgccgacacagccgtgtactactgcgcctccttggtttactgcggaggcgactgttatagcggctttgattattgggggcaggggaccctcgtaaccgtgagctctacgcgtgaggacctgaagaacgtgttcccacctgaggtggccgtgttcgagcctagcgaggccgagatcagccacacccagaaagccaccctcgtgtgcctggctaccggcttctaccccgaccatgtggaactgtcttggtgggtcaacggcaaagaggtgcacagcggcgtgtgtaccgacccccagccactgaaagaacagcccgccctgaacgacagccggtactgcctgagcagcagactgagagtgtccgccaccttctggcagaacccccggaaccacttcagatgccaggtgcagttctacggcctgagcgagaacgacgagtggacccaggacagagccaagcccgtgacccagatcgtgtctgccgaagcctggggcagagccgattgcgacgtgaagctggtggaaaagagcttcgagacagacaccaacctgaacttccagaacctgagcgtgatcggcttcagaatcctgctgctgaaagtggccggctttaacctgctgatgaccctgcggctgtggtccagc

SEQ ID NO: 4589 - DNA, 2280 bp, synthetic construct
  source 1..2280: mol_type = other DNA
atggccttaccagtgaccgccttgctcctgccgctggccttgctgctccacgccgccaggccggaagtgcagctggttgaatctggcggaggactggttcagcctggcggatctctgagactgtcttgtgccgccagcggcttcagcttcagcgacttttggatgagctgggtccgacaggcccctggcaaaggacttgaatgggtcgccacaatcagccaggccggcagcgagaaggactacgtggactctgtgaagggcagattcaccatcagccgggacaacgccaagaagtccctgtacctccagatgaacagcctgagagccgaggacaccgccgtgtactattgtgcctctggcgtgtacagcttcgactacagaggccagggcaccctggtcacagtctcttctggtaccggcggaggcggatctggcggcggaggtagcggtggcggaggatctgaattcgacattcagatgacacagagccctagcagcctgagcgcctctgtgggagacagagtgaccatcacatgcaagagcagccagagcgtgctgtactccagcaatcagaagaactacctggcctggttccagcagaagcctggcaaggctcctaagctgctgatctactgggccagcaccagagaaagcggcgtgccaagcagattttctggcagcggctctggcaccgacttcaccctgacaatatccagcctccagcctgaggacttcgccacctacttttgccaccagtacctgagcagctacacattcggacagggcaccaaggtggaaatcaagcggctcgagatccagaaccctgatcctgccgtgtaccagctgcgggatagcaagagcagcgacaagagcgtgtgtctgttcaccgacttcgacagccagaccaacgtgtcccagagcaaggactccgacgtgtacatcaccgataagtgcgtgctggacatgcggagcatggacttcaagagcaactccgccgtggcctggtccaacaagtccgatttcgcctgcgccaacgccttcaacaacagcattatccccgaggacacattcttcccaagccccgagagcagctgcggctttaccagcgagagctaccagcagggcgtgctgagcgccaccatcctgtacgagatcctgctgggcaaggccaccctgtacgccgtgctggtgtctgccctggtgctgatggctatggtcaagcggaaggacagccggggacgcgccaagagaagcggatctggcgtgaagcagaccctgaatttcgacctgctgaagctggctggcgacgtggaatccaacccaggccctactagtatggactggatttggcgcatccttttccttgtcggcgctgctaccggcgcgcattccttcgaagaggtgcagctggttgaatctggcggaggactggttcagcctggcggatctctgagactgtcttgtgccgccagcggctacaccttcaccacctattggatgcactgggtccgacaggcccctggcaaaggacttgagtgggtcggatatatcaggcccagcaccggctacacagagtacaaccagaagttcaaggaccgcttcaccatcagcgccgacaccagcaagaataccgcctacctccagatgaacagcctgagagccgaggacaccgccgtgtactactgtgccagatccagatggctgctggactattggggccagggcacactggttacagtttctacgcgtgaggacctgaagaacgtgttcccacctgaggtggccgtgttcgagcctagcgaggccgagatcagccacacccagaaagccaccctcgtgtgcctggctaccggcttctaccccgaccatgtggaactgtcttggtgggtcaacggcaaagaggtgcacagcggcgtgtgtaccgacccccagccactgaaagaacagcccgccctgaacgacagccggtactgcctgagcagcagactgagagtgtccgccaccttctggcagaacccccggaaccacttcagatgccaggtgcagttctacggcctgagcgagaacgacgagtggacccaggacagagccaagcccgtgacccagatcgtgtctgccgaagcctggggcagagccgattgcgacgtgaagctggtggaaaagagcttcgagacagacaccaacctgaacttccagaacctgagcgtgatcggcttcagaatcctgctgctgaaagtggccggctttaacctgctgatgaccctgcggctgtggtccagc

SEQ ID NO: 4590 - DNA, 2271 bp, synthetic construct
  source 1..2271: mol_type = other DNA
atggccttaccagtgaccgccttgctcctgccgctggccttgctgctccacgccgccaggccggaagtgcagctggttgaatctggcggaggactggttcagcctggcggatctctgagactgtcttgtgccgccagcggcttcagcttcagcgacttttggatgagctgggtccgacaggcccctggcaaaggacttgaatgggtcgccacaatcagccaggccggcagcgagaaggactacgtggactctgtgaagggcagattcaccatcagccgggacaacgccaagaagtccctgtacctccagatgaacagcctgagagccgaggacaccgccgtgtactattgtgcctctggcgtgtacagcttcgactacagaggccagggcaccctggtcacagtctcttctggtaccggcggaggcggatctggcggcggaggtagcggtggcggaggatctgaattcgacatccagatgacacagagccctagcagcctgtctgccagcgtgggagacagagtgaccatcacctgtagagccagccaggacatcagcaactacctgaactggtatcagcagaagcccggcaaggcccctaagctgctgatctactacaccagcagactgcacagcggcgtgcccagcagattttctggctctggcagcggcaccgacttcaccctgacaatatctagcctccagcctgaggacttcgccacctactattgccagcagggcaacaccctgccttacacatttggacagggcaccaaggtggaaatcaagagactcgagatccagaaccctgatcctgccgtgtaccagctgcgggatagcaagagcagcgacaagagcgtgtgtctgttcaccgacttcgacagccagaccaacgtgtcccagagcaaggactccgacgtgtacatcaccgataagtgcgtgctggacatgcggagcatggacttcaagagcaactccgccgtggcctggtccaacaagtccgatttcgcctgcgccaacgccttcaacaacagcattatccccgaggacacattcttcccaagccccgagagcagctgcggctttaccagcgagagctaccagcagggcgtgctgagcgccaccatcctgtacgagatcctgctgggcaaggccaccctgtacgccgtgctggtgtctgccctggtgctgatggctatggtcaagcggaaggacagccggggacgcgccaagagaagcggatctggcgtgaagcagaccctgaatttcgacctgctgaagctggctggcgacgtggaatccaacccaggccctactagtatggactggatttggcgcatccttttccttgtcggcgctgctaccggcgcgcattccttcgaagaagtgcagctggttgaatcaggtggcggcctggttcaacctggcggatctctgagactgagctgtgccgccagcggcttcaccttcagcgactactttatgagctgggtccgacaggcccctggcaaaggacttgaatgggtcgccaccatcagcaatggcggcacctacacttactaccccgacagcgtgaagggcagattcaccatctccagagacaacagcaagaacaccctgtacctccagatgaactccctgagagccgaggacaccgccgtgtactactgcgccagattcgacggctacatcttcgactattggggccagggcaccctggtcacagtctcttctacgcgtgaggacctgaagaacgtgttcccacctgaggtggccgtgttcgagcctagcgaggccgagatcagccacacccagaaagccaccctcgtgtgcctggctaccggcttctaccccgaccatgtggaactgtcttggtgggtcaacggcaaagaggtgcacagcggcgtgtgtaccgacccccagccactgaaagaacagcccgccctgaacgacagccggtactgcctgagcagcagactgagagtgtccgccaccttctggcagaacccccggaaccacttcagatgccaggtgcagttctacggcctgagcgagaacgacgagtggacccaggacagagccaagcccgtgacccagatcgtgtctgccgaagcctggggcagagccgattgcgacgtgaagctggtggaaaagagcttcgagacagacaccaacctgaacttccagaacctgagcgtgatcggcttcagaatcctgctgctgaaagtggccggctttaacctgctgatgaccctgcggctgtggtccagc

SEQ ID NO: 4591 - DNA, 2673 bp, synthetic construct
  source 1..2673: mol_type = other DNA
atggccttaccagtgaccgccttgctcctgccgctggccttgctgctccacgccgccaggccggaagtgcagctggttgaatctggcggaggactggttcagcctggcggatctctgagactgtcttgtgccgccagcggcttcagcttcagcgacttttggatgagctgggtccgacaggcccctggcaaaggacttgaatgggtcgccacaatcagccaggccggcagcgagaaggactacgtggactctgtgaagggcagattcaccatcagccgggacaacgccaagaagtccctgtacctccagatgaacagcctgagagccgaggacaccgccgtgtactattgtgcctctggcgtgtacagcttcgactacagaggccagggcaccctggtcacagtctcttctggtaccggcggaggcggatctggcggcggaggtagcggtggcggaggatctgaattcgacatccagatgacacagactacatcctccctgtctgcctctctgggagacagagtcaccatcagttgcagggcaagtcaggacattagtaagtacctgaactggtatcagcagaaaccagatggaactgttaaactcctgatctaccatacatcaagattacactcaggagtcccatcaaggttcagtggcagtgggtctggaacagattattctctcaccattagcaacctggagcaagaagatattgccacttacttttgccaacagggtaatacgcttccgtacacgttcggaggggggaccaagctggagatcacactcgaggacctgaagaacgtgttcccacctgaggtggccgtgttcgagcctagcgaggccgagatcagccacacccagaaagccaccctcgtgtgcctggctaccggcttctaccccgaccatgtggaactgtcttggtgggtcaacggcaaagaggtgcacagcggcgtgtgtaccgacccccagccactgaaagaacagcccgccctgaacgacagccggtactgcctgagcagcagactgagagtgtccgccaccttctggcagaacccccggaaccacttcagatgccaggtgcagttctacggcctgagcgagaacgacgagtggacccaggacagagccaagcccgtgacccagatcgtgtctgccgaagcctggggcagagccgattgcgacgtgaagctggtggaaaagagcttcgagacagacaccaacctgaacttccagaacctgagcgtgatcggcttcagaatcctgctgctgaaagtggccggctttaacctgctgatgaccctgcggctgtggtccagcagggccaagcgatctggatctggagcaacaaacttctcactactcaaacaagcaggtgacgtggaggagaatcccgggcctactagtatggactggatttggcgcatccttttccttgtcggcgctgctaccggcgcgcattccgggccccagctccagctgcaagagtctggacctggcctggtcaagcctagcgagacactgagcctgacctgtaccgtgtccggcgatagcatcagcagcggcgattactactggggctggatcagacagcctcctggcaaaggactggaatggatcggccacatctactacagcggcgtgacctactacaaccccagcctgaagtccagagtgaccatcagcgtggacaccagccggaaccagttctccctgaagctgtctagcgtgacagccgccgataccgccgtgtactactgcaccagagaggacagcagcaactggcggagtagaggccagggaacactggtcacagttagctctggatccggcggaggcggaagtggaggcggaggatctggcggcggaggctctttcgaagtgaaactgcaggagtcaggacctggcctggtggcgccctcacagagcctgtccgtcacatgcactgtctcaggggtctcattacccgactatggtgtaagctggattcgccagcctccacgaaagggtctggagtggctgggagtaatatggggtagtgaaaccacatactataattcagctctcaaatccagactgaccatcatcaaggacaactccaagagccaagttttcttaaaaatgaacagtctgcaaactgatgacacagccatttactactgtgccaaacattattactacggtggtagctatgctatggactactggggccaaggaacctcagtcaccgtctcctcaacgcgtatccagaaccctgatcctgccgtgtaccagctgcgggatagcaagagcagcgacaagagcgtgtgtctgttcaccgacttcgacagccagaccaacgtgtcccagagcaaggactccgacgtgtacatcaccgataagtgcgtgctggacatgcggagcatggacttcaagagcaactccgccgtggcctggtccaacaagtccgatttcgcctgcgccaacgccttcaacaacagcattatccccgaggacacattcttcccaagccccgagagcagctgcggctttaccagcgagagctaccagcagggcgtgctgagcgccaccatcctgtacgagatcctgctgggcaaggccaccctgtacgccgtgctggtgtctgccctggtgctgatggctatggtcaagcggaaggacagccgggga

SEQ ID NO: 4592 - DNA, 2676 bp, synthetic construct
  source 1..2676: mol_type = other DNA
atggccttaccagtgaccgccttgctcctgccgctggccttgctgctccacgccgccaggccggaagtgcagctggttgaatctggcggaggactggttcagcctggcggatctctgagactgtcttgtgccgccagcggcttcagcttcagcgacttttggatgagctgggtccgacaggcccctggcaaaggacttgaatgggtcgccacaatcagccaggccggcagcgagaaggactacgtggactctgtgaagggcagattcaccatcagccgggacaacgccaagaagtccctgtacctccagatgaacagcctgagagccgaggacaccgccgtgtactattgtgcctctggcgtgtacagcttcgactacagaggccagggcaccctggtcacagtctcttctggtaccggcggaggcggatctggcggcggaggtagcggtggcggaggatctgaattcgagatcgtgatgacccagagccctgccaccctgtctctgagccctggcgaaagagccaccctgagctgtagagccagccaggacatcagcaagtacctgaactggtatcagcagaagcccggccaggcccccagactgctgatctaccacaccagcagactgcacagcggcatccccgccagattttctggctctggcagcggcaccgactacaccctgacaatcagcagcctccagcccgaggacttcgccgtgtacttctgtcagcaaggcaacaccctgccctacaccttcggccagggcaccaagctggaaatcaagctcgaggacctgaagaacgtgttcccacctgaggtggccgtgttcgagcctagcgaggccgagatcagccacacccagaaagccaccctcgtgtgcctggctaccggcttctaccccgaccatgtggaactgtcttggtgggtcaacggcaaagaggtgcacagcggcgtgtgtaccgacccccagccactgaaagaacagcccgccctgaacgacagccggtactgcctgagcagcagactgagagtgtccgccaccttctggcagaacccccggaaccacttcagatgccaggtgcagttctacggcctgagcgagaacgacgagtggacccaggacagagccaagcccgtgacccagatcgtgtctgccgaagcctggggcagagccgattgcgacgtgaagctggtggaaaagagcttcgagacagacaccaacctgaacttccagaacctgagcgtgatcggcttcagaatcctgctgctgaaagtggccggctttaacctgctgatgaccctgcggctgtggtccagcagggccaagcgatctggatctggagcaacaaacttctcactactcaaacaagcaggtgacgtggaggagaatcccgggcctactagtatggactggatttggcgcatccttttccttgtcggcgctgctaccggcgcgcattccgggccccagctccagctgcaagagtctggacctggcctggtcaagcctagcgagacactgagcctgacctgtaccgtgtccggcgatagcatcagcagcggcgattactactggggctggatcagacagcctcctggcaaaggactggaatggatcggccacatctactacagcggcgtgacctactacaaccccagcctgaagtccagagtgaccatcagcgtggacaccagccggaaccagttctccctgaagctgtctagcgtgacagccgccgataccgccgtgtactactgcaccagagaggacagcagcaactggcggagtagaggccagggaacactggtcacagttagctctggatccggcggaggcggaagtggaggcggaggatctggcggcggaggctctttcgaacaggtgcaactccaggaatctggccctggcctcgtgaagcccagcgagacactgagcctgacctgtaccgtgtccggcgtgtccctgcctgactatggcgtgtcctggatcagacagccccctggcaagggcctggaatggatcggagtgatttggggcagcgaaaccacctactacaacagctccctgaagtccagagtgaccatctccaaggacaactccaagaaccaggtgtccctgaagctgagcagcgtgacagccgccgacaccgccgtgtattactgcgccaagcactactactacggcggcagctacgctatggactactggggccagggaaccctcgtgaccgtgtctagtacgcgtatccagaaccctgatcctgccgtgtaccagctgcgggatagcaagagcagcgacaagagcgtgtgtctgttcaccgacttcgacagccagaccaacgtgtcccagagcaaggactccgacgtgtacatcaccgataagtgcgtgctggacatgcggagcatggacttcaagagcaactccgccgtggcctggtccaacaagtccgatttcgcctgcgccaacgccttcaacaacagcattatccccgaggacacattcttcccaagccccgagagcagctgcggctttaccagcgagagctaccagcagggcgtgctgagcgccaccatcctgtacgagatcctgctgggcaaggccaccctgtacgccgtgctggtgtctgccctggtgctgatggctatggtcaagcggaaggacagccgggga

SEQ ID NO: 4593 - DNA, 2679 bp, synthetic construct
  source 1..2679: mol_type = other DNA
atggccttaccagtgaccgccttgctcctgccgctggccttgctgctccacgccgccaggccggaagtgcagctggttgaatctggcggaggactggttcagcctggcggatctctgagactgtcttgtgccgccagcggcttcagcttcagcgacttttggatgagctgggtccgacaggcccctggcaaaggacttgaatgggtcgccacaatcagccaggccggcagcgagaaggactacgtggactctgtgaagggcagattcaccatcagccgggacaacgccaagaagtccctgtacctccagatgaacagcctgagagccgaggacaccgccgtgtactattgtgcctctggcgtgtacagcttcgactacagaggccagggcaccctggtcacagtctcttctggtaccggcggaggcggatctggcggcggaggtagcggtggcggaggatctgaattcgacgagatcgtgctgacacagagccccgccaccctgtcactgtctccaggcgaaagagccaccctgagctgtagcgccagcagcagcgtgtcctacatgcactggtatcagcagaagcccggccaggcccccagactgctgatctacgataccagcaagctggcctccggcatccccgccagattttctggcagcggctccggcaccgacttcaccctgacaatcagcagcctggaacccgaggacgtggccgtgtactactgttttcaaggcagcgtgtaccccttcaccttcggccagggcaccaagctggaaatcaagagactcgaggacctgaagaacgtgttcccacctgaggtggccgtgttcgagcctagcgaggccgagatcagccacacccagaaagccaccctcgtgtgcctggctaccggcttctaccccgaccatgtggaactgtcttggtgggtcaacggcaaagaggtgcacagcggcgtgtgtaccgacccccagccactgaaagaacagcccgccctgaacgacagccggtactgcctgagcagcagactgagagtgtccgccaccttctggcagaacccccggaaccacttcagatgccaggtgcagttctacggcctgagcgagaacgacgagtggacccaggacagagccaagcccgtgacccagatcgtgtctgccgaagcctggggcagagccgattgcgacgtgaagctggtggaaaagagcttcgagacagacaccaacctgaacttccagaacctgagcgtgatcggcttcagaatcctgctgctgaaagtggccggctttaacctgctgatgaccctgcggctgtggtccagcagggccaagcgatctggatctggagcaacaaacttctcactactcaaacaagcaggtgacgtggaggagaatcccgggcctactagtatggactggatttggcgcatccttttccttgtcggcgctgctaccggcgcgcattccgggccccagctccagctgcaagagtctggacctggcctggtcaagcctagcgagacactgagcctgacctgtaccgtgtccggcgatagcatcagcagcggcgattactactggggctggatcagacagcctcctggcaaaggactggaatggatcggccacatctactacagcggcgtgacctactacaaccccagcctgaagtccagagtgaccatcagcgtggacaccagccggaaccagttctccctgaagctgtctagcgtgacagccgccgataccgccgtgtactactgcaccagagaggacagcagcaactggcggagtagaggccagggaacactggtcacagttagctctggatccggcggaggcggaagtggaggcggaggatctggcggcggaggctctttcgaacaggtgcagctccaggaatctggccctggcctcgtgaagcctagccagaccctgagcctgacctgtaccgtgtctggcggcagcatcagcacaagcggcatgggcgtgggctggatcagacagcaccctggcaagggcctggaatggatcggccacatttggtgggacgacgacaagcggtacaaccccgccctgaagtccagagtgaccatcagcgtggacaccagcaagaaccagttcagcctgaagctgagcagcgtgacagccgccgataccgccgtgtattattgcgcccggatggaactgtggtcctactacttcgactactggggccagggaaccctcgtgaccgtgtctagtacgcgtatccagaaccctgatcctgccgtgtaccagctgcgggatagcaagagcagcgacaagagcgtgtgtctgttcaccgacttcgacagccagaccaacgtgtcccagagcaaggactccgacgtgtacatcaccgataagtgcgtgctggacatgcggagcatggacttcaagagcaactccgccgtggcctggtccaacaagtccgatttcgcctgcgccaacgccttcaacaacagcattatccccgaggacacattcttcccaagccccgagagcagctgcggctttaccagcgagagctaccagcagggcgtgctgagcgccaccatcctgtacgagatcctgctgggcaaggccaccctgtacgccgtgctggtgtctgccctggtgctgatggctatggtcaagcggaaggacagccgggga

SEQ ID NO: 4594 - DNA, 2673 bp, synthetic construct
  source 1..2673: mol_type = other DNA
atggccttaccagtgaccgccttgctcctgccgctggccttgctgctccacgccgccaggccggaagtgcagctggttgaatctggcggaggactggttcagcctggcggatctctgagactgtcttgtgccgccagcggcttcagcttcagcgacttttggatgagctgggtccgacaggcccctggcaaaggacttgaatgggtcgccacaatcagccaggccggcagcgagaaggactacgtggactctgtgaagggcagattcaccatcagccgggacaacgccaagaagtccctgtacctccagatgaacagcctgagagccgaggacaccgccgtgtactattgtgcctctggcgtgtacagcttcgactacagaggccagggcaccctggtcacagtctcttctggtaccggcggaggcggatctggcggcggaggtagcggtggcggaggatctgaattcgactacatccacgtgacacagagccctagcagcctgtccgtgtccatcggcgatagagtgaccatcaactgccagacctctcaaggcgtgggcagcgacctgcactggtatcagcacaaacctggcagagcccctaagctgctgatccaccatgccagctctgtggaagatggcgtgcccagcagattttccggcaccggatttcacaccagcttcaacctgacaatcaacgacctccaggccgacgacatcggcacctactactgtcaagtgctccagagcttcggcagaggcagcagactggatacaaaactcgaggacctgaagaacgtgttcccacctgaggtggccgtgttcgagcctagcgaggccgagatcagccacacccagaaagccaccctcgtgtgcctggctaccggcttctaccccgaccatgtggaactgtcttggtgggtcaacggcaaagaggtgcacagcggcgtgtgtaccgacccccagccactgaaagaacagcccgccctgaacgacagccggtactgcctgagcagcagactgagagtgtccgccaccttctggcagaacccccggaaccacttcagatgccaggtgcagttctacggcctgagcgagaacgacgagtggacccaggacagagccaagcccgtgacccagatcgtgtctgccgaagcctggggcagagccgattgcgacgtgaagctggtggaaaagagcttcgagacagacaccaacctgaacttccagaacctgagcgtgatcggcttcagaatcctgctgctgaaagtggccggctttaacctgctgatgaccctgcggctgtggtccagcagggccaagcgatctggatctggagcaacaaacttctcactactcaaacaagcaggtgacgtggaggagaatcccgggcctactagtatggactggatttggcgcatccttttccttgtcggcgctgctaccggcgcgcattccgggccccagctccagctgcaagagtctggacctggcctggtcaagcctagcgagacactgagcctgacctgtaccgtgtccggcgatagcatcagcagcggcgattactactggggctggatcagacagcctcctggcaaaggactggaatggatcggccacatctactacagcggcgtgacctactacaaccccagcctgaagtccagagtgaccatcagcgtggacaccagccggaaccagttctccctgaagctgtctagcgtgacagccgccgataccgccgtgtactactgcaccagagaggacagcagcaactggcggagtagaggccagggaacactggtcacagttagctctggatccggcggaggcggaagtggaggcggaggatctggcggcggaggctctttcgaaagggcacacctggtgcagtctggcaccgccatgaagaaacctggcgcttccgtcagagtgtcctgtcagacaagcggctacaccttcacagcccacatcctgttctggttcagacaggccccaggcagaggactggaatgggtcggatggatcaagccccagtacggggccgtgaatttcggcggaggcttcagagacagagtgaccctgaccagggacgtgtaccgggaaatcgcctacatggacatccggggcctgaagcctgatgacaccgccgtgtactactgcgccagggatagaagctacggcgacagctcttgggctctcgatgcttggggacagggcacaacagtggtggtgtctgctacgcgtatccagaaccctgatcctgccgtgtaccagctgcgggatagcaagagcagcgacaagagcgtgtgtctgttcaccgacttcgacagccagaccaacgtgtcccagagcaaggactccgacgtgtacatcaccgataagtgcgtgctggacatgcggagcatggacttcaagagcaactccgccgtggcctggtccaacaagtccgatttcgcctgcgccaacgccttcaacaacagcattatccccgaggacacattcttcccaagccccgagagcagctgcggctttaccagcgagagctaccagcagggcgtgctgagcgccaccatcctgtacgagatcctgctgggcaaggccaccctgtacgccgtgctggtgtctgccctggtgctgatggctatggtcaagcggaaggacagccgggga

SEQ ID NO: 4595 - DNA, 2703 bp, synthetic construct
  source 1..2703: mol_type = other DNA
atggccttaccagtgaccgccttgctcctgccgctggccttgctgctccacgccgccaggccggaagtgcagctggttgaatctggcggaggactggttcagcctggcggatctctgagactgtcttgtgccgccagcggcttcagcttcagcgacttttggatgagctgggtccgacaggcccctggcaaaggacttgaatgggtcgccacaatcagccaggccggcagcgagaaggactacgtggactctgtgaagggcagattcaccatcagccgggacaacgccaagaagtccctgtacctccagatgaacagcctgagagccgaggacaccgccgtgtactattgtgcctctggcgtgtacagcttcgactacagaggccagggcaccctggtcacagtctcttctggtaccggcggaggcggatctggcggcggaggtagcggtggcggaggatctgaattcgacgtgcagatgatccagacccccgatagcctggccgtgtccctgggacagagagccaccatctcttgcagagccagcgagagcgtggacaactacggcatcagcttcatgcactggtatcagcagaagcccggccagagccccaagctgctgatctacagagcctccaacctggaaagcggcatccccgccagattttccggcagcggcagcagaaccgacttcaccctgaccatcaaccccgtggaaaccgacgacgtggcaacctactactgccagcagaacaacaaggacccccccacctttggcggaggcaccaagctggaaatcaagctcgaggacctgaagaacgtgttcccacctgaggtggccgtgttcgagcctagcgaggccgagatcagccacacccagaaagccaccctcgtgtgcctggctaccggcttctaccccgaccatgtggaactgtcttggtgggtcaacggcaaagaggtgcacagcggcgtgtgtaccgacccccagccactgaaagaacagcccgccctgaacgacagccggtactgcctgagcagcagactgagagtgtccgccaccttctggcagaacccccggaaccacttcagatgccaggtgcagttctacggcctgagcgagaacgacgagtggacccaggacagagccaagcccgtgacccagatcgtgtctgccgaagcctggggcagagccgattgcgacgtgaagctggtggaaaagagcttcgagacagacaccaacctgaacttccagaacctgagcgtgatcggcttcagaatcctgctgctgaaagtggccggctttaacctgctgatgaccctgcggctgtggtccagcagggccaagcgatctggatctggagcaacaaacttctcactactcaaacaagcaggtgacgtggaggagaatcccgggcctactagtatggactggatttggcgcatccttttccttgtcggcgctgctaccggcgcgcattccgggccccagctccagctgcaagagtctggacctggcctggtcaagcctagcgagacactgagcctgacctgtaccgtgtccggcgatagcatcagcagcggcgattactactggggctggatcagacagcctcctggcaaaggactggaatggatcggccacatctactacagcggcgtgacctactacaaccccagcctgaagtccagagtgaccatcagcgtggacaccagccggaaccagttctccctgaagctgtctagcgtgacagccgccgataccgccgtgtactactgcaccagagaggacagcagcaactggcggagtagaggccagggaacactggtcacagttagctctggatccggcggaggcggaagtggaggcggaggatctggcggcggaggctctttcgaagggggaggcggctctcaggtgcaactccagcagtctggcgctgagcttgtgaagcctggggccagcgtgaagattagctgcaaggccagcggctacgccttcagcagctactggatgaactgggtcaagcagcggcctggcaagggcctggaatggatcggccaaatctaccccggcgacggcgacaccacctacaacggcaagttcaagggcaaggccaccctgacagccgacaagagcagcagcaccgtgtacatgcaactgaacagcctgaccagcgaggacagcgccgtgtacttctgcgtgcggtactactacggcagctccggctacttcgactattggggccagggcaccacactgaccgtgtcctctacgcgtatccagaaccctgatcctgccgtgtaccagctgcgggatagcaagagcagcgacaagagcgtgtgtctgttcaccgacttcgacagccagaccaacgtgtcccagagcaaggactccgacgtgtacatcaccgataagtgcgtgctggacatgcggagcatggacttcaagagcaactccgccgtggcctggtccaacaagtccgatttcgcctgcgccaacgccttcaacaacagcattatccccgaggacacattcttcccaagccccgagagcagctgcggctttaccagcgagagctaccagcagggcgtgctgagcgccaccatcctgtacgagatcctgctgggcaaggccaccctgtacgccgtgctggtgtctgccctggtgctgatggctatggtcaagcggaaggacagccgggga

SEQ ID NO: 4596 - DNA, 2676 bp, synthetic construct
  source 1..2676: mol_type = other DNA
atggccttaccagtgaccgccttgctcctgccgctggccttgctgctccacgccgccaggccggaagtgcagctggttgaatctggcggaggactggttcagcctggcggatctctgagactgtcttgtgccgccagcggcttcagcttcagcgacttttggatgagctgggtccgacaggcccctggcaaaggacttgaatgggtcgccacaatcagccaggccggcagcgagaaggactacgtggactctgtgaagggcagattcaccatcagccgggacaacgccaagaagtccctgtacctccagatgaacagcctgagagccgaggacaccgccgtgtactattgtgcctctggcgtgtacagcttcgactacagaggccagggcaccctggtcacagtctcttctggtaccggcggaggcggatctggcggcggaggtagcggtggcggaggatctgaattcgacgtgcagatgatccagacccccagcagcctgtctgccagcctgggcgatagagtgaccatcagctgtcgggccagccaggacatcggcaactacctgaactggtatcagcagaaacccgacggcaccgtgaagctgctgatctactacaccagcagactgcacagcggcgtgcccagcagattttctggcagcggctctggcaccgagtacagcctgaccatctccaacctggaacaggaagatattgctacctacttctgtcagcaaggcagcgccctgccccctacatttggcggcggaacaaagctggaaatcaacctcgaggacctgaagaacgtgttcccacctgaggtggccgtgttcgagcctagcgaggccgagatcagccacacccagaaagccaccctcgtgtgcctggctaccggcttctaccccgaccatgtggaactgtcttggtgggtcaacggcaaagaggtgcacagcggcgtgtgtaccgacccccagccactgaaagaacagcccgccctgaacgacagccggtactgcctgagcagcagactgagagtgtccgccaccttctggcagaacccccggaaccacttcagatgccaggtgcagttctacggcctgagcgagaacgacgagtggacccaggacagagccaagcccgtgacccagatcgtgtctgccgaagcctggggcagagccgattgcgacgtgaagctggtggaaaagagcttcgagacagacaccaacctgaacttccagaacctgagcgtgatcggcttcagaatcctgctgctgaaagtggccggctttaacctgctgatgaccctgcggctgtggtccagcagggccaagcgatctggatctggagcaacaaacttctcactactcaaacaagcaggtgacgtggaggagaatcccgggcctactagtatggactggatttggcgcatccttttccttgtcggcgctgctaccggcgcgcattccgggccccagctccagctgcaagagtctggacctggcctggtcaagcctagcgagacactgagcctgacctgtaccgtgtccggcgatagcatcagcagcggcgattactactggggctggatcagacagcctcctggcaaaggactggaatggatcggccacatctactacagcggcgtgacctactacaaccccagcctgaagtccagagtgaccatcagcgtggacaccagccggaaccagttctccctgaagctgtctagcgtgacagccgccgataccgccgtgtactactgcaccagagaggacagcagcaactggcggagtagaggccagggaacactggtcacagttagctctggatccggcggaggcggaagtggaggcggaggatctggcggcggaggctctttcgaagctctccagctccagcagtctggcgcagaactcgtgcggcctggcgcttctgtgaccctgagctgtaaagccagcggctacaccttcaccgactacgagatgcactgggtcaagcagacccctgtgcacggcctggaatggatcggagccatcgaccctgagacaggcggcaccgcctacaaccagaagttcgagggcaaggccatcctgaccgccgacaagagcagcagcacagcctacatggaactgcggagcctgacctccgaggacagccccgtgtactactgtgccagacggcggtactacggcagcagctccttcgactattggggccagggcaccaccctgaccgtgtctagtacgcgtatccagaaccctgatcctgccgtgtaccagctgcgggatagcaagagcagcgacaagagcgtgtgtctgttcaccgacttcgacagccagaccaacgtgtcccagagcaaggactccgacgtgtacatcaccgataagtgcgtgctggacatgcggagcatggacttcaagagcaactccgccgtggcctggtccaacaagtccgatttcgcctgcgccaacgccttcaacaacagcattatccccgaggacacattcttcccaagccccgagagcagctgcggctttaccagcgagagctaccagcagggcgtgctgagcgccaccatcctgtacgagatcctgctgggcaaggccaccctgtacgccgtgctggtgtctgccctggtgctgatggctatggtcaagcggaaggacagccgggga

SEQ ID NO: 4597 - DNA, 2688 bp, synthetic construct
  source 1..2688: mol_type = other DNA
atggccttaccagtgaccgccttgctcctgccgctggccttgctgctccacgccgccaggccggaagtgcagctggttgaatctggcggaggactggttcagcctggcggatctctgagactgtcttgtgccgccagcggcttcagcttcagcgacttttggatgagctgggtccgacaggcccctggcaaaggacttgaatgggtcgccacaatcagccaggccggcagcgagaaggactacgtggactctgtgaagggcagattcaccatcagccgggacaacgccaagaagtccctgtacctccagatgaacagcctgagagccgaggacaccgccgtgtactattgtgcctctggcgtgtacagcttcgactacagaggccagggcaccctggtcacagtctcttctggtaccggcggaggcggatctggcggcggaggtagcggtggcggaggatctgaattcgacatcgtcctgacccagtccccagccagcctggcggtgtccctgggtcaacgagctaccatttcctgcagagcctctaagtccgtatccacttccggctatagttacctgcattggtaccaacagaaaccagggcagccacccaagctgctcatctatctggcctcaaacctggagtccggcgtgcccgccagattctccggaagtgggagcggcaccgactttacattgaacatccacccagtcgaagaggaagatgctgccacttattactgtcagcactccagggagctgccatttacatttggctctggcacaaaactggagatcaaactcgaggacctgaagaacgtgttcccacctgaggtggccgtgttcgagcctagcgaggccgagatcagccacacccagaaagccaccctcgtgtgcctggctaccggcttctaccccgaccatgtggaactgtcttggtgggtcaacggcaaagaggtgcacagcggcgtgtgtaccgacccccagccactgaaagaacagcccgccctgaacgacagccggtactgcctgagcagcagactgagagtgtccgccaccttctggcagaacccccggaaccacttcagatgccaggtgcagttctacggcctgagcgagaacgacgagtggacccaggacagagccaagcccgtgacccagatcgtgtctgccgaagcctggggcagagccgattgcgacgtgaagctggtggaaaagagcttcgagacagacaccaacctgaacttccagaacctgagcgtgatcggcttcagaatcctgctgctgaaagtggccggctttaacctgctgatgaccctgcggctgtggtccagcagggccaagcgatctggatctggagcaacaaacttctcactactcaaacaagcaggtgacgtggaggagaatcccgggcctactagtatggactggatttggcgcatccttttccttgtcggcgctgctaccggcgcgcattccgggccccagctccagctgcaagagtctggacctggcctggtcaagcctagcgagacactgagcctgacctgtaccgtgtccggcgatagcatcagcagcggcgattactactggggctggatcagacagcctcctggcaaaggactggaatggatcggccacatctactacagcggcgtgacctactacaaccccagcctgaagtccagagtgaccatcagcgtggacaccagccggaaccagttctccctgaagctgtctagcgtgacagccgccgataccgccgtgtactactgcaccagagaggacagcagcaactggcggagtagaggccagggaacactggtcacagttagctctggatccggcggaggcggaagtggaggcggaggatctggcggcggaggctctttcgaacaggttcagctggtcgagtccgggggaggtctggtacagccgggtggcagcctcaagctgtcatgtgccgcatctggttttgactttagcaggtattggatgagctgggtccgccaggccccgggcaagggacttgagtggattggagaaataaaccctacttccagcacaatcaacttcacaccttctttgaaagataaggtttttatctctcgggataacgctaaaaacacactgtacttgcagatgtctaaggtgcgaagcgaagacaccgccctctattattgcgcccggggtaattactaccgctatggggatgcgatggactattgggggcaaggtacctccgtcacggtctcaacgcgtatccagaaccctgatcctgccgtgtaccagctgcgggatagcaagagcagcgacaagagcgtgtgtctgttcaccgacttcgacagccagaccaacgtgtcccagagcaaggactccgacgtgtacatcaccgataagtgcgtgctggacatgcggagcatggacttcaagagcaactccgccgtggcctggtccaacaagtccgatttcgcctgcgccaacgccttcaacaacagcattatccccgaggacacattcttcccaagccccgagagcagctgcggctttaccagcgagagctaccagcagggcgtgctgagcgccaccatcctgtacgagatcctgctgggcaaggccaccctgtacgccgtgctggtgtctgccctggtgctgatggctatggtcaagcggaaggacagccgggga

SEQ ID NO: 4598 - DNA, 2682 bp, synthetic construct
  source 1..2682: mol_type = other DNA
atggccttaccagtgaccgccttgctcctgccgctggccttgctgctccacgccgccaggccggaagtgcagctggttgaatctggcggaggactggttcagcctggcggatctctgagactgtcttgtgccgccagcggcttcagcttcagcgacttttggatgagctgggtccgacaggcccctggcaaaggacttgaatgggtcgccacaatcagccaggccggcagcgagaaggactacgtggactctgtgaagggcagattcaccatcagccgggacaacgccaagaagtccctgtacctccagatgaacagcctgagagccgaggacaccgccgtgtactattgtgcctctggcgtgtacagcttcgactacagaggccagggcaccctggtcacagtctcttctggtaccggcggaggcggatctggcggcggaggtagcggtggcggaggatctgaattcgacatccagatgacccagagccctagctcactgagcgccagcgtgggcgacagggtgaccattacctgctccgccagccaggacatcagcaactacctgaactggtaccagcagaagcccggcaaggcccccaagctgctgatctactacacctccaacctgcactccggcgtgcccagcaggttcagcggaagcggcagcggcaccgatttcaccctgaccatctccagcctgcagcccgaggacttcgccacctactactgccagcagtacaggaagctcccctggactttcggccagggcaccaaactggagatcaagcgtctcgaggacctgaagaacgtgttcccacctgaggtggccgtgttcgagcctagcgaggccgagatcagccacacccagaaagccaccctcgtgtgcctggctaccggcttctaccccgaccatgtggaactgtcttggtgggtcaacggcaaagaggtgcacagcggcgtgtgtaccgacccccagccactgaaagaacagcccgccctgaacgacagccggtactgcctgagcagcagactgagagtgtccgccaccttctggcagaacccccggaaccacttcagatgccaggtgcagttctacggcctgagcgagaacgacgagtggacccaggacagagccaagcccgtgacccagatcgtgtctgccgaagcctggggcagagccgattgcgacgtgaagctggtggaaaagagcttcgagacagacaccaacctgaacttccagaacctgagcgtgatcggcttcagaatcctgctgctgaaagtggccggctttaacctgctgatgaccctgcggctgtggtccagcagggccaagcgatctggatctggagcaacaaacttctcactactcaaacaagcaggtgacgtggaggagaatcccgggcctactagtatggactggatttggcgcatccttttccttgtcggcgctgctaccggcgcgcattccgggccccagctccagctgcaagagtctggacctggcctggtcaagcctagcgagacactgagcctgacctgtaccgtgtccggcgatagcatcagcagcggcgattactactggggctggatcagacagcctcctggcaaaggactggaatggatcggccacatctactacagcggcgtgacctactacaaccccagcctgaagtccagagtgaccatcagcgtggacaccagccggaaccagttctccctgaagctgtctagcgtgacagccgccgataccgccgtgtactactgcaccagagaggacagcagcaactggcggagtagaggccagggaacactggtcacagttagctctggatccggcggaggcggaagtggaggcggaggatctggcggcggaggctctttcgaacaggtgcagctggtccagagcggcgccgaagtgaagaagcccggcagctccgtgaaagtgagctgcaaggccagcggcggcaccttcagcaactactggatgcactgggtgaggcaggcccccggacagggcctggagtggatgggcgccacctacaggggccacagcgacacctactacaaccagaagttcaagggccgggtgaccatcaccgccgacaagagcaccagcaccgcctacatggaactgagcagcctcaggagcgaggacaccgctgtgtattactgcgccaggggcgccatctacgacggctacgacgtgctggacaactggggccagggcacactggtgaccgtgtccagcacgcgtatccagaaccctgatcctgccgtgtaccagctgcgggatagcaagagcagcgacaagagcgtgtgtctgttcaccgacttcgacagccagaccaacgtgtcccagagcaaggactccgacgtgtacatcaccgataagtgcgtgctggacatgcggagcatggacttcaagagcaactccgccgtggcctggtccaacaagtccgatttcgcctgcgccaacgccttcaacaacagcattatccccgaggacacattcttcccaagccccgagagcagctgcggctttaccagcgagagctaccagcagggcgtgctgagcgccaccatcctgtacgagatcctgctgggcaaggccaccctgtacgccgtgctggtgtctgccctggtgctgatggctatggtcaagcggaaggacagccgggga

SEQ ID NO: 4599 - DNA, 2682 bp, synthetic construct
  source 1..2682: mol_type = other DNA
atggccttaccagtgaccgccttgctcctgccgctggccttgctgctccacgccgccaggccggaagtgcagctggttgaatctggcggaggactggttcagcctggcggatctctgagactgtcttgtgccgccagcggcttcagcttcagcgacttttggatgagctgggtccgacaggcccctggcaaaggacttgaatgggtcgccacaatcagccaggccggcagcgagaaggactacgtggactctgtgaagggcagattcaccatcagccgggacaacgccaagaagtccctgtacctccagatgaacagcctgagagccgaggacaccgccgtgtactattgtgcctctggcgtgtacagcttcgactacagaggccagggcaccctggtcacagtctcttctggtaccggcggaggcggatctggcggcggaggtagcggtggcggaggatctgaattcgacatcgtgctgacacagagccctgccaccctgtctctgagccctggcgatagagccaccatcagctgtagagccagcgagagcgtgaccatcctgggcagccacctgatctactggtatcagcagaagcccggccagccccccagactgctgattcagctggcctccaatgtgcagaccggcgtgccagccagattttccggcagcggcagcagaaccgacttcaccctgaccatcagcagcgtggaacccgaggacttcgccgtgtactactgcctccagagccggaccatccccagaacattcggccagggcaccaagctggaaatcaagagactcgaggacctgaagaacgtgttcccacctgaggtggccgtgttcgagcctagcgaggccgagatcagccacacccagaaagccaccctcgtgtgcctggctaccggcttctaccccgaccatgtggaactgtcttggtgggtcaacggcaaagaggtgcacagcggcgtgtgtaccgacccccagccactgaaagaacagcccgccctgaacgacagccggtactgcctgagcagcagactgagagtgtccgccaccttctggcagaacccccggaaccacttcagatgccaggtgcagttctacggcctgagcgagaacgacgagtggacccaggacagagccaagcccgtgacccagatcgtgtctgccgaagcctggggcagagccgattgcgacgtgaagctggtggaaaagagcttcgagacagacaccaacctgaacttccagaacctgagcgtgatcggcttcagaatcctgctgctgaaagtggccggctttaacctgctgatgaccctgcggctgtggtccagcagggccaagcgatctggatctggagcaacaaacttctcactactcaaacaagcaggtgacgtggaggagaatcccgggcctactagtatggactggatttggcgcatccttttccttgtcggcgctgctaccggcgcgcattccgggccccagctccagctgcaagagtctggacctggcctggtcaagcctagcgagacactgagcctgacctgtaccgtgtccggcgatagcatcagcagcggcgattactactggggctggatcagacagcctcctggcaaaggactggaatggatcggccacatctactacagcggcgtgacctactacaaccccagcctgaagtccagagtgaccatcagcgtggacaccagccggaaccagttctccctgaagctgtctagcgtgacagccgccgataccgccgtgtactactgcaccagagaggacagcagcaactggcggagtagaggccagggaacactggtcacagttagctctggatccggcggaggcggaagtggaggcggaggatctggcggcggaggctctttcgaacaggtgcagctggtgcagtctggccccgaagtgaagaaacccggcgagtccgtgaagatcagctgcaaggccagcggctacaccttccggcactacagcatgaactgggtcaagcaggccccaggccagggcctgaagtggatgggcagaatcaacaccgagagcggcgtgcccatctacgccgacgacttcaagggccggttcagcttcaccgtggacaccagcgccagcaccgcctacctggaaatctccagcctgaccagcgaggataccgccgtgtatttctgctccaacgactacctgtacagcctggatttctggggccagggaaccaccctgacagtgtcctctacgcgtatccagaaccctgatcctgccgtgtaccagctgcgggatagcaagagcagcgacaagagcgtgtgtctgttcaccgacttcgacagccagaccaacgtgtcccagagcaaggactccgacgtgtacatcaccgataagtgcgtgctggacatgcggagcatggacttcaagagcaactccgccgtggcctggtccaacaagtccgatttcgcctgcgccaacgccttcaacaacagcattatccccgaggacacattcttcccaagccccgagagcagctgcggctttaccagcgagagctaccagcagggcgtgctgagcgccaccatcctgtacgagatcctgctgggcaaggccaccctgtacgccgtgctggtgtctgccctggtgctgatggctatggtcaagcggaaggacagccgggga

SEQ ID NO: 4600 - DNA, 2685 bp, synthetic construct
  source 1..2685: mol_type = other DNA
atggccttaccagtgaccgccttgctcctgccgctggccttgctgctccacgccgccaggccggaagtgcagctggttgaatctggcggaggactggttcagcctggcggatctctgagactgtcttgtgccgccagcggcttcagcttcagcgacttttggatgagctgggtccgacaggcccctggcaaaggacttgaatgggtcgccacaatcagccaggccggcagcgagaaggactacgtggactctgtgaagggcagattcaccatcagccgggacaacgccaagaagtccctgtacctccagatgaacagcctgagagccgaggacaccgccgtgtactattgtgcctctggcgtgtacagcttcgactacagaggccagggcaccctggtcacagtctcttctggtaccggcggaggcggatctggcggcggaggtagcggtggcggaggatctgaattccagtctgtgctgacacagcctcctagtgtgtctggcgctcctggacagagagtgaccatcagctgtacaggcagcagcagcaatatcggagccggctttgacgtgcactggtatcagcagctgcctggcacagcccctaaactgctgatctacggcaacagcaacagacccagcggcgtgcccgatagattttccggctctaagagcggcacaagcgccagcctggctattactggactccaggccgaggacgaggccgactactactgtcagagctacgacagcagcctgagcggctacgttttcggcaccggcaccaaagtgacagtgcttggtctcgaggacctgaagaacgtgttcccacctgaggtggccgtgttcgagcctagcgaggccgagatcagccacacccagaaagccaccctcgtgtgcctggctaccggcttctaccccgaccatgtggaactgtcttggtgggtcaacggcaaagaggtgcacagcggcgtgtgtaccgacccccagccactgaaagaacagcccgccctgaacgacagccggtactgcctgagcagcagactgagagtgtccgccaccttctggcagaacccccggaaccacttcagatgccaggtgcagttctacggcctgagcgagaacgacgagtggacccaggacagagccaagcccgtgacccagatcgtgtctgccgaagcctggggcagagccgattgcgacgtgaagctggtggaaaagagcttcgagacagacaccaacctgaacttccagaacctgagcgtgatcggcttcagaatcctgctgctgaaagtggccggctttaacctgctgatgaccctgcggctgtggtccagcagggccaagcgatctggatctggagcaacaaacttctcactactcaaacaagcaggtgacgtggaggagaatcccgggcctactagtatggactggatttggcgcatccttttccttgtcggcgctgctaccggcgcgcattccgggccccagctccagctgcaagagtctggacctggcctggtcaagcctagcgagacactgagcctgacctgtaccgtgtccggcgatagcatcagcagcggcgattactactggggctggatcagacagcctcctggcaaaggactggaatggatcggccacatctactacagcggcgtgacctactacaaccccagcctgaagtccagagtgaccatcagcgtggacaccagccggaaccagttctccctgaagctgtctagcgtgacagccgccgataccgccgtgtactactgcaccagagaggacagcagcaactggcggagtagaggccagggaacactggtcacagttagctctggatccggcggaggcggaagtggaggcggaggatctggcggcggaggctctttcgaacaagttcagctggttcagagcggagccgaagtgaagaaacctggggcctctgtgaaggtgtcctgcaaggcttccggctacacctttaccgattactacatgcactgggtccgacaggctcccggccaaagacttgaatggatgggctggatcaaccccaacagcggcggcacaaattacgcccagaagttccaggaccggatcaccgtgaccagagacaccagctccaacaccggctacatggaactgacccggctgagatccgatgacaccgccgtgtactactgcgctagaagcccttactccggcgtgctggataagtggggacagggcacactggtcaccgtgtcatctacgcgtatccagaaccctgatcctgccgtgtaccagctgcgggatagcaagagcagcgacaagagcgtgtgtctgttcaccgacttcgacagccagaccaacgtgtcccagagcaaggactccgacgtgtacatcaccgataagtgcgtgctggacatgcggagcatggacttcaagagcaactccgccgtggcctggtccaacaagtccgatttcgcctgcgccaacgccttcaacaacagcattatccccgaggacacattcttcccaagccccgagagcagctgcggctttaccagcgagagctaccagcagggcgtgctgagcgccaccatcctgtacgagatcctgctgggcaaggccaccctgtacgccgtgctggtgtctgccctggtgctgatggctatggtcaagcggaaggacagccgggga

SEQ ID NO: 4601 - DNA, 2676 bp, synthetic construct
  source 1..2676: mol_type = other DNA
atggccttaccagtgaccgccttgctcctgccgctggccttgctgctccacgccgccaggccggaagtgcagctggttgaatctggcggaggactggttcagcctggcggatctctgagactgtcttgtgccgccagcggcttcagcttcagcgacttttggatgagctgggtccgacaggcccctggcaaaggacttgaatgggtcgccacaatcagccaggccggcagcgagaaggactacgtggactctgtgaagggcagattcaccatcagccgggacaacgccaagaagtccctgtacctccagatgaacagcctgagagccgaggacaccgccgtgtactattgtgcctctggcgtgtacagcttcgactacagaggccagggcaccctggtcacagtctcttctggtaccggcggaggcggatctggcggcggaggtagcggtggcggaggatctgaattccaggctgttctgacacagcctccatctgcctctggcacacctggacagagagtgaccatctcctgtagcggcagcagcagcaacatcggcagctacaccgtgtcctggtatcagcagctccctggaacagcccctaagttcctgatctacagcaacaaccagcggcctagcggcgtgcccgatagattttctggcagcaagagcggcacaagcgccagcctggctatttctggactccagtctgaggacgaggccgactactattgtgccgcctgggacgatagcctgaacggctatgtgtttggcaccggcaccaaagtgacagtgcttggtctcgaggacctgaagaacgtgttcccacctgaggtggccgtgttcgagcctagcgaggccgagatcagccacacccagaaagccaccctcgtgtgcctggctaccggcttctaccccgaccatgtggaactgtcttggtgggtcaacggcaaagaggtgcacagcggcgtgtgtaccgacccccagccactgaaagaacagcccgccctgaacgacagccggtactgcctgagcagcagactgagagtgtccgccaccttctggcagaacccccggaaccacttcagatgccaggtgcagttctacggcctgagcgagaacgacgagtggacccaggacagagccaagcccgtgacccagatcgtgtctgccgaagcctggggcagagccgattgcgacgtgaagctggtggaaaagagcttcgagacagacaccaacctgaacttccagaacctgagcgtgatcggcttcagaatcctgctgctgaaagtggccggctttaacctgctgatgaccctgcggctgtggtccagcagggccaagcgatctggatctggagcaacaaacttctcactactcaaacaagcaggtgacgtggaggagaatcccgggcctactagtatggactggatttggcgcatccttttccttgtcggcgctgctaccggcgcgcattccgggccccagctccagctgcaagagtctggacctggcctggtcaagcctagcgagacactgagcctgacctgtaccgtgtccggcgatagcatcagcagcggcgattactactggggctggatcagacagcctcctggcaaaggactggaatggatcggccacatctactacagcggcgtgacctactacaaccccagcctgaagtccagagtgaccatcagcgtggacaccagccggaaccagttctccctgaagctgtctagcgtgacagccgccgataccgccgtgtactactgcaccagagaggacagcagcaactggcggagtagaggccagggaacactggtcacagttagctctggatccggcggaggcggaagtggaggcggaggatctggcggcggaggctctttcgaagttcaactggttcagagcggagccgaagtgaagaagcctggcgagagcctgaagattagctgcaaaggcagcggctacgacttcaccacctactggatcggctgggtccgacagatgcctggcaaaggactggaatggatgggcatcatctaccccggcgacagcgacaccagatacagccctagcgttagaggccgcgtgaccatcagcgccgacaagtctatcaacaccgcctacctccagtggtccagcctggaagcctctgacaccgccatgtactactgcgccagaatgtggaccttcagccaggatggatggggccagggaacactggtcacagtgtcatctacgcgtatccagaaccctgatcctgccgtgtaccagctgcgggatagcaagagcagcgacaagagcgtgtgtctgttcaccgacttcgacagccagaccaacgtgtcccagagcaaggactccgacgtgtacatcaccgataagtgcgtgctggacatgcggagcatggacttcaagagcaactccgccgtggcctggtccaacaagtccgatttcgcctgcgccaacgccttcaacaacagcattatccccgaggacacattcttcccaagccccgagagcagctgcggctttaccagcgagagctaccagcagggcgtgctgagcgccaccatcctgtacgagatcctgctgggcaaggccaccctgtacgccgtgctggtgtctgccctggtgctgatggctatggtcaagcggaaggacagccgggga

SEQ ID NO: 4602 - DNA, 2685 bp, synthetic construct
  source 1..2685: mol_type = other DNA
atggccttaccagtgaccgccttgctcctgccgctggccttgctgctccacgccgccaggccggaagtgcagctggttgaatctggcggaggactggttcagcctggcggatctctgagactgtcttgtgccgccagcggcttcagcttcagcgacttttggatgagctgggtccgacaggcccctggcaaaggacttgaatgggtcgccacaatcagccaggccggcagcgagaaggactacgtggactctgtgaagggcagattcaccatcagccgggacaacgccaagaagtccctgtacctccagatgaacagcctgagagccgaggacaccgccgtgtactattgtgcctctggcgtgtacagcttcgactacagaggccagggcaccctggtcacagtctcttctggtaccggcggaggcggatctggcggcggaggtagcggtggcggaggatctgaattcgacatcgtgatgacccagagccccgatagcctggccgtgtctctgggagagagagccaccatcaactgcaagagcagccagagcatcctgtacagcagcaaccagaagaactacctggcctggtatcagcagaagcccggccagagccctaagctgctgatctactgggccagcaccagagaaagcggcgtgcccgatagattcagcggcagcggctctggcaccgacttcaccctgaccatcagttctcttcaggccgaggacgtggccgtgtactactgccaccagtacatcagctcctacaccttcggccagggcaccaagctggaaatcaagctcgaggacctgaagaacgtgttcccacctgaggtggccgtgttcgagcctagcgaggccgagatcagccacacccagaaagccaccctcgtgtgcctggctaccggcttctaccccgaccatgtggaactgtcttggtgggtcaacggcaaagaggtgcacagcggcgtgtgtaccgacccccagccactgaaagaacagcccgccctgaacgacagccggtactgcctgagcagcagactgagagtgtccgccaccttctggcagaacccccggaaccacttcagatgccaggtgcagttctacggcctgagcgagaacgacgagtggacccaggacagagccaagcccgtgacccagatcgtgtctgccgaagcctggggcagagccgattgcgacgtgaagctggtggaaaagagcttcgagacagacaccaacctgaacttccagaacctgagcgtgatcggcttcagaatcctgctgctgaaagtggccggctttaacctgctgatgaccctgcggctgtggtccagcagggccaagcgatctggatctggagcaacaaacttctcactactcaaacaagcaggtgacgtggaggagaatcccgggcctactagtatggactggatttggcgcatccttttccttgtcggcgctgctaccggcgcgcattccgggccccagctccagctgcaagagtctggacctggcctggtcaagcctagcgagacactgagcctgacctgtaccgtgtccggcgatagcatcagcagcggcgattactactggggctggatcagacagcctcctggcaaaggactggaatggatcggccacatctactacagcggcgtgacctactacaaccccagcctgaagtccagagtgaccatcagcgtggacaccagccggaaccagttctccctgaagctgtctagcgtgacagccgccgataccgccgtgtactactgcaccagagaggacagcagcaactggcggagtagaggccagggaacactggtcacagttagctctggatccggcggaggcggaagtggaggcggaggatctggcggcggaggctctttcgaacaggtgcagctggtgcagtctggcgctgaagtgaagaaacctggggccagcgtgaaggtgtcctgcaaggccagcggctacacctttgccagccagtggatgcactggatgagacaggcccctggacagggcctggaatggatcggctggatcaaccccggcaacgtgaacaccaagtacaacgagaagttcaagggcagagccaccctgacagtggacaccagcaccaacaccgcctacatggaactgagcagcctgcggagcgaggacaccgccgtgtattattgcgccagaagcacctggtacagacccctggattattggggccagggaacccttgtgaccgtgtcctctacgcgtatccagaaccctgatcctgccgtgtaccagctgcgggatagcaagagcagcgacaagagcgtgtgtctgttcaccgacttcgacagccagaccaacgtgtcccagagcaaggactccgacgtgtacatcaccgataagtgcgtgctggacatgcggagcatggacttcaagagcaactccgccgtggcctggtccaacaagtccgatttcgcctgcgccaacgccttcaacaacagcattatccccgaggacacattcttcccaagccccgagagcagctgcggctttaccagcgagagctaccagcagggcgtgctgagcgccaccatcctgtacgagatcctgctgggcaaggccaccctgtacgccgtgctggtgtctgccctggtgctgatggctatggtcaagcggaaggacagccgggga

SEQ ID NO: 4603 - DNA, 2685 bp, synthetic construct
  source 1..2685: mol_type = other DNA
atggccttaccagtgaccgccttgctcctgccgctggccttgctgctccacgccgccaggccggaagtgcagctggttgaatctggcggaggactggttcagcctggcggatctctgagactgtcttgtgccgccagcggcttcagcttcagcgacttttggatgagctgggtccgacaggcccctggcaaaggacttgaatgggtcgccacaatcagccaggccggcagcgagaaggactacgtggactctgtgaagggcagattcaccatcagccgggacaacgccaagaagtccctgtacctccagatgaacagcctgagagccgaggacaccgccgtgtactattgtgcctctggcgtgtacagcttcgactacagaggccagggcaccctggtcacagtctcttctggtaccggcggaggcggatctggcggcggaggtagcggtggcggaggatctgaattcgaccacatcgtgctgacccagagccctagcagcctgtctgccagcctgggcgacagagtgaccatcagctgtagagccagccaggacatcagcacctacctgaactggtatcagcagaaacccgacggcaccgtgaagctgctgatcttctacaccagcagactgcacgccggggtgcccagcagattttctggcagcggctctggcacccaccacagcctgaccatctccaacctggaacaggaagatattgctacctacttctgtcagcaaggcaacagcctgcccttcaccttcggcagcggcaccaagctggaaatcaagagactcgaggacctgaagaacgtgttcccacctgaggtggccgtgttcgagcctagcgaggccgagatcagccacacccagaaagccaccctcgtgtgcctggctaccggcttctaccccgaccatgtggaactgtcttggtgggtcaacggcaaagaggtgcacagcggcgtgtgtaccgacccccagccactgaaagaacagcccgccctgaacgacagccggtactgcctgagcagcagactgagagtgtccgccaccttctggcagaacccccggaaccacttcagatgccaggtgcagttctacggcctgagcgagaacgacgagtggacccaggacagagccaagcccgtgacccagatcgtgtctgccgaagcctggggcagagccgattgcgacgtgaagctggtggaaaagagcttcgagacagacaccaacctgaacttccagaacctgagcgtgatcggcttcagaatcctgctgctgaaagtggccggctttaacctgctgatgaccctgcggctgtggtccagcagggccaagcgatctggatctggagcaacaaacttctcactactcaaacaagcaggtgacgtggaggagaatcccgggcctactagtatggactggatttggcgcatccttttccttgtcggcgctgctaccggcgcgcattccgggccccagctccagctgcaagagtctggacctggcctggtcaagcctagcgagacactgagcctgacctgtaccgtgtccggcgatagcatcagcagcggcgattactactggggctggatcagacagcctcctggcaaaggactggaatggatcggccacatctactacagcggcgtgacctactacaaccccagcctgaagtccagagtgaccatcagcgtggacaccagccggaaccagttctccctgaagctgtctagcgtgacagccgccgataccgccgtgtactactgcaccagagaggacagcagcaactggcggagtagaggccagggaacactggtcacagttagctctggatccggcggaggcggaagtggaggcggaggatctggcggcggaggctctttcgaacaggtgcagctgaaagagagcggccctgagctggaaaagcctggggccagcgtgaagattagctgcaaggccagcggctacagcttcaccgcctacagcatgaactgggtcaagcagaacaacggcatgagcctggaatggatcggcagcatcgacccctactacggcgacaccaaatacgcccagaagttcaagggcaaggccaccctgaccgtggataaggccagcagcaccgcctacctccagctgaagtctctgaccagcgaggacagcgccgtgtactactgcgccagacggatgattaccaccggcgactggtacttcgacgtgtggggagccggaaccaccgtgacagtgtctagcacgcgtatccagaaccctgatcctgccgtgtaccagctgcgggatagcaagagcagcgacaagagcgtgtgtctgttcaccgacttcgacagccagaccaacgtgtcccagagcaaggactccgacgtgtacatcaccgataagtgcgtgctggacatgcggagcatggacttcaagagcaactccgccgtggcctggtccaacaagtccgatttcgcctgcgccaacgccttcaacaacagcattatccccgaggacacattcttcccaagccccgagagcagctgcggctttaccagcgagagctaccagcagggcgtgctgagcgccaccatcctgtacgagatcctgctgggcaaggccaccctgtacgccgtgctggtgtctgccctggtgctgatggctatggtcaagcggaaggacagccgggga

SEQ ID NO: 4604 - DNA, 2685 bp, synthetic construct; identical to SEQ ID NO: 4603
  source 1..2685: mol_type = other DNA

SEQ ID NO: 4605 - DNA, 2685 bp, synthetic construct
  source 1..2685: mol_type = other DNA
atggccttaccagtgaccgccttgctcctgccgctggccttgctgctccacgccgccaggccggaagtgcagctggttgaatctggcggaggactggttcagcctggcggatctctgagactgtcttgtgccgccagcggcttcagcttcagcgacttttggatgagctgggtccgacaggcccctggcaaaggacttgaatgggtcgccacaatcagccaggccggcagcgagaaggactacgtggactctgtgaagggcagattcaccatcagccgggacaacgccaagaagtccctgtacctccagatgaacagcctgagagccgaggacaccgccgtgtactattgtgcctctggcgtgtacagcttcgactacagaggccagggcaccctggtcacagtctcttctggtaccggcggaggcggatctggcggcggaggtagcggtggcggaggatctgaattcgacgagatcgtgctgacacagagccctgccaccctgtctctgagccctggcgaaagagccaccctgagctgtagagccagccagagcgtgtccagctacctggcctggtatcagcagaagcccggccaggctccccggctgctgatctacgatgccagcaatagagccaccggcatccccgccagattttccggctctggcagcggcaccgacttcaccctgaccatcagctccctggaacccgaggacttcgccgtgtactactgccagcagcggagcaactggcccatcacattcggccagggcacccggctggaaatcaaactcgaggacctgaagaacgtgttcccacctgaggtggccgtgttcgagcctagcgaggccgagatcagccacacccagaaagccaccctcgtgtgcctggctaccggcttctaccccgaccatgtggaactgtcttggtgggtcaacggcaaagaggtgcacagcggcgtgtgtaccgacccccagccactgaaagaacagcccgccctgaacgacagccggtactgcctgagcagcagactgagagtgtccgccaccttctggcagaacccccggaaccacttcagatgccaggtgcagttctacggcctgagcgagaacgacgagtggacccaggacagagccaagcccgtgacccagatcgtgtctgccgaagcctggggcagagccgattgcgacgtgaagctggtggaaaagagcttcgagacagacaccaacctgaacttccagaacctgagcgtgatcggcttcagaatcctgctgctgaaagtggccggctttaacctgctgatgaccctgcggctgtggtccagcagggccaagcgatctggatctggagcaacaaacttctcactactcaaacaagcaggtgacgtggaggagaatcccgggcctactagtatggactggatttggcgcatccttttccttgtcggcgctgctaccggcgcgcattccgggccccagctccagctgcaagagtctggacctggcctggtcaagcctagcgagacactgagcctgacctgtaccgtgtccggcgatagcatcagcagcggcgattactactggggctggatcagacagcctcctggcaaaggactggaatggatcggccacatctactacagcggcgtgacctactacaaccccagcctgaagtccagagtgaccatcagcgtggacaccagccggaaccagttctccctgaagctgtctagcgtgacagccgccgataccgccgtgtactactgcaccagagaggacagcagcaactggcggagtagaggccagggaacactggtcacagttagctctggatccggcggaggcggaagtggaggcggaggatctggcggcggaggctctttcgaagaagtgcagctggtggaatcaggcggcggactggtgcagcctggcagaagcctgagactgagctgtgccgccagcggcttcaccttcaacgactacgccatgcactgggtgcgccaggcccctggaaaaggactggaatgggtgtccacaatcagctggaacagcggcagcatcggctacgccgatagcgtgaagggccggttcaccatcagccgggacaacgccaagaagtccctgtacctccagatgaacagcctgcgggccgaggacacagccctgtactattgcgccaaggacatccagtacggcaactactactacggcatggacgtgtggggccagggaaccaccgtgaccgtgtcatctacgcgtatccagaaccctgatcctgccgtgtaccagctgcgggatagcaagagcagcgacaagagcgtgtgtctgttcaccgacttcgacagccagaccaacgtgtcccagagcaaggactccgacgtgtacatcaccgataagtgcgtgctggacatgcggagcatggacttcaagagcaactccgccgtggcctggtccaacaagtccgatttcgcctgcgccaacgccttcaacaacagcattatccccgaggacacattcttcccaagccccgagagcagctgcggctttaccagcgagagctaccagcagggcgtgctgagcgccaccatcctgtacgagatcctgctgggcaaggccaccctgtacgccgtgctggtgtctgccctggtgctgatggctatggtcaagcggaaggacagccgggga

SEQ ID NO: 4606 - DNA, 2691 bp, synthetic construct
  source 1..2691: mol_type = other DNA
atggccttaccagtgaccgccttgctcctgccgctggccttgctgctccacgccgccaggccggaagtgcagctggttgaatctggcggaggactggttcagcctggcggatctctgagactgtcttgtgccgccagcggcttcagcttcagcgacttttggatgagctgggtccgacaggcccctggcaaaggacttgaatgggtcgccacaatcagccaggccggcagcgagaaggactacgtggactctgtgaagggcagattcaccatcagccgggacaacgccaagaagtccctgtacctccagatgaacagcctgagagccgaggacaccgccgtgtactattgtgcctctggcgtgtacagcttcgactacagaggccagggcaccctggtcacagtctcttctggtaccggcggaggcggatctggcggcggaggtagcggtggcggaggatctgaattcgacatcgtgatgacccagacccccctgagcctgcctgtgacacctggcgagcctgccagcatctcctgcagaagcagcaagagcctgctgcacagcaacggcatcacctacctgtactggtatctgcagaaacccggccagagcccccaactgctgatctaccagatgagcaacctggtgtccggcgtgcccgacagattttctggcagcggctccggcaccgacttcaccctgaagatcagccgggtggaagccgaggacgtgggcgtgtactactgcgcccagaacctggaactgccctacacctttggcggcggaacaaaggtggaaatcaagcggctcgaggacctgaagaacgtgttcccacctgaggtggccgtgttcgagcctagcgaggccgagatcagccacacccagaaagccaccctcgtgtgcctggctaccggcttctaccccgaccatgtggaactgtcttggtgggtcaacggcaaagaggtgcacagcggcgtgtgtaccgacccccagccactgaaagaacagcccgccctgaacgacagccggtactgcctgagcagcagactgagagtgtccgccaccttctggcagaacccccggaaccacttcagatgccaggtgcagttctacggcctgagcgagaacgacgagtggacccaggacagagccaagcccgtgacccagatcgtgtctgccgaagcctggggcagagccgattgcgacgtgaagctggtggaaaagagcttcgagacagacaccaacctgaacttccagaacctgagcgtgatcggcttcagaatcctgctgctgaaagtggccggctttaacctgctgatgaccctgcggctgtggtccagcagggccaagcgatctggatctggagcaacaaacttctcactactcaaacaagcaggtgacgtggaggagaatcccgggcctactagtatggactggatttggcgcatccttttccttgtcggcgctgctaccggcgcgcattccgggccccagctccagctgcaagagtctggacctggcctggtcaagcctagcgagacactgagcctgacctgtaccgtgtccggcgatagcatcagcagcggcgattactactggggctggatcagacagcctcctggcaaaggactggaatggatcggccacatctactacagcggcgtgacctactacaaccccagcctgaagtccagagtgaccatcagcgtggacaccagccggaaccagttctccctgaagctgtctagcgtgacagccgccgataccgccgtgtactactgcaccagagaggacagcagcaactggcggagtagaggccagggaacactggtcacagttagctctggatccggcggaggcggaagtggaggcggaggatctggcggcggaggctctttcgaacaggtgcaactggtgcagagcggagccgaagtgaaaaagcccggcagcagcgtgaaggtgtcctgcaaggccagcggctacgccttcagctactcctggatcaactgggtgcgccaggcccctggacagggcctggaatggatgggcagaatcttccccggcgacggcgacaccgactacaacggcaagttcaagggcagagtgaccatcaccgccgacaagagcaccagcaccgcctacatggaactgagcagcctgcggagcgaggataccgccgtgtactattgtgccagaaacgtgttcgacggctactggctggtgtactggggccagggaacacttgtgaccgtgtccagcacgcgtatccagaaccctgatcctgccgtgtaccagctgcgggatagcaagagcagcgacaagagcgtgtgtctgttcaccgacttcgacagccagaccaacgtgtcccagagcaaggactccgacgtgtacatcaccgataagtgcgtgctggacatgcggagcatggacttcaagagcaactccgccgtggcctggtccaacaagtccgatttcgcctgcgccaacgccttcaacaacagcattatccccgaggacacattcttcccaagccccgagagcagctgcggctttaccagcgagagctaccagcagggcgtgctgagcgccaccatcctgtacgagatcctgctgggcaaggccaccctgtacgccgtgctggtgtctgccctggtgctgatggctatggtcaagcggaaggacagccgggga

SEQ ID NO: 4607 - DNA, 2694 bp, synthetic construct
  source 1..2694: mol_type = other DNA
atggccttaccagtgaccgccttgctcctgccgctggccttgctgctccacgccgccaggccggaagtgcagctggttgaatctggcggaggactggttcagcctggcggatctctgagactgtcttgtgccgccagcggcttcagcttcagcgacttttggatgagctgggtccgacaggcccctggcaaaggacttgaatgggtcgccacaatcagccaggccggcagcgagaaggactacgtggactctgtgaagggcagattcaccatcagccgggacaacgccaagaagtccctgtacctccagatgaacagcctgagagccgaggacaccgccgtgtactattgtgcctctggcgtgtacagcttcgactacagaggccagggcaccctggtcacagtctcttctggtaccggcggaggcggatctggcggcggaggtagcggtggcggaggatctgaattcgacatccagatgacccagagccccagcagcctgtctgccagcgtgggcgacagagtgaccatcacctgtcggagcagccagagcatcgtgcactccgtgggcaacaccttcctggaatggtatcagcagaagcccggcaaggcccccaagctgctgatctacaaggtgtccaacagattcagcggcgtgcccagcaggtttagcggctctggcagcggcaccgacttcaccctgaccatctctagcctccagcccgaggacttcgccacctactactgttttcaaggcagccagttcccctacaccttcggccagggaacaaaggtggaaatcaagcggctcgaggacctgaagaacgtgttcccacctgaggtggccgtgttcgagcctagcgaggccgagatcagccacacccagaaagccaccctcgtgtgcctggctaccggcttctaccccgaccatgtggaactgtcttggtgggtcaacggcaaagaggtgcacagcggcgtgtgtaccgacccccagccactgaaagaacagcccgccctgaacgacagccggtactgcctgagcagcagactgagagtgtccgccaccttctggcagaacccccggaaccacttcagatgccaggtgcagttctacggcctgagcgagaacgacgagtggacccaggacagagccaagcccgtgacccagatcgtgtctgccgaagcctggggcagagccgattgcgacgtgaagctggtggaaaagagcttcgagacagacaccaacctgaacttccagaacctgagcgtgatcggcttcagaatcctgctgctgaaagtggccggctttaacctgctgatgaccctgcggctgtggtccagcagggccaagcgatctggatctggagcaacaaacttctcactactcaaacaagcaggtgacgtggaggagaatcccgggcctactagtatggactggatttggcgcatccttttccttgtcggcgctgctaccggcgcgcattccgggccccagctccagctgcaagagtctggacctggcctggtcaagcctagcgagacactgagcctgacctgtaccgtgtccggcgatagcatcagcagcggcgattactactggggctggatcagacagcctcctggcaaaggactggaatggatcggccacatctactacagcggcgtgacctactacaaccccagcctgaagtccagagtgaccatcagcgtggacaccagccggaaccagttctccctgaagctgtctagcgtgacagccgccgataccgccgtgtactactgcaccagagaggacagcagcaactggcggagtagaggccagggaacactggtcacagttagctctggatccggcggaggcggaagtggaggcggaggatctggcggcggaggctctttcgaagaagtgcaactggtggaaagcggaggcggcctggtgcagcctggcggatctctgagactgagctgtgccgccagcggctacgagttcagccggtcctggatgaactgggtgcgccaggcccctggcaagggactggaatgggtgggaagaatctaccccggcgacggcgacaccaactacagcggcaagttcaagggccggttcaccatcagcgccgacaccagcaagaacaccgcctacctccagatgaacagcctgcgggccgaggataccgccgtgtactactgtgccagagatggcagctcctgggactggtacttcgacgtgtggggacagggaacccttgtgaccgtgtccagcacgcgtatccagaaccctgatcctgccgtgtaccagctgcgggatagcaagagcagcgacaagagcgtgtgtctgttcaccgacttcgacagccagaccaacgtgtcccagagcaaggactccgacgtgtacatcaccgataagtgcgtgctggacatgcggagcatggacttcaagagcaactccgccgtggcctggtccaacaagtccgatttcgcctgcgccaacgccttcaacaacagcattatccccgaggacacattcttcccaagccccgagagcagctgcggctttaccagcgagagctaccagcagggcgtgctgagcgccaccatcctgtacgagatcctgctgggcaaggccaccctgtacgccgtgctggtgtctgccctggtgctgatggctatggtcaagcggaaggacagccgggga

SEQ ID NO: 4608 - DNA, 2688 bp, synthetic construct
  source 1..2688: mol_type = other DNA
atggccttaccagtgaccgccttgctcctgccgctggccttgctgctccacgccgccaggccggaagtgcagctggttgaatctggcggaggactggttcagcctggcggatctctgagactgtcttgtgccgccagcggcttcagcttcagcgacttttggatgagctgggtccgacaggcccctggcaaaggacttgaatgggtcgccacaatcagccaggccggcagcgagaaggactacgtggactctgtgaagggcagattcaccatcagccgggacaacgccaagaagtccctgtacctccagatgaacagcctgagagccgaggacaccgccgtgtactattgtgcctctggcgtgtacagcttcgactacagaggccagggcaccctggtcacagtctcttctggtaccggcggaggcggatctggcggcggaggtagcggtggcggaggatctgaattcgacatccagatgacccagagccccagcagcctgtctgccagcgtgggcgacagagtgaccatcacctgtagagccagccagaccatctggtcctacctgaactggtatcagcagaggcccggcaaggcccccaacctgctgatctatgccgccagctctctccagagcggcgtgcccagcagattttccggcagaggcagcggcaccgacttcaccctgaccatcagttccttgcaggccgaggacttcgccacctactactgccagcagagctacagcatcccccagattttcggccagggcaccaagctggaaatcaagctcgaggacctgaagaacgtgttcccacctgaggtggccgtgttcgagcctagcgaggccgagatcagccacacccagaaagccaccctcgtgtgcctggctaccggcttctaccccgaccatgtggaactgtcttggtgggtcaacggcaaagaggtgcacagcggcgtgtgtaccgacccccagccactgaaagaacagcccgccctgaacgacagccggtactgcctgagcagcagactgagagtgtccgccaccttctggcagaacccccggaaccacttcagatgccaggtgcagttctacggcctgagcgagaacgacgagtggacccaggacagagccaagcccgtgacccagatcgtgtctgccgaagcctggggcagagccgattgcgacgtgaagctggtggaaaagagcttcgagacagacaccaacctgaacttccagaacctgagcgtgatcggcttcagaatcctgctgctgaaagtggccggctttaacctgctgatgaccctgcggctgtggtccagcagggccaagcgatctggatctggagcaacaaacttctcactactcaaacaagcaggtgacgtggaggagaatcccgggcctactagtatggactggatttggcgcatccttttccttgtcggcgctgctaccggcgcgcattccgggccccagctccagctgcaagagtctggacctggcctggtcaagcctagcgagacactgagcctgacctgtaccgtgtccggcgatagcatcagcagcggcgattactactggggctggatcagacagcctcctggcaaaggactggaatggatcggccacatctactacagcggcgtgacctactacaaccccagcctgaagtccagagtgaccatcagcgtggacaccagccggaaccagttctccctgaagctgtctagcgtgacagccgccgataccgccgtgtactactgcaccagagaggacagcagcaactggcggagtagaggccagggaacactggtcacagttagctctggatccggcggaggcggaagtggaggcggaggatctggcggcggaggctctttcgaacaggtgcagctccagcagtctggacccggcctcgtgaagcctagccagacactgagcctgacctgcgccatcagcggcgatagcgtgtccagcaatagcgccgcctggaactggatcagacagtccccctctcggggcctggaatggctgggccggacctactaccgcagcaagtggtacaacgactacgccgtgtccgtgaagtcccggatcaccatcaaccccgacaccagcaagaaccagttctccttgcaactgaacagcgtgacccccgaggacaccgccgtgtactactgcgccagagaagtgaccggcgacctggaagatgccttcgacatctggggccagggaacaatggtcacagtgtccagcacgcgtatccagaaccctgatcctgccgtgtaccagctgcgggatagcaagagcagcgacaagagcgtgtgtctgttcaccgacttcgacagccagaccaacgtgtcccagagcaaggactccgacgtgtacatcaccgataagtgcgtgctggacatgcggagcatggacttcaagagcaactccgccgtggcctggtccaacaagtccgatttcgcctgcgccaacgccttcaacaacagcattatccccgaggacacattcttcccaagccccgagagcagctgcggctttaccagcgagagctaccagcagggcgtgctgagcgccaccatcctgtacgagatcctgctgggcaaggccaccctgtacgccgtgctggtgtctgccctggtgctgatggctatggtcaagcggaaggacagccgggga

SEQ ID NO: 4609 - DNA, 2667 bp, synthetic construct
  source 1..2667: mol_type = other DNA
atggccttaccagtgaccgccttgctcctgccgctggccttgctgctccacgccgccaggccggaagtgcagctggttgaatctggcggaggactggttcagcctggcggatctctgagactgtcttgtgccgccagcggcttcagcttcagcgacttttggatgagctgggtccgacaggcccctggcaaaggacttgaatgggtcgccacaatcagccaggccggcagcgagaaggactacgtggactctgtgaagggcagattcaccatcagccgggacaacgccaagaagtccctgtacctccagatgaacagcctgagagccgaggacaccgccgtgtactattgtgcctctggcgtgtacagcttcgactacagaggccagggcaccctggtcacagtctcttctggtaccggcggaggcggatctggcggcggaggtagcggtggcggaggatctgaattcgacatccagatgacccagagccccgccaccatcgagaacacaagcctgtctgccagcgtgggcgacagagtgaccatcacctgtagagccagccagggcatcagctcttggctgacctggtatcagcagaagcccgagaaggcccccaagagcctgatctacgccgccagctctctgcagtctggcgtgcccagcagattttccggcagcggctctggcaccgacttcaccctgacaatcagcagcctgcagcccgaggacttcgccacctactactgccagcagtacgacagctaccccatcaccttcggccagggcacccggctggaaatcaagctcgaggacctgaagaacgtgttcccacctgaggtggccgtgttcgagcctagcgaggccgagatcagccacacccagaaagccaccctcgtgtgcctggctaccggcttctaccccgaccatgtggaactgtcttggtgggtcaacggcaaagaggtgcacagcggcgtgtgtaccgacccccagccactgaaagaacagcccgccctgaacgacagccggtactgcctgagcagcagactgagagtgtccgccaccttctggcagaacccccggaaccacttcagatgccaggtgcagttctacggcctgagcgagaacgacgagtggacccaggacagagccaagcccgtgacccagatcgtgtctgccgaagcctggggcagagccgattgcgacgtgaagctggtggaaaagagcttcgagacagacaccaacctgaacttccagaacctgagcgtgatcggcttcagaatcctgctgctgaaagtggccggctttaacctgctgatgaccctgcggctgtggtccagcagggccaagcgatctggatctggagcaacaaacttctcactactcaaacaagcaggtgacgtggaggagaatcccgggcctactagtatggactggatttggcgcatccttttccttgtcggcgctgctaccggcgcgcattccgggccccagctccagctgcaagagtctggacctggcctggtcaagcctagcgagacactgagcctgacctgtaccgtgtccggcgatagcatcagcagcggcgattactactggggctggatcagacagcctcctggcaaaggactggaatggatcggccacatctactacagcggcgtgacctactacaaccccagcctgaagtccagagtgaccatcagcgtggacaccagccggaaccagttctccctgaagctgtctagcgtgacagccgccgataccgccgtgtactactgcaccagagaggacagcagcaactggcggagtagaggccagggaacactggtcacagttagctctggatccggcggaggcggaagtggaggcggaggatctggcggcggaggctctttcgaacaggtgcaactgcagcagtggggagccggactgctgaagcctagcgagacactgagcctgacctgcgccgtgtacggcggcagcttcagcgcctactattggagctggatcagacagccccctggcaagggcctggaatggatcggcgacatcaatcacggcggaggcaccaactacaaccccagcctgaagtcccgcgtgaccatctccgtggacaccagcaagaaccagttctccctgaagctgaacagcgtgacagccgccgacacagccgtgtactactgtgccagcctgaccgcctattggggccagggatctcttgtgaccgtgtccagcacgcgtatccagaaccctgatcctgccgtgtaccagctgcgggatagcaagagcagcgacaagagcgtgtgtctgttcaccgacttcgacagccagaccaacgtgtcccagagcaaggactccgacgtgtacatcaccgataagtgcgtgctggacatgcggagcatggacttcaagagcaactccgccgtggcctggtccaacaagtccgatttcgcctgcgccaacgccttcaacaacagcattatccccgaggacacattcttcccaagccccgagagcagctgcggctttaccagcgagagctaccagcagggcgtgctgagcgccaccatcctgtacgagatcctgctgggcaaggccaccctgtacgccgtgctggtgtctgccctggtgctgatggctatggtcaagcggaaggacagccgggga

SEQ ID NO: 4610 - DNA, 2682 bp, synthetic construct
  source 1..2682: mol_type = other DNA
atggccttaccagtgaccgccttgctcctgccgctggccttgctgctccacgccgccaggccggaagtgcagctggttgaatctggcggaggactggttcagcctggcggatctctgagactgtcttgtgccgccagcggcttcagcttcagcgacttttggatgagctgggtccgacaggcccctggcaaaggacttgaatgggtcgccacaatcagccaggccggcagcgagaaggactacgtggactctgtgaagggcagattcaccatcagccgggacaacgccaagaagtccctgtacctccagatgaacagcctgagagccgaggacaccgccgtgtactattgtgcctctggcgtgtacagcttcgactacagaggccagggcaccctggtcacagtctcttctggtaccggcggaggcggatctggcggcggaggtagcggtggcggaggatctgaattcgacgagatcgtgctgacccagagccctgatagcctggccgtgtctctgggcgagagagccaccatcaactgcaaggccagccagagcgtggacttcgacggcgacagctacctgaactggtatcagcagaagcccggccagccccccaaggtgctgatctatgccgccagcacactgcagagcggcgtgcccagcagattttctggcagcggctccggcaccgacttcaccctgaccatcaacagcctggaagccgaggacgccgccacctactactgccagcagagcaacgaggacccctggacctttggcggcggaacaaaggtggaaatcaagctcgaggacctgaagaacgtgttcccacctgaggtggccgtgttcgagcctagcgaggccgagatcagccacacccagaaagccaccctcgtgtgcctggctaccggcttctaccccgaccatgtggaactgtcttggtgggtcaacggcaaagaggtgcacagcggcgtgtgtaccgacccccagccactgaaagaacagcccgccctgaacgacagccggtactgcctgagcagcagactgagagtgtccgccaccttctggcagaacccccggaaccacttcagatgccaggtgcagttctacggcctgagcgagaacgacgagtggacccaggacagagccaagcccgtgacccagatcgtgtctgccgaagcctggggcagagccgattgcgacgtgaagctggtggaaaagagcttcgagacagacaccaacctgaacttccagaacctgagcgtgatcggcttcagaatcctgctgctgaaagtggccggctttaacctgctgatgaccctgcggctgtggtccagcagggccaagcgatctggatctggagcaacaaacttctcactactcaaacaagcaggtgacgtggaggagaatcccgggcctactagtatggactggatttggcgcatccttttccttgtcggcgctgctaccggcgcgcattccgggccccagctccagctgcaagagtctggacctggcctggtcaagcctagcgagacactgagcctgacctgtaccgtgtccggcgatagcatcagcagcggcgattactactggggctggatcagacagcctcctggcaaaggactggaatggatcggccacatctactacagcggcgtgacctactacaaccccagcctgaagtccagagtgaccatcagcgtggacaccagccggaaccagttctccctgaagctgtctagcgtgacagccgccgataccgccgtgtactactgcaccagagaggacagcagcaactggcggagtagaggccagggaacactggtcacagttagctctggatccggcggaggcggaagtggaggcggaggatctggcggcggaggctctttcgaacaggtgcaactggtgcagtccggcgctgaagtgaagaaacctggggccagcgtgaaggtgtcctgcaaggtgtccggctacacctttaccgactactacattacctgggtgcgccaggcccctggacaggccctggaatggatgggctggatctaccccggcagcggcaacaccaagtacagccagaagttccagggcagattcgtgttcagcgtggacaccagcgccagcaccgcctacctgcaactgtctagcctgaaggccgaagataccgccgtgtactactgcgccaactacggcaactattggttcgcctattggggccagggaacccttgtgaccgtgtcctctacgcgtatccagaaccctgatcctgccgtgtaccagctgcgggatagcaagagcagcgacaagagcgtgtgtctgttcaccgacttcgacagccagaccaacgtgtcccagagcaaggactccgacgtgtacatcaccgataagtgcgtgctggacatgcggagcatggacttcaagagcaactccgccgtggcctggtccaacaagtccgatttcgcctgcgccaacgccttcaacaacagcattatccccgaggacacattcttcccaagccccgagagcagctgcggctttaccagcgagagctaccagcagggcgtgctgagcgccaccatcctgtacgagatcctgctgggcaaggccaccctgtacgccgtgctggtgtctgccctggtgctgatggctatggtcaagcggaaggacagccgggga

SEQ ID NO: 4611 - DNA, 2673 bp, synthetic construct
  source 1..2673: mol_type = other DNA
atggccttaccagtgaccgccttgctcctgccgctggccttgctgctccacgccgccaggccggaagtgcagctggttgaatctggcggaggactggttcagcctggcggatctctgagactgtcttgtgccgccagcggcttcagcttcagcgacttttggatgagctgggtccgacaggcccctggcaaaggacttgaatgggtcgccacaatcagccaggccggcagcgagaaggactacgtggactctgtgaagggcagattcaccatcagccgggacaacgccaagaagtccctgtacctccagatgaacagcctgagagccgaggacaccgccgtgtactattgtgcctctggcgtgtacagcttcgactacagaggccagggcaccctggtcacagtctcttctggtaccggcggaggcggatctggcggcggaggtagcggtggcggaggatctgaattcgacatccagatgacccagagccccagcagcctgtctgccagcgtgggcgacagagtgaccatcacctgtagagccagccagggcatcagctcttggctggcctggtatcagcagaagcccgagaaggcccccaagagcctgatctacgccgcctctagtctccagagcggcgtgcccagcagattttctggcagcggctccggcaccgacttcaccctgacaatcagctccctccagcccgaggacttcgccacctactactgccagcagtacaacagctaccctcccacctttggcggaggcaccaaggtggaaatcaagctcgaggacctgaagaacgtgttcccacctgaggtggccgtgttcgagcctagcgaggccgagatcagccacacccagaaagccaccctcgtgtgcctggctaccggcttctaccccgaccatgtggaactgtcttggtgggtcaacggcaaagaggtgcacagcggcgtgtgtaccgacccccagccactgaaagaacagcccgccctgaacgacagccggtactgcctgagcagcagactgagagtgtccgccaccttctggcagaacccccggaaccacttcagatgccaggtgcagttctacggcctgagcgagaacgacgagtggacccaggacagagccaagcccgtgacccagatcgtgtctgccgaagcctggggcagagccgattgcgacgtgaagctggtggaaaagagcttcgagacagacaccaacctgaacttccagaacctgagcgtgatcggcttcagaatcctgctgctgaaagtggccggctttaacctgctgatgaccctgcggctgtggtccagcagggccaagcgatctggatctggagcaacaaacttctcactactcaaacaagcaggtgacgtggaggagaatcccgggcctactagtatggactggatttggcgcatccttttccttgtcggcgctgctaccggcgcgcattccgggccccagctccagctgcaagagtctggacctggcctggtcaagcctagcgagacactgagcctgacctgtaccgtgtccggcgatagcatcagcagcggcgattactactggggctggatcagacagcctcctggcaaaggactggaatggatcggccacatctactacagcggcgtgacctactacaaccccagcctgaagtccagagtgaccatcagcgtggacaccagccggaaccagttctccctgaagctgtctagcgtgacagccgccgataccgccgtgtactactgcaccagagaggacagcagcaactggcggagtagaggccagggaacactggtcacagttagctctggatccggcggaggcggaagtggaggcggaggatctggcggcggaggctctttcgaagaagtgcaactggtgcagtctggcggagggctggtgcatcctgggggaagcctgagactgagctgtgccggctctggcttcgccttcagcagcagcaccatgcactggatcagacaggcccctggcaagggcctggaatggatcagcctgatcggaagcggagggggcatctactacggcgacagcgtgaagggccggttcaccatcagccgggacaacgccaagaacagcctgtacctccagatgaactccctgcgggccgaggacatggccgtgtactattgtgtgcggggctacttcgactgggtggactacttcgattactggggccagggcaccctcgtgaccgtgtcatctacgcgtatccagaaccctgatcctgccgtgtaccagctgcgggatagcaagagcagcgacaagagcgtgtgtctgttcaccgacttcgacagccagaccaacgtgtcccagagcaaggactccgacgtgtacatcaccgataagtgcgtgctggacatgcggagcatggacttcaagagcaactccgccgtggcctggtccaacaagtccgatttcgcctgcgccaacgccttcaacaacagcattatccccgaggacacattcttcccaagccccgagagcagctgcggctttaccagcgagagctaccagcagggcgtgctgagcgccaccatcctgtacgagatcctgctgggcaaggccaccctgtacgccgtgctggtgtctgccctggtgctgatggctatggtcaagcggaaggacagccgggga

SEQ ID NO: 4612 - DNA, 2703 bp, synthetic construct
  source 1..2703: mol_type = other DNA
atggccttaccagtgaccgccttgctcctgccgctggccttgctgctccacgccgccaggccggaagtgcagctggttgaatctggcggaggactggttcagcctggcggatctctgagactgtcttgtgccgccagcggcttcagcttcagcgacttttggatgagctgggtccgacaggcccctggcaaaggacttgaatgggtcgccacaatcagccaggccggcagcgagaaggactacgtggactctgtgaagggcagattcaccatcagccgggacaacgccaagaagtccctgtacctccagatgaacagcctgagagccgaggacaccgccgtgtactattgtgcctctggcgtgtacagcttcgactacagaggccagggcaccctggtcacagtctcttctggtaccggcggaggcggatctggcggcggaggtagcggtggcggaggatctgaattcgacgacatcgtgatgacacagtcaccagatagcctcaccgtctccctgggggagcggaccaccattaattgtaaatccagccaaagcgtgctggactcaagcaagaacaagaatagcctcgcctggtatcagcagaagcccggtcagcctccaaagctgctgctttcttgggcctccaccagagagtccgggattcctgataggtttagtggttcaggctccggcacagattttactctgaccattgattctctccagccagaggattctgcaacttattactgccagcaaagcgcccactttcctataacttttggccagggaacccgacttgaaatcaagctcgaggacctgaagaacgtgttcccacctgaggtggccgtgttcgagcctagcgaggccgagatcagccacacccagaaagccaccctcgtgtgcctggctaccggcttctaccccgaccatgtggaactgtcttggtgggtcaacggcaaagaggtgcacagcggcgtgtgtaccgacccccagccactgaaagaacagcccgccctgaacgacagccggtactgcctgagcagcagactgagagtgtccgccaccttctggcagaacccccggaaccacttcagatgccaggtgcagttctacggcctgagcgagaacgacgagtggacccaggacagagccaagcccgtgacccagatcgtgtctgccgaagcctggggcagagccgattgcgacgtgaagctggtggaaaagagcttcgagacagacaccaacctgaacttccagaacctgagcgtgatcggcttcagaatcctgctgctgaaagtggccggctttaacctgctgatgaccctgcggctgtggtccagcagggccaagcgatctggatctggagcaacaaacttctcactactcaaacaagcaggtgacgtggaggagaatcccgggcctactagtatggactggatttggcgcatccttttccttgtcggcgctgctaccggcgcgcattccgggccccagctccagctgcaagagtctggacctggcctggtcaagcctagcgagacactgagcctgacctgtaccgtgtccggcgatagcatcagcagcggcgattactactggggctggatcagacagcctcctggcaaaggactggaatggatcggccacatctactacagcggcgtgacctactacaaccccagcctgaagtccagagtgaccatcagcgtggacaccagccggaaccagttctccctgaagctgtctagcgtgacagccgccgataccgccgtgtactactgcaccagagaggacagcagcaactggcggagtagaggccagggaacactggtcacagttagctctggatccggcggaggcggaagtggaggcggaggatctggcggcggaggctctttcgaacaggtgcagctggtgcagagcggtgccgaagtgaagaaaccaggtgcatccgttaaagtttcatgtaaggctagtggatataccttcaccaattacggaatgaactgggtgaaacaggcccctggccagggactgaagtggatggggtggattaacacctacaccggggagccgacttatgcagacgactttaaggggcgggtcacgatgacctccgacacctccaccagtaccgcctacctggagctgcacaaccttaggtcagacgataccgccgtgtattactgtgcccgatggtcttggtccgacggatactatgtctacttcgactattggggccaggggaccacagttaccgtgtcctctacgcgtatccagaaccctgatcctgccgtgtaccagctgcgggatagcaagagcagcgacaagagcgtgtgtctgttcaccgacttcgacagccagaccaacgtgtcccagagcaaggactccgacgtgtacatcaccgataagtgcgtgctggacatgcggagcatggacttcaagagcaactccgccgtggcctggtccaacaagtccgatttcgcctgcgccaacgccttcaacaacagcattatccccgaggacacattcttcccaagccccgagagcagctgcggctttaccagcgagagctaccagcagggcgtgctgagcgccaccatcctgtacgagatcctgctgggcaaggccaccctgtacgccgtgctggtgtctgccctggtgctgatggctatggtcaagcggaaggacagccgggga

SEQ ID NO: 4613 - DNA, 2691 bp, synthetic construct
  source 1..2691: mol_type = other DNA
atggccttaccagtgaccgccttgctcctgccgctggccttgctgctccacgccgccaggccggaagtgcagctggttgaatctggcggaggactggttcagcctggcggatctctgagactgtcttgtgccgccagcggcttcagcttcagcgacttttggatgagctgggtccgacaggcccctggcaaaggacttgaatgggtcgccacaatcagccaggccggcagcgagaaggactacgtggactctgtgaagggcagattcaccatcagccgggacaacgccaagaagtccctgtacctccagatgaacagcctgagagccgaggacaccgccgtgtactattgtgcctctggcgtgtacagcttcgactacagaggccagggcaccctggtcacagtctcttctggtaccggcggaggcggatctggcggcggaggtagcggtggcggaggatctgaattcgacgagatcgtgctgacacagagccctggaagcctggccgtgtctcctggcgagcgcgtgacaatgagctgcaagagcagccagagcgtgttcttcagcagctcccagaagaactacctggcctggtatcagcagatccccggccagagccccagactgctgatctactgggccagcaccagagaaagcggcgtgcccgatagattcaccggcagcggctctggcaccgacttcaccctgacaatcagcagcgtgcagcccgaggacctggctatctactactgccaccagtacctgagcagccggaccttcggccagggcaccaagctggaaatcaagagactcgaggacctgaagaacgtgttcccacctgaggtggccgtgttcgagcctagcgaggccgagatcagccacacccagaaagccaccctcgtgtgcctggctaccggcttctaccccgaccatgtggaactgtcttggtgggtcaacggcaaagaggtgcacagcggcgtgtgtaccgacccccagccactgaaagaacagcccgccctgaacgacagccggtactgcctgagcagcagactgagagtgtccgccaccttctggcagaacccccggaaccacttcagatgccaggtgcagttctacggcctgagcgagaacgacgagtggacccaggacagagccaagcccgtgacccagatcgtgtctgccgaagcctggggcagagccgattgcgacgtgaagctggtggaaaagagcttcgagacagacaccaacctgaacttccagaacctgagcgtgatcggcttcagaatcctgctgctgaaagtggccggctttaacctgctgatgaccctgcggctgtggtccagcagggccaagcgatctggatctggagcaacaaacttctcactactcaaacaagcaggtgacgtggaggagaatcccgggcctactagtatggactggatttggcgcatccttttccttgtcggcgctgctaccggcgcgcattccgggccccagctccagctgcaagagtctggacctggcctggtcaagcctagcgagacactgagcctgacctgtaccgtgtccggcgatagcatcagcagcggcgattactactggggctggatcagacagcctcctggcaaaggactggaatggatcggccacatctactacagcggcgtgacctactacaaccccagcctgaagtccagagtgaccatcagcgtggacaccagccggaaccagttctccctgaagctgtctagcgtgacagccgccgataccgccgtgtactactgcaccagagaggacagcagcaactggcggagtagaggccagggaacactggtcacagttagctctggatccggcggaggcggaagtggaggcggaggatctggcggcggaggctctttcgaacaggtgcaactgcagcagcctggcgctgaggtcgtgaagccaggcgcttccgtgaagatgtcctgcaaggccagcggctacaccttcaccagctactacatccactggatcaagcagacccctggacagggcctggaatgggtgggagtgatctaccccggcaacgacgacatcagctacaaccagaagttccagggcaaggccaccctgaccgccgacaagtctagcaccaccgcctacatgcaactgtccagcctgaccagcgaggacagcgccgtgtactactgcgccagagaagtgcggctgcggtacttcgatgtgtggggccagggaaccaccgtgaccgtgtcatctacgcgtatccagaaccctgatcctgccgtgtaccagctgcgggatagcaagagcagcgacaagagcgtgtgtctgttcaccgacttcgacagccagaccaacgtgtcccagagcaaggactccgacgtgtacatcaccgataagtgcgtgctggacatgcggagcatggacttcaagagcaactccgccgtggcctggtccaacaagtccgatttcgcctgcgccaacgccttcaacaacagcattatccccgaggacacattcttcccaagccccgagagcagctgcggctttaccagcgagagctaccagcagggcgtgctgagcgccaccatcctgtacgagatcctgctgggcaaggccaccctgtacgccgtgctggtgtctgccctggtgctgatggctatggtcaagcggaaggacagccgggga

SEQ ID NO: 4614 - DNA, 2703 bp, synthetic construct
  source 1..2703: mol_type = other DNA
atggccttaccagtgaccgccttgctcctgccgctggccttgctgctccacgccgccaggccggaagtgcagctggttgaatctggcggaggactggttcagcctggcggatctctgagactgtcttgtgccgccagcggcttcagcttcagcgacttttggatgagctgggtccgacaggcccctggcaaaggacttgaatgggtcgccacaatcagccaggccggcagcgagaaggactacgtggactctgtgaagggcagattcaccatcagccgggacaacgccaagaagtccctgtacctccagatgaacagcctgagagccgaggacaccgccgtgtactattgtgcctctggcgtgtacagcttcgactacagaggccagggcaccctggtcacagtctcttctggtaccggcggaggcggatctggcggcggaggtagcggtggcggaggatctgaattcgatgtgctgctgacccagagccctctgagcctgcctgtgacactgggacagcctgccagcatctcctgtcggagcagccagaccatcgtgcacagcaacggcaacacctacctggaatggttccagcagcggccaggccagagccccagactgctgatctaccaggtgtccaacagattcagcggcgtgcccgacagattctccggcagcggctctggcaccgacttcaccctgaagatcagccgggtggaagccgaggacgtgggcgtgtactactgttttcaaggcagccacgtgccccggacctttggcggaggaacaaaggtggaaatcaagagagccctcgaggacctgaagaacgtgttcccacctgaggtggccgtgttcgagcctagcgaggccgagatcagccacacccagaaagccaccctcgtgtgcctggctaccggcttctaccccgaccatgtggaactgtcttggtgggtcaacggcaaagaggtgcacagcggcgtgtgtaccgacccccagccactgaaagaacagcccgccctgaacgacagccggtactgcctgagcagcagactgagagtgtccgccaccttctggcagaacccccggaaccacttcagatgccaggtgcagttctacggcctgagcgagaacgacgagtggacccaggacagagccaagcccgtgacccagatcgtgtctgccgaagcctggggcagagccgattgcgacgtgaagctggtggaaaagagcttcgagacagacaccaacctgaacttccagaacctgagcgtgatcggcttcagaatcctgctgctgaaagtggccggctttaacctgctgatgaccctgcggctgtggtccagcagggccaagcgatctggatctggagcaacaaacttctcactactcaaacaagcaggtgacgtggaggagaatcccgggcctactagtatggactggatttggcgcatccttttccttgtcggcgctgctaccggcgcgcattccgggccccagctccagctgcaagagtctggacctggcctggtcaagcctagcgagacactgagcctgacctgtaccgtgtccggcgatagcatcagcagcggcgattactactggggctggatcagacagcctcctggcaaaggactggaatggatcggccacatctactacagcggcgtgacctactacaaccccagcctgaagtccagagtgaccatcagcgtggacaccagccggaaccagttctccctgaagctgtctagcgtgacagccgccgataccgccgtgtactactgcaccagagaggacagcagcaactggcggagtagaggccagggaacactggtcacagttagctctggatccggcggaggcggaagtggaggcggaggatctggcggcggaggctctttcgaacagatccaactggtgcagagcggcagcgagctgaagaaacctggggccagcgtgaaggtgtcctgcaaggccagcggctacacctttaccaactacggcatgaactgggtgcgccaggcccctggacagggcctgaaatggatgggctggatcaacaccaacaccggcgagcctaagtacgccgaagagttcaagggcagattcgccctgagcctggacaccagcgtgtccacagcctacctccagatcaacagcctgaaggccgaggataccgccgtgtacttctgcgccagaggctacggcaactacgccagaggggcttggctggcctattggggccagggaacactcgtgaccgtgtcctctacgcgtatccagaaccctgatcctgccgtgtaccagctgcgggatagcaagagcagcgacaagagcgtgtgtctgttcaccgacttcgacagccagaccaacgtgtcccagagcaaggactccgacgtgtacatcaccgataagtgcgtgctggacatgcggagcatggacttcaagagcaactccgccgtggcctggtccaacaagtccgatttcgcctgcgccaacgccttcaacaacagcattatccccgaggacacattcttcccaagccccgagagcagctgcggctttaccagcgagagctaccagcagggcgtgctgagcgccaccatcctgtacgagatcctgctgggcaaggccaccctgtacgccgtgctggtgtctgccctggtgctgatggctatggtcaagcggaaggacagccgggga

SEQ ID NO: 4615 - DNA, 2658 bp, synthetic construct
  source 1..2658: mol_type = other DNA
atggccttaccagtgaccgccttgctcctgccgctggccttgctgctccacgccgccaggccggaagtgcagctggttgaatctggcggaggactggttcagcctggcggatctctgagactgtcttgtgccgccagcggcttcagcttcagcgacttttggatgagctgggtccgacaggcccctggcaaaggacttgaatgggtcgccacaatcagccaggccggcagcgagaaggactacgtggactctgtgaagggcagattcaccatcagccgggacaacgccaagaagtccctgtacctccagatgaacagcctgagagccgaggacaccgccgtgtactattgtgcctctggcgtgtacagcttcgactacagaggccagggcaccctggtcacagtctcttctggtaccggcggaggcggatctggcggcggaggtagcggtggcggaggatctgaattcgacgagatcgtgctgacacagagccctgccacactctctctgagccctggcgaaagagccaccctgagctgtagcgccagcagcagcatcaactacatctactggctccagcagaagcccggccaggcccccagaatcctgatctacctgaccagcaacctggcctccggcgtgccagccagattttctggcagcggctccggcaccgacttcaccctgacaatcagcagcctggaacccgaggacttcgccgtgtactactgcctccagtggtccagcaaccccctgacctttggcggaggcaccaaggtggaaatcaagctcgaggacctgaagaacgtgttcccacctgaggtggccgtgttcgagcctagcgaggccgagatcagccacacccagaaagccaccctcgtgtgcctggctaccggcttctaccccgaccatgtggaactgtcttggtgggtcaacggcaaagaggtgcacagcggcgtgtgtaccgacccccagccactgaaagaacagcccgccctgaacgacagccggtactgcctgagcagcagactgagagtgtccgccaccttctggcagaacccccggaaccacttcagatgccaggtgcagttctacggcctgagcgagaacgacgagtggacccaggacagagccaagcccgtgacccagatcgtgtctgccgaagcctggggcagagccgattgcgacgtgaagctggtggaaaagagcttcgagacagacaccaacctgaacttccagaacctgagcgtgatcggcttcagaatcctgctgctgaaagtggccggctttaacctgctgatgaccctgcggctgtggtccagcagggccaagcgatctggatctggagcaacaaacttctcactactcaaacaagcaggtgacgtggaggagaatcccgggcctactagtatggactggatttggcgcatccttttccttgtcggcgctgctaccggcgcgcattccgggccccagctccagctgcaagagtctggacctggcctggtcaagcctagcgagacactgagcctgacctgtaccgtgtccggcgatagcatcagcagcggcgattactactggggctggatcagacagcctcctggcaaaggactggaatggatcggccacatctactacagcggcgtgacctactacaaccccagcctgaagtccagagtgaccatcagcgtggacaccagccggaaccagttctccctgaagctgtctagcgtgacagccgccgataccgccgtgtactactgcaccagagaggacagcagcaactggcggagtagaggccagggaacactggtcacagttagctctggatccggcggaggcggaagtggaggcggaggatctggcggcggaggctctttcgaagaagtgcaactggtggaaagcgggggaggacttgtgaagcctggcggctctctgagactgagctgtgccgcctctggcttcaccttcagcagctacgacatgagctgggtgcgccaggctcctggcaagggactggaatgggtgtccaccatcagcagcggcggcagctacacctactacctggacagcatcaagggccggttcaccatctccagagacaacgccaagaacagcctgtacctccagatgaactccctgcgggccgaggacacagccgtgtattattgcgccagacagggcctggattactggggcagaggcacccttgtgaccgtgtcctctacgcgtatccagaaccctgatcctgccgtgtaccagctgcgggatagcaagagcagcgacaagagcgtgtgtctgttcaccgacttcgacagccagaccaacgtgtcccagagcaaggactccgacgtgtacatcaccgataagtgcgtgctggacatgcggagcatggacttcaagagcaactccgccgtggcctggtccaacaagtccgatttcgcctgcgccaacgccttcaacaacagcattatccccgaggacacattcttcccaagccccgagagcagctgcggctttaccagcgagagctaccagcagggcgtgctgagcgccaccatcctgtacgagatcctgctgggcaaggccaccctgtacgccgtgctggtgtctgccctggtgctgatggctatggtcaagcggaaggacagccgggga

SEQ ID NO: 4616 - DNA, 2685 bp, synthetic construct
  source 1..2685: mol_type = other DNA
atggccttaccagtgaccgccttgctcctgccgctggccttgctgctccacgccgccaggccggaagtgcagctggttgaatctggcggaggactggttcagcctggcggatctctgagactgtcttgtgccgccagcggcttcagcttcagcgacttttggatgagctgggtccgacaggcccctggcaaaggacttgaatgggtcgccacaatcagccaggccggcagcgagaaggactacgtggactctgtgaagggcagattcaccatcagccgggacaacgccaagaagtccctgtacctccagatgaacagcctgagagccgaggacaccgccgtgtactattgtgcctctggcgtgtacagcttcgactacagaggccagggcaccctggtcacagtctcttctggtaccggcggaggcggatctggcggcggaggtagcggtggcggaggatctgaattcgacatcgtgatgacccagagccccgatagcctggccgtgtctctgggagagagagccaccatcaactgccgggccagcaagagcgtgtccaccagcggctacagcttcatgcactggtatcagcagaagcccggccagccccccaagctgctgatctacctggcctccaacctggaaagcggcgtgcccgatagattcagcggcagcggctctggcaccgacttcaccctgaccatcagttctcttcaggccgaggacgtggccgtgtactactgccagcacagcagagaggtgccctggacattcggccagggcacaaaggtggaaatcaagcggctcgaggacctgaagaacgtgttcccacctgaggtggccgtgttcgagcctagcgaggccgagatcagccacacccagaaagccaccctcgtgtgcctggctaccggcttctaccccgaccatgtggaactgtcttggtgggtcaacggcaaagaggtgcacagcggcgtgtgtaccgacccccagccactgaaagaacagcccgccctgaacgacagccggtactgcctgagcagcagactgagagtgtccgccaccttctggcagaacccccggaaccacttcagatgccaggtgcagttctacggcctgagcgagaacgacgagtggacccaggacagagccaagcccgtgacccagatcgtgtctgccgaagcctggggcagagccgattgcgacgtgaagctggtggaaaagagcttcgagacagacaccaacctgaacttccagaacctgagcgtgatcggcttcagaatcctgctgctgaaagtggccggctttaacctgctgatgaccctgcggctgtggtccagcagggccaagcgatctggatctggagcaacaaacttctcactactcaaacaagcaggtgacgtggaggagaatcccgggcctactagtatggactggatttggcgcatccttttccttgtcggcgctgctaccggcgcgcattccgggccccagctccagctgcaagagtctggacctggcctggtcaagcctagcgagacactgagcctgacctgtaccgtgtccggcgatagcatcagcagcggcgattactactggggctggatcagacagcctcctggcaaaggactggaatggatcggccacatctactacagcggcgtgacctactacaaccccagcctgaagtccagagtgaccatcagcgtggacaccagccggaaccagttctccctgaagctgtctagcgtgacagccgccgataccgccgtgtactactgcaccagagaggacagcagcaactggcggagtagaggccagggaacactggtcacagttagctctggatccggcggaggcggaagtggaggcggaggatctggcggcggaggctctttcgaacaggtgcagctggtgcagtctggggccgaagtgaagaaacctggggccagcgtgaaggtgtcctgcaaggccagcggatacacctttaccaactacggcatgaactgggtgcgccaggcccctggacagggcctggaatggatgggctggatcaacacctacaccggcgagcccacatacgccgacgccttcaagggcagattcgccttcagcctggacaccagcacctccaccgcctacctccagatcaacagcctgcggagcgacgacaccgccgtgtattattgcgccagagattacggcgactacgggatggactattggggccagggaaccaccgtgaccgtgtcctctacgcgtatccagaaccctgatcctgccgtgtaccagctgcgggatagcaagagcagcgacaagagcgtgtgtctgttcaccgacttcgacagccagaccaacgtgtcccagagcaaggactccgacgtgtacatcaccgataagtgcgtgctggacatgcggagcatggacttcaagagcaactccgccgtggcctggtccaacaagtccgatttcgcctgcgccaacgccttcaacaacagcattatccccgaggacacattcttcccaagccccgagagcagctgcggctttaccagcgagagctaccagcagggcgtgctgagcgccaccatcctgtacgagatcctgctgggcaaggccaccctgtacgccgtgctggtgtctgccctggtgctgatggctatggtcaagcggaaggacagccgggga

SEQ ID NO: 4617 - DNA, 2673 bp, synthetic construct
  source 1..2673: mol_type = other DNA
atggccttaccagtgaccgccttgctcctgccgctggccttgctgctccacgccgccaggccggaagtgcagctggttgaatctggcggaggactggttcagcctggcggatctctgagactgtcttgtgccgccagcggcttcagcttcagcgacttttggatgagctgggtccgacaggcccctggcaaaggacttgaatgggtcgccacaatcagccaggccggcagcgagaaggactacgtggactctgtgaagggcagattcaccatcagccgggacaacgccaagaagtccctgtacctccagatgaacagcctgagagccgaggacaccgccgtgtactattgtgcctctggcgtgtacagcttcgactacagaggccagggcaccctggtcacagtctcttctggtaccggcggaggcggatctggcggcggaggtagcggtggcggaggatctgaattcgacatcgtgatgacccagacccccctgaccctgagcgtgacaatcggacagcctgccagcatctcctgcaagagcagccagagcctgctggacagcgacggcaagacctacctgaactggctgctgcagaggccaggccagagccccgagagactgatctacctggtgtccaagctggactccggcgtgcccgatagattcacaggcagcggctccggcaccgacttcaccctgaagatcagccgggtggaagccgaggacctgggcgtgtactgttgttggcagggcacccacttcccttacaccttcggcggagggaccaaggtggaaatcaagggcctcgaggacctgaagaacgtgttcccacctgaggtggccgtgttcgagcctagcgaggccgagatcagccacacccagaaagccaccctcgtgtgcctggctaccggcttctaccccgaccatgtggaactgtcttggtgggtcaacggcaaagaggtgcacagcggcgtgtgtaccgacccccagccactgaaagaacagcccgccctgaacgacagccggtactgcctgagcagcagactgagagtgtccgccaccttctggcagaacccccggaaccacttcagatgccaggtgcagttctacggcctgagcgagaacgacgagtggacccaggacagagccaagcccgtgacccagatcgtgtctgccgaagcctggggcagagccgattgcgacgtgaagctggtggaaaagagcttcgagacagacaccaacctgaacttccagaacctgagcgtgatcggcttcagaatcctgctgctgaaagtggccggctttaacctgctgatgaccctgcggctgtggtccagcagggccaagcgatctggatctggagcaacaaacttctcactactcaaacaagcaggtgacgtggaggagaatcccgggcctactagtatggactggatttggcgcatccttttccttgtcggcgctgctaccggcgcgcattccgggccccagctccagctgcaagagtctggacctggcctggtcaagcctagcgagacactgagcctgacctgtaccgtgtccggcgatagcatcagcagcggcgattactactggggctggatcagacagcctcctggcaaaggactggaatggatcggccacatctactacagcggcgtgacctactacaaccccagcctgaagtccagagtgaccatcagcgtggacaccagccggaaccagttctccctgaagctgtctagcgtgacagccgccgataccgccgtgtactactgcaccagagaggacagcagcaactggcggagtagaggccagggaacactggtcacagttagctctggatccggcggaggcggaagtggaggcggaggatctggcggcggaggctctttcgaacaggtgcaactgcagcagcctggcgctgaacttgtgcggccaggcgcctctgtgaagctgagctgtaaagccagcggctacaccttcaccagctactggatgaactgggtcaagcagcgcccaggccagggcctggaatggatcggaatgatcgaccccagcgacagcgagacacactacaaccacatcttcaaggacaaggccaccctgaccgtggacaagtccagcagcacagcctacctgcaactgtccagcctgaccagcgaggacagcgccgtgtactactgcgcccggaacctgtatctgtggggccagggaacaagcgtgaccgtgtctagcacgcgtatccagaaccctgatcctgccgtgtaccagctgcgggatagcaagagcagcgacaagagcgtgtgtctgttcaccgacttcgacagccagaccaacgtgtcccagagcaaggactccgacgtgtacatcaccgataagtgcgtgctggacatgcggagcatggacttcaagagcaactccgccgtggcctggtccaacaagtccgatttcgcctgcgccaacgccttcaacaacagcattatccccgaggacacattcttcccaagccccgagagcagctgcggctttaccagcgagagctaccagcagggcgtgctgagcgccaccatcctgtacgagatcctgctgggcaaggccaccctgtacgccgtgctggtgtctgccctggtgctgatggctatggtcaagcggaaggacagccgggga

SEQ ID NO: 4618 - DNA, 2697 bp, synthetic construct
  source 1..2697: mol_type = other DNA
atggccttaccagtgaccgccttgctcctgccgctggccttgctgctccacgccgccaggccggaagtgcagctggttgaatctggcggaggactggttcagcctggcggatctctgagactgtcttgtgccgccagcggcttcagcttcagcgacttttggatgagctgggtccgacaggcccctggcaaaggacttgaatgggtcgccacaatcagccaggccggcagcgagaaggactacgtggactctgtgaagggcagattcaccatcagccgggacaacgccaagaagtccctgtacctccagatgaacagcctgagagccgaggacaccgccgtgtactattgtgcctctggcgtgtacagcttcgactacagaggccagggcaccctggtcacagtctcttctggtaccggcggaggcggatctggcggcggaggtagcggtggcggaggatctgaattcgacatcgtgatgacccagagccccgatagcctggccgtgtctctgggagagagagccaccatcaactgcgagagcagccagagcctgctgaacagcggcaaccagaagaactacctgacctggtatcagcagaagcccggccagccccccaagcccctgatctattgggccagcaccagagaaagcggcgtgcccgatagattcagcggcagcggaagcggcaccgacttcaccctgaccatcagttctcttcaggccgaggacgtggccgtgtactactgccagaacgactacagctacccctacaccttcggccagggcaccaagctggaaatcaagagactcgaggacctgaagaacgtgttcccacctgaggtggccgtgttcgagcctagcgaggccgagatcagccacacccagaaagccaccctcgtgtgcctggctaccggcttctaccccgaccatgtggaactgtcttggtgggtcaacggcaaagaggtgcacagcggcgtgtgtaccgacccccagccactgaaagaacagcccgccctgaacgacagccggtactgcctgagcagcagactgagagtgtccgccaccttctggcagaacccccggaaccacttcagatgccaggtgcagttctacggcctgagcgagaacgacgagtggacccaggacagagccaagcccgtgacccagatcgtgtctgccgaagcctggggcagagccgattgcgacgtgaagctggtggaaaagagcttcgagacagacaccaacctgaacttccagaacctgagcgtgatcggcttcagaatcctgctgctgaaagtggccggctttaacctgctgatgaccctgcggctgtggtccagcagggccaagcgatctggatctggagcaacaaacttctcactactcaaacaagcaggtgacgtggaggagaatcccgggcctactagtatggactggatttggcgcatccttttccttgtcggcgctgctaccggcgcgcattccgggccccagctccagctgcaagagtctggacctggcctggtcaagcctagcgagacactgagcctgacctgtaccgtgtccggcgatagcatcagcagcggcgattactactggggctggatcagacagcctcctggcaaaggactggaatggatcggccacatctactacagcggcgtgacctactacaaccccagcctgaagtccagagtgaccatcagcgtggacaccagccggaaccagttctccctgaagctgtctagcgtgacagccgccgataccgccgtgtactactgcaccagagaggacagcagcaactggcggagtagaggccagggaacactggtcacagttagctctggatccggcggaggcggaagtggaggcggaggatctggcggcggaggctctttcgaagaagtgcagctggtgcagtctggggccgaagtgaagaagcctggcgagagcctgaagatcagctgcaagggcagcggctacagcttcaccgactactacatgaagtgggccagacagatgcccggcaagggcctggaatggatgggcgacatcatccccagcaacggggccaccttctacaaccagaaattcaagggccaagtgaccatctccgccgacaagagcatcagcaccacctacctccagtggtccagcctgaaggccagcgacaccgccatgtactattgcgccagaagccatctgctgcgggccagttggttcgcctattggggccagggaacaatggtcacagtgtccagcacgcgtatccagaaccctgatcctgccgtgtaccagctgcgggatagcaagagcagcgacaagagcgtgtgtctgttcaccgacttcgacagccagaccaacgtgtcccagagcaaggactccgacgtgtacatcaccgataagtgcgtgctggacatgcggagcatggacttcaagagcaactccgccgtggcctggtccaacaagtccgatttcgcctgcgccaacgccttcaacaacagcattatccccgaggacacattcttcccaagccccgagagcagctgcggctttaccagcgagagctaccagcagggcgtgctgagcgccaccatcctgtacgagatcctgctgggcaaggccaccctgtacgccgtgctggtgtctgccctggtgctgatggctatggtcaagcggaaggacagccgggga

SEQ ID NO: 4619 - DNA, 2682 bp, synthetic construct
  source 1..2682: mol_type = other DNA
atggccttaccagtgaccgccttgctcctgccgctggccttgctgctccacgccgccaggccggaagtgcagctggttgaatctggcggaggactggttcagcctggcggatctctgagactgtcttgtgccgccagcggcttcagcttcagcgacttttggatgagctgggtccgacaggcccctggcaaaggacttgaatgggtcgccacaatcagccaggccggcagcgagaaggactacgtggactctgtgaagggcagattcaccatcagccgggacaacgccaagaagtccctgtacctccagatgaacagcctgagagccgaggacaccgccgtgtactattgtgcctctggcgtgtacagcttcgactacagaggccagggcaccctggtcacagtctcttctggtaccggcggaggcggatctggcggcggaggtagcggtggcggaggatctgaattcgacatccagatgacccagtctaccagttccctgagtgcatccctcggagacagggtgacgatcagttgcagcgcaagccaagggatcaataactatctgaactggtatcagcagaaaccggacggaacagtcgaactcctgatttattacaccagcacccttcagagtggcgtcccttcccggttcagtggctccggaagcgggaccgattactccctgaccatttctaatctggagccagaggacataggaacgtattattgccagcagtatagtaaactgccacgaacttttggaggggggacgaaactggagatcaaactcgaggacctgaagaacgtgttcccacctgaggtggccgtgttcgagcctagcgaggccgagatcagccacacccagaaagccaccctcgtgtgcctggctaccggcttctaccccgaccatgtggaactgtcttggtgggtcaacggcaaagaggtgcacagcggcgtgtgtaccgacccccagccactgaaagaacagcccgccctgaacgacagccggtactgcctgagcagcagactgagagtgtccgccaccttctggcagaacccccggaaccacttcagatgccaggtgcagttctacggcctgagcgagaacgacgagtggacccaggacagagccaagcccgtgacccagatcgtgtctgccgaagcctggggcagagccgattgcgacgtgaagctggtggaaaagagcttcgagacagacaccaacctgaacttccagaacctgagcgtgatcggcttcagaatcctgctgctgaaagtggccggctttaacctgctgatgaccctgcggctgtggtccagcagggccaagcgatctggatctggagcaacaaacttctcactactcaaacaagcaggtgacgtggaggagaatcccgggcctactagtatggactggatttggcgcatccttttccttgtcggcgctgctaccggcgcgcattccgggccccagctccagctgcaagagtctggacctggcctggtcaagcctagcgagacactgagcctgacctgtaccgtgtccggcgatagcatcagcagcggcgattactactggggctggatcagacagcctcctggcaaaggactggaatggatcggccacatctactacagcggcgtgacctactacaaccccagcctgaagtccagagtgaccatcagcgtggacaccagccggaaccagttctccctgaagctgtctagcgtgacagccgccgataccgccgtgtactactgcaccagagaggacagcagcaactggcggagtagaggccagggaacactggtcacagttagctctggatccggcggaggcggaagtggaggcggaggatctggcggcggaggctctttcgaacaggtgcaactccagcagtccggaagcgagcttatgatgccaggggcatcagtgaagatcagctgcaaggctactggctacaccttctctaattactggatagagtgggttaaacaaaggccagggcacggcctggaatggatcggcgagatcctgcctgggacaggccgaaccatttataacgagaagttcaaaggcaaggctactttcaccgcagatataagctctaatacagtgcaaatgcagctctcttccctgacaagtgaggatagtgccgtgtattattgcgcacgaagagattactatggaaatttttattacgctatggattattggggtcaaggaacaagtgtgaccgttagcagcacgcgtatccagaaccctgatcctgccgtgtaccagctgcgggatagcaagagcagcgacaagagcgtgtgtctgttcaccgacttcgacagccagaccaacgtgtcccagagcaaggactccgacgtgtacatcaccgataagtgcgtgctggacatgcggagcatggacttcaagagcaactccgccgtggcctggtccaacaagtccgatttcgcctgcgccaacgccttcaacaacagcattatccccgaggacacattcttcccaagccccgagagcagctgcggctttaccagcgagagctaccagcagggcgtgctgagcgccaccatcctgtacgagatcctgctgggcaaggccaccctgtacgccgtgctggtgtctgccctggtgctgatggctatggtcaagcggaaggacagccgggga

SEQ ID NO: 4620 - DNA, 2667 bp, synthetic construct
  source 1..2667: mol_type = other DNA
atggccttaccagtgaccgccttgctcctgccgctggccttgctgctccacgccgccaggccggaagtgcagctggttgaatctggcggaggactggttcagcctggcggatctctgagactgtcttgtgccgccagcggcttcagcttcagcgacttttggatgagctgggtccgacaggcccctggcaaaggacttgaatgggtcgccacaatcagccaggccggcagcgagaaggactacgtggactctgtgaagggcagattcaccatcagccgggacaacgccaagaagtccctgtacctccagatgaacagcctgagagccgaggacaccgccgtgtactattgtgcctctggcgtgtacagcttcgactacagaggccagggcaccctggtcacagtctcttctggtaccggcggaggcggatctggcggcggaggtagcggtggcggaggatctgaattcgacatccagatgacccagagccctgccagcctgtccgtgtctgtgggcgagacagtgaccatcacctgtcgggccagcgagaacatctacagcaacctggcctggtatcagcagaagcagggcaagagcccccaactgctggtgtacgccgccaccaatctggccgatggcgtgcccagcagattttccggctctggcagcggcacccagtacagcctgaagatcaacagcctccagagcgaggacttcggcagctactactgccagcacttctggggcacctggacctttggaggaggcaccaccctggaaatcaagctcgaggacctgaagaacgtgttcccacctgaggtggccgtgttcgagcctagcgaggccgagatcagccacacccagaaagccaccctcgtgtgcctggctaccggcttctaccccgaccatgtggaactgtcttggtgggtcaacggcaaagaggtgcacagcggcgtgtgtaccgacccccagccactgaaagaacagcccgccctgaacgacagccggtactgcctgagcagcagactgagagtgtccgccaccttctggcagaacccccggaaccacttcagatgccaggtgcagttctacggcctgagcgagaacgacgagtggacccaggacagagccaagcccgtgacccagatcgtgtctgccgaagcctggggcagagccgattgcgacgtgaagctggtggaaaagagcttcgagacagacaccaacctgaacttccagaacctgagcgtgatcggcttcagaatcctgctgctgaaagtggccggctttaacctgctgatgaccctgcggctgtggtccagcagggccaagcgatctggatctggagcaacaaacttctcactactcaaacaagcaggtgacgtggaggagaatcccgggcctactagtatggactggatttggcgcatccttttccttgtcggcgctgctaccggcgcgcattccgggccccagctccagctgcaagagtctggacctggcctggtcaagcctagcgagacactgagcctgacctgtaccgtgtccggcgatagcatcagcagcggcgattactactggggctggatcagacagcctcctggcaaaggactggaatggatcggccacatctactacagcggcgtgacctactacaaccccagcctgaagtccagagtgaccatcagcgtggacaccagccggaaccagttctccctgaagctgtctagcgtgacagccgccgataccgccgtgtactactgcaccagagaggacagcagcaactggcggagtagaggccagggaacactggtcacagttagctctggatccggcggaggcggaagtggaggcggaggatctggcggcggaggctctttcgaagaagtgcaactccagcagagcggccctgagcttgtgaagcctggcgcttccgtgaagatgagctgcaaggccagcggctacaccttcaccgactactacatgaagtggatgaagcagagccacggcaagtccctggaatggatcggcgacatcaaccccaacaacggcggcaccacctacaaccagaagttcaagggcaaggccaccctgaccgtggacaagagcagcagcaccgcctacatgcaactgaacagcctgaccagcgaggacagcgccgtgtactactgcgccagagactacggctacggctatttcgactactggggccagggcacaaccctgacagtgtcctctacgcgtatccagaaccctgatcctgccgtgtaccagctgcgggatagcaagagcagcgacaagagcgtgtgtctgttcaccgacttcgacagccagaccaacgtgtcccagagcaaggactccgacgtgtacatcaccgataagtgcgtgctggacatgcggagcatggacttcaagagcaactccgccgtggcctggtccaacaagtccgatttcgcctgcgccaacgccttcaacaacagcattatccccgaggacacattcttcccaagccccgagagcagctgcggctttaccagcgagagctaccagcagggcgtgctgagcgccaccatcctgtacgagatcctgctgggcaaggccaccctgtacgccgtgctggtgtctgccctggtgctgatggctatggtcaagcggaaggacagccgggga

SEQ ID NO: 4621 - DNA, 2676 bp, synthetic construct
  source 1..2676: mol_type = other DNA
atggccttaccagtgaccgccttgctcctgccgctggccttgctgctccacgccgccaggccggaagtgcagctggttgaatctggcggaggactggttcagcctggcggatctctgagactgtcttgtgccgccagcggcttcagcttcagcgacttttggatgagctgggtccgacaggcccctggcaaaggacttgaatgggtcgccacaatcagccaggccggcagcgagaaggactacgtggactctgtgaagggcagattcaccatcagccgggacaacgccaagaagtccctgtacctccagatgaacagcctgagagccgaggacaccgccgtgtactattgtgcctctggcgtgtacagcttcgactacagaggccagggcaccctggtcacagtctcttctggtaccggcggaggcggatctggcggcggaggtagcggtggcggaggatctgaattcgagatcgtgctgacacagagccctggcaccctgagcctgtctccaggcgaaagagccacactgagctgtcgggcctctcagagcgtgggaggctacctggcttggtatcagcagaagccaggccaggcccccagactgctgatctacgacgccagcaatcgggccacaggcatccccgccagattttctggcagcggctccggcaccgacttcaccctgacaatcagcagcctggaacccgaggacttcgccgtgtactactgccagcagcggaacaactggccccccatgtacacattcggccagggcaccaagctggaaatcaagagactcgaggacctgaagaacgtgttcccacctgaggtggccgtgttcgagcctagcgaggccgagatcagccacacccagaaagccaccctcgtgtgcctggctaccggcttctaccccgaccatgtggaactgtcttggtgggtcaacggcaaagaggtgcacagcggcgtgtgtaccgacccccagccactgaaagaacagcccgccctgaacgacagccggtactgcctgagcagcagactgagagtgtccgccaccttctggcagaacccccggaaccacttcagatgccaggtgcagttctacggcctgagcgagaacgacgagtggacccaggacagagccaagcccgtgacccagatcgtgtctgccgaagcctggggcagagccgattgcgacgtgaagctggtggaaaagagcttcgagacagacaccaacctgaacttccagaacctgagcgtgatcggcttcagaatcctgctgctgaaagtggccggctttaacctgctgatgaccctgcggctgtggtccagcagggccaagcgatctggatctggagcaacaaacttctcactactcaaacaagcaggtgacgtggaggagaatcccgggcctactagtatggactggatttggcgcatccttttccttgtcggcgctgctaccggcgcgcattccgggccccagctccagctgcaagagtctggacctggcctggtcaagcctagcgagacactgagcctgacctgtaccgtgtccggcgatagcatcagcagcggcgattactactggggctggatcagacagcctcctggcaaaggactggaatggatcggccacatctactacagcggcgtgacctactacaaccccagcctgaagtccagagtgaccatcagcgtggacaccagccggaaccagttctccctgaagctgtctagcgtgacagccgccgataccgccgtgtactactgcaccagagaggacagcagcaactggcggagtagaggccagggaacactggtcacagttagctctggatccggcggaggcggaagtggaggcggaggatctggcggcggaggctctttcgaacaggtgcaactggtgcagagcggagccgaagtgaagaaacccggcagcagcgtgaaggtgtcctgcaaggcttccggcggcaccttcagcagctacgccatttcttgggtgcgccaggctcctggacagggcctggaatggatgggcggcatcatccctatcctgggcaccgccaactacgcccagaaattccagggcagagtgaccatcaccgccgacgagagcaccagcaccgcctacatggaactgagcagcctgcggagcgaggacacagccgtgtattattgcgccagatggggcggaggggccttcgacatttggggccagggaacaatggtcaccgtgtccagcacgcgtatccagaaccctgatcctgccgtgtaccagctgcgggatagcaagagcagcgacaagagcgtgtgtctgttcaccgacttcgacagccagaccaacgtgtcccagagcaaggactccgacgtgtacatcaccgataagtgcgtgctggacatgcggagcatggacttcaagagcaactccgccgtggcctggtccaacaagtccgatttcgcctgcgccaacgccttcaacaacagcattatccccgaggacacattcttcccaagccccgagagcagctgcggctttaccagcgagagctaccagcagggcgtgctgagcgccaccatcctgtacgagatcctgctgggcaaggccaccctgtacgccgtgctggtgtctgccctggtgctgatggctatggtcaagcggaaggacagccgggga

SEQ ID NO: 4622 - DNA, 2661 bp, synthetic construct
  source 1..2661: mol_type = other DNA
atggccttaccagtgaccgccttgctcctgccgctggccttgctgctccacgccgccaggccggaagtgcagctggttgaatctggcggaggactggttcagcctggcggatctctgagactgtcttgtgccgccagcggcttcagcttcagcgacttttggatgagctgggtccgacaggcccctggcaaaggacttgaatgggtcgccacaatcagccaggccggcagcgagaaggactacgtggactctgtgaagggcagattcaccatcagccgggacaacgccaagaagtccctgtacctccagatgaacagcctgagagccgaggacaccgccgtgtactattgtgcctctggcgtgtacagcttcgactacagaggccagggcaccctggtcacagtctcttctggtaccggcggaggcggatctggcggcggaggtagcggtggcggaggatctgaattccagatcgtgctgacacagagccctgccctgatgagcgccagccctggcgagaaagtgaccatgacctgtagcgccagcagcagcgtgcgctacatgtactggtatcagcagaagcccagaagcagccccaagccctggattcacctgaccagcaatctggcctctggcgtgcccgctagattttccggctctggcagcggcaccagctacagcctgaccatcagcagcatggaagccgaggacgccgccacctactactgccagcagtggtccagccaccccttcacatttggctccggcaccaagctggaaatcaagctcgaggacctgaagaacgtgttcccacctgaggtggccgtgttcgagcctagcgaggccgagatcagccacacccagaaagccaccctcgtgtgcctggctaccggcttctaccccgaccatgtggaactgtcttggtgggtcaacggcaaagaggtgcacagcggcgtgtgtaccgacccccagccactgaaagaacagcccgccctgaacgacagccggtactgcctgagcagcagactgagagtgtccgccaccttctggcagaacccccggaaccacttcagatgccaggtgcagttctacggcctgagcgagaacgacgagtggacccaggacagagccaagcccgtgacccagatcgtgtctgccgaagcctggggcagagccgattgcgacgtgaagctggtggaaaagagcttcgagacagacaccaacctgaacttccagaacctgagcgtgatcggcttcagaatcctgctgctgaaagtggccggctttaacctgctgatgaccctgcggctgtggtccagcagggccaagcgatctggatctggagcaacaaacttctcactactcaaacaagcaggtgacgtggaggagaatcccgggcctactagtatggactggatttggcgcatccttttccttgtcggcgctgctaccggcgcgcattccgggccccagctccagctgcaagagtctggacctggcctggtcaagcctagcgagacactgagcctgacctgtaccgtgtccggcgatagcatcagcagcggcgattactactggggctggatcagacagcctcctggcaaaggactggaatggatcggccacatctactacagcggcgtgacctactacaaccccagcctgaagtccagagtgaccatcagcgtggacaccagccggaaccagttctccctgaagctgtctagcgtgacagccgccgataccgccgtgtactactgcaccagagaggacagcagcaactggcggagtagaggccagggaacactggtcacagttagctctggatccggcggaggcggaagtggaggcggaggatctggcggcggaggctctttcgaagatgtgcaactccaggaaagcggccctggccttgtgaagcctagccagagcctgtccctgacctgtaccgtgaccggcttcagcatcaccagcgactactcttggaactggatcagacagttccctggcaacaaactggaatggatgggctacatcagctactccggccacacctcctacaaccccagcctggaaagccggatctccatcaccagagacaccagcaagaaccagttcttcttgcaactgaacagcgtgaccaccgaggataccgccacatattactgtaccagaggcaactgggacgtggtgtactggggccagggcacacttgtgaccgtgtctgctacgcgtatccagaaccctgatcctgccgtgtaccagctgcgggatagcaagagcagcgacaagagcgtgtgtctgttcaccgacttcgacagccagaccaacgtgtcccagagcaaggactccgacgtgtacatcaccgataagtgcgtgctggacatgcggagcatggacttcaagagcaactccgccgtggcctggtccaacaagtccgatttcgcctgcgccaacgccttcaacaacagcattatccccgaggacacattcttcccaagccccgagagcagctgcggctttaccagcgagagctaccagcagggcgtgctgagcgccaccatcctgtacgagatcctgctgggcaaggccaccctgtacgccgtgctggtgtctgccctggtgctgatggctatggtcaagcggaaggacagccgggga

SEQ ID NO: 4623 - DNA, 2691 bp, synthetic construct
  source 1..2691: mol_type = other DNA
atggccttaccagtgaccgccttgctcctgccgctggccttgctgctccacgccgccaggccggaagtgcagctggttgaatctggcggaggactggttcagcctggcggatctctgagactgtcttgtgccgccagcggcttcagcttcagcgacttttggatgagctgggtccgacaggcccctggcaaaggacttgaatgggtcgccacaatcagccaggccggcagcgagaaggactacgtggactctgtgaagggcagattcaccatcagccgggacaacgccaagaagtccctgtacctccagatgaacagcctgagagccgaggacaccgccgtgtactattgtgcctctggcgtgtacagcttcgactacagaggccagggcaccctggtcacagtctcttctggtaccggcggaggcggatctggcggcggaggtagcggtggcggaggatctgaattcgacgtcgtgatgacccagagccctctgagcctgcctgtgacactgggacagcctgccagcatctcctgtcggagcagccagagcatcgtgcacagcgacggcaacacctacctggaatggtatcagcagcggccaggccagagccccagacggctgatctacaaggtgtccaacagattcagcggcgtgcccgacagattctccggcagcggctctggcaccgacttcaccctgaagatcagcagagtggaagccgaggacgtgggcgtgtactactgttttcaaggcagccacgccccctggacctttggcggaggaacaaaggtggaaatcaagctcgaggacctgaagaacgtgttcccacctgaggtggccgtgttcgagcctagcgaggccgagatcagccacacccagaaagccaccctcgtgtgcctggctaccggcttctaccccgaccatgtggaactgtcttggtgggtcaacggcaaagaggtgcacagcggcgtgtgtaccgacccccagccactgaaagaacagcccgccctgaacgacagccggtactgcctgagcagcagactgagagtgtccgccaccttctggcagaacccccggaaccacttcagatgccaggtgcagttctacggcctgagcgagaacgacgagtggacccaggacagagccaagcccgtgacccagatcgtgtctgccgaagcctggggcagagccgattgcgacgtgaagctggtggaaaagagcttcgagacagacaccaacctgaacttccagaacctgagcgtgatcggcttcagaatcctgctgctgaaagtggccggctttaacctgctgatgaccctgcggctgtggtccagcagggccaagcgatctggatctggagcaacaaacttctcactactcaaacaagcaggtgacgtggaggagaatcccgggcctactagtatggactggatttggcgcatccttttccttgtcggcgctgctaccggcgcgcattccgggccccagctccagctgcaagagtctggacctggcctggtcaagcctagcgagacactgagcctgacctgtaccgtgtccggcgatagcatcagcagcggcgattactactggggctggatcagacagcctcctggcaaaggactggaatggatcggccacatctactacagcggcgtgacctactacaaccccagcctgaagtccagagtgaccatcagcgtggacaccagccggaaccagttctccctgaagctgtctagcgtgacagccgccgataccgccgtgtactactgcaccagagaggacagcagcaactggcggagtagaggccagggaacactggtcacagttagctctggatccggcggaggcggaagtggaggcggaggatctggcggcggaggctctttcgaagaagtgcaactggtggaatcaggcggcggactggtgcagcctggcggatctctgagactgagctgtgccgccagcggcttcaccttcagcagctacggaatgcactgggtgcgccaggcccctggcaaaggactggaatgggtggcctacatcaccaccagaagcagcaccatctactacgccgacagcgtgaagggccggttcaccatctccagagacaacgccaagaacagcctgtacctccagatgaactccctgcgggccgaggacaccgccgtgtactattgcaccagagagcccctgaccggctactacgctatggactattggggccagggcaccagcgtgaccgtgtctagtacgcgtatccagaaccctgatcctgccgtgtaccagctgcgggatagcaagagcagcgacaagagcgtgtgtctgttcaccgacttcgacagccagaccaacgtgtcccagagcaaggactccgacgtgtacatcaccgataagtgcgtgctggacatgcggagcatggacttcaagagcaactccgccgtggcctggtccaacaagtccgatttcgcctgcgccaacgccttcaacaacagcattatccccgaggacacattcttcccaagccccgagagcagctgcggctttaccagcgagagctaccagcagggcgtgctgagcgccaccatcctgtacgagatcctgctgggcaaggccaccctgtacgccgtgctggtgtctgccctggtgctgatggctatggtcaagcggaaggacagccgggga

SEQ ID NO: 4624 - DNA, 2667 bp, synthetic construct
  source 1..2667: mol_type = other DNA
atggccttaccagtgaccgccttgctcctgccgctggccttgctgctccacgccgccaggccggaagtgcagctggttgaatctggcggaggactggttcagcctggcggatctctgagactgtcttgtgccgccagcggcttcagcttcagcgacttttggatgagctgggtccgacaggcccctggcaaaggacttgaatgggtcgccacaatcagccaggccggcagcgagaaggactacgtggactctgtgaagggcagattcaccatcagccgggacaacgccaagaagtccctgtacctccagatgaacagcctgagagccgaggacaccgccgtgtactattgtgcctctggcgtgtacagcttcgactacagaggccagggcaccctggtcacagtctcttctggtaccggcggaggcggatctggcggcggaggtagcggtggcggaggatctgaattcgacatccagatgacccagagccccagcagcctgtctgccagcgtgggcgacagagtgaccatcacctgtagagccagccagagcatcagcctgtggctgaactggtatcagcagaagcccggcaaggcccccaagctgctgatctacgccgccagcacactccagagcggcgtgccaagcagattttccggcagcggctccggcaccgacttcaccctgacaatcagctccctccagcccgaggacttcgccacctactactgccagcagtactacaccagcccctacaccttcggccagggcaccaaggtggaaatcaagagactcgaggacctgaagaacgtgttcccacctgaggtggccgtgttcgagcctagcgaggccgagatcagccacacccagaaagccaccctcgtgtgcctggctaccggcttctaccccgaccatgtggaactgtcttggtgggtcaacggcaaagaggtgcacagcggcgtgtgtaccgacccccagccactgaaagaacagcccgccctgaacgacagccggtactgcctgagcagcagactgagagtgtccgccaccttctggcagaacccccggaaccacttcagatgccaggtgcagttctacggcctgagcgagaacgacgagtggacccaggacagagccaagcccgtgacccagatcgtgtctgccgaagcctggggcagagccgattgcgacgtgaagctggtggaaaagagcttcgagacagacaccaacctgaacttccagaacctgagcgtgatcggcttcagaatcctgctgctgaaagtggccggctttaacctgctgatgaccctgcggctgtggtccagcagggccaagcgatctggatctggagcaacaaacttctcactactcaaacaagcaggtgacgtggaggagaatcccgggcctactagtatggactggatttggcgcatccttttccttgtcggcgctgctaccggcgcgcattccgggccccagctccagctgcaagagtctggacctggcctggtcaagcctagcgagacactgagcctgacctgtaccgtgtccggcgatagcatcagcagcggcgattactactggggctggatcagacagcctcctggcaaaggactggaatggatcggccacatctactacagcggcgtgacctactacaaccccagcctgaagtccagagtgaccatcagcgtggacaccagccggaaccagttctccctgaagctgtctagcgtgacagccgccgataccgccgtgtactactgcaccagagaggacagcagcaactggcggagtagaggccagggaacactggtcacagttagctctggatccggcggaggcggaagtggaggcggaggatctggcggcggaggctctttcgaacaggtgcaactgctggaatctggcggcggactggtgcagcctggcggatctctgagactgagctgtgccgccagcggcttcaccttcagcagctacgccatgagctgggtgcgccaggcccctggaaaaggactggaatgggtgtccgtgatccggtccagcggcagcagcacctattacgccgatagcgtgaagggccggttcaccatcagccgggacaacagcaagaacaccctgtacctccagatgaacagcctgcgggccgaggacaccgccgtgtactattgtgctaggggaggcggctacttcgactactggggccagggaacactcgtgaccgtgtcctctacgcgtatccagaaccctgatcctgccgtgtaccagctgcgggatagcaagagcagcgacaagagcgtgtgtctgttcaccgacttcgacagccagaccaacgtgtcccagagcaaggactccgacgtgtacatcaccgataagtgcgtgctggacatgcggagcatggacttcaagagcaactccgccgtggcctggtccaacaagtccgatttcgcctgcgccaacgccttcaacaacagcattatccccgaggacacattcttcccaagccccgagagcagctgcggctttaccagcgagagctaccagcagggcgtgctgagcgccaccatcctgtacgagatcctgctgggcaaggccaccctgtacgccgtgctggtgtctgccctggtgctgatggctatggtcaagcggaaggacagccgggga

SEQ ID NO: 4625 - DNA, 2676 bp, synthetic construct
  source 1..2676: mol_type = other DNA
atggccttaccagtgaccgccttgctcctgccgctggccttgctgctccacgccgccaggccggaagtgcagctggttgaatctggcggaggactggttcagcctggcggatctctgagactgtcttgtgccgccagcggcttcagcttcagcgacttttggatgagctgggtccgacaggcccctggcaaaggacttgaatgggtcgccacaatcagccaggccggcagcgagaaggactacgtggactctgtgaagggcagattcaccatcagccgggacaacgccaagaagtccctgtacctccagatgaacagcctgagagccgaggacaccgccgtgtactattgtgcctctggcgtgtacagcttcgactacagaggccagggcaccctggtcacagtctcttctggtaccggcggaggcggatctggcggcggaggtagcggtggcggaggatctgaattcgacatccagatgacccagagccccagcagcctgtctgccagcgtgggcgacagagtgaccatcacctgtagagccagccagagcatcagcagctacctgaactggtatcagcagaagcccggcaaggcccccaaactgctgatctacgccgtgtccacactccagagcggcgtgcccagcagattttctggcagcggctccggcaccgacttcaccctgacaatcagctccctccagcccgaggacttcgccacctactactgtcagcagagcggcaccttccctcccaccacatttggacagggcaccaaggtggaaatcaagagactcgaggacctgaagaacgtgttcccacctgaggtggccgtgttcgagcctagcgaggccgagatcagccacacccagaaagccaccctcgtgtgcctggctaccggcttctaccccgaccatgtggaactgtcttggtgggtcaacggcaaagaggtgcacagcggcgtgtgtaccgacccccagccactgaaagaacagcccgccctgaacgacagccggtactgcctgagcagcagactgagagtgtccgccaccttctggcagaacccccggaaccacttcagatgccaggtgcagttctacggcctgagcgagaacgacgagtggacccaggacagagccaagcccgtgacccagatcgtgtctgccgaagcctggggcagagccgattgcgacgtgaagctggtggaaaagagcttcgagacagacaccaacctgaacttccagaacctgagcgtgatcggcttcagaatcctgctgctgaaagtggccggctttaacctgctgatgaccctgcggctgtggtccagcagggccaagcgatctggatctggagcaacaaacttctcactactcaaacaagcaggtgacgtggaggagaatcccgggcctactagtatggactggatttggcgcatccttttccttgtcggcgctgctaccggcgcgcattccgggccccagctccagctgcaagagtctggacctggcctggtcaagcctagcgagacactgagcctgacctgtaccgtgtccggcgatagcatcagcagcggcgattactactggggctggatcagacagcctcctggcaaaggactggaatggatcggccacatctactacagcggcgtgacctactacaaccccagcctgaagtccagagtgaccatcagcgtggacaccagccggaaccagttctccctgaagctgtctagcgtgacagccgccgataccgccgtgtactactgcaccagagaggacagcagcaactggcggagtagaggccagggaacactggtcacagttagctctggatccggcggaggcggaagtggaggcggaggatctggcggcggaggctctttcgaacaggtgcaactgctggaatctggcggcggactggtgcagcctggcggatctctgagactgagctgtgccgccagcggcttcaccttcagcagccacggaatgcactgggtgcgccaggcccctggaaagggactggaatgggtgtccgtgatctccggcagcggcagcaataccggctacgccgatagcgtgaagggccggttcaccatcagccgggacaacagcaagaacaccctgtacctccagatgaacagcctgcgggccgaggacaccgccgtgtactattgtgccagacagtggggcagctacgccttcgattcttggggccagggcaccctcgtgaccgtgtcatctacgcgtatccagaaccctgatcctgccgtgtaccagctgcgggatagcaagagcagcgacaagagcgtgtgtctgttcaccgacttcgacagccagaccaacgtgtcccagagcaaggactccgacgtgtacatcaccgataagtgcgtgctggacatgcggagcatggacttcaagagcaactccgccgtggcctggtccaacaagtccgatttcgcctgcgccaacgccttcaacaacagcattatccccgaggacacattcttcccaagccccgagagcagctgcggctttaccagcgagagctaccagcagggcgtgctgagcgccaccatcctgtacgagatcctgctgggcaaggccaccctgtacgccgtgctggtgtctgccctggtgctgatggctatggtcaagcggaaggacagccgggga

SEQ ID NO: 4626 - DNA, 2706 bp, synthetic construct
  source 1..2706: mol_type = other DNA
atggccttaccagtgaccgccttgctcctgccgctggccttgctgctccacgccgccaggccggaagtgcagctggttgaatctggcggaggactggttcagcctggcggatctctgagactgtcttgtgccgccagcggcttcagcttcagcgacttttggatgagctgggtccgacaggcccctggcaaaggacttgaatgggtcgccacaatcagccaggccggcagcgagaaggactacgtggactctgtgaagggcagattcaccatcagccgggacaacgccaagaagtccctgtacctccagatgaacagcctgagagccgaggacaccgccgtgtactattgtgcctctggcgtgtacagcttcgactacagaggccagggcaccctggtcacagtctcttctggtaccggcggaggcggatctggcggcggaggtagcggtggcggaggatctgaattcgacatcgtgatgagccagagccctagcagcctggccgtgtccgtgggcgagaaagtgaccatgagctgcaagagcagccagtccctgctgcacagcagcaaccagaagaactacctggcctggtatcagcagaagcccggccagtcccccaaggtgctgatctactgggccagcaccagagaaagcggcgtgcccgatagattcaccggcagcggctctggcaccgacttcaccctgaccatcaccagcgtgaagtccgaggacctggctgtgtactactgccagcagtattacagctacccctggaccttcggcggaggcacccggctggaaatcaaaagactcgaggacctgaagaacgtgttcccacctgaggtggccgtgttcgagcctagcgaggccgagatcagccacacccagaaagccaccctcgtgtgcctggctaccggcttctaccccgaccatgtggaactgtcttggtgggtcaacggcaaagaggtgcacagcggcgtgtgtaccgacccccagccactgaaagaacagcccgccctgaacgacagccggtactgcctgagcagcagactgagagtgtccgccaccttctggcagaacccccggaaccacttcagatgccaggtgcagttctacggcctgagcgagaacgacgagtggacccaggacagagccaagcccgtgacccagatcgtgtctgccgaagcctggggcagagccgattgcgacgtgaagctggtggaaaagagcttcgagacagacaccaacctgaacttccagaacctgagcgtgatcggcttcagaatcctgctgctgaaagtggccggctttaacctgctgatgaccctgcggctgtggtccagcagggccaagcgatctggatctggagcaacaaacttctcactactcaaacaagcaggtgacgtggaggagaatcccgggcctactagtatggactggatttggcgcatccttttccttgtcggcgctgctaccggcgcgcattccgggccccagctccagctgcaagagtctggacctggcctggtcaagcctagcgagacactgagcctgacctgtaccgtgtccggcgatagcatcagcagcggcgattactactggggctggatcagacagcctcctggcaaaggactggaatggatcggccacatctactacagcggcgtgacctactacaaccccagcctgaagtccagagtgaccatcagcgtggacaccagccggaaccagttctccctgaagctgtctagcgtgacagccgccgataccgccgtgtactactgcaccagagaggacagcagcaactggcggagtagaggccagggaacactggtcacagttagctctggatccggcggaggcggaagtggaggcggaggatctggcggcggaggctctttcgaagaagtgcaactccagcagagcgtggccgagcttgtgaagcctggcgcttccgtgaagatgtcctgcaaggtgtccggctacaccctgacagaccacaccatccactggatgaagcagcggcctgagcagggcctggaatggatcggctacatctaccccagggacggcatcaccggctacaacgagaagttcaagggcaaggccacactgaccgccgacaccagcagcagcacagcctacatgcaactgaacagcctgaccagcgaggacagcgccgtgtacttctgtgccagatggggctacagctacagaaactacgcctactactacgactactggggccagggcacaaccctgaccgtgtctagtacgcgtatccagaaccctgatcctgccgtgtaccagctgcgggatagcaagagcagcgacaagagcgtgtgtctgttcaccgacttcgacagccagaccaacgtgtcccagagcaaggactccgacgtgtacatcaccgataagtgcgtgctggacatgcggagcatggacttcaagagcaactccgccgtggcctggtccaacaagtccgatttcgcctgcgccaacgccttcaacaacagcattatccccgaggacacattcttcccaagccccgagagcagctgcggctttaccagcgagagctaccagcagggcgtgctgagcgccaccatcctgtacgagatcctgctgggcaaggccaccctgtacgccgtgctggtgtctgccctggtgctgatggctatggtcaagcggaaggacagccgggga

SEQ ID NO: 4627 - DNA, 2697 bp, synthetic construct
  source 1..2697: mol_type = other DNA
atggccttaccagtgaccgccttgctcctgccgctggccttgctgctccacgccgccaggccggaagtgcagctggttgaatctggcggaggactggttcagcctggcggatctctgagactgtcttgtgccgccagcggcttcagcttcagcgacttttggatgagctgggtccgacaggcccctggcaaaggacttgaatgggtcgccacaatcagccaggccggcagcgagaaggactacgtggactctgtgaagggcagattcaccatcagccgggacaacgccaagaagtccctgtacctccagatgaacagcctgagagccgaggacaccgccgtgtactattgtgcctctggcgtgtacagcttcgactacagaggccagggcaccctggtcacagtctcttctggtaccggcggaggcggatctggcggcggaggtagcggtggcggaggatctgaattcgagatcgtgctgacacagagccctggcaccctgagcctgtctccaggcgaaagagccacactgagctgtcgggccagccagagcgtgtccagctcttacctggcctggtatcagcagaagcccggccaggctccccggctgctgatctacggaacaagcagcagagccaccggcatccccgacagattttctggcagcggctccggcaccgacttcaccctgacaatcagcagactggaacccgaggacttcgccgtgtactactgccagcagtacggcagcagccccttcacctttggcggaggcaccaaggtggaaatcaagagactcgaggacctgaagaacgtgttcccacctgaggtggccgtgttcgagcctagcgaggccgagatcagccacacccagaaagccaccctcgtgtgcctggctaccggcttctaccccgaccatgtggaactgtcttggtgggtcaacggcaaagaggtgcacagcggcgtgtgtaccgacccccagccactgaaagaacagcccgccctgaacgacagccggtactgcctgagcagcagactgagagtgtccgccaccttctggcagaacccccggaaccacttcagatgccaggtgcagttctacggcctgagcgagaacgacgagtggacccaggacagagccaagcccgtgacccagatcgtgtctgccgaagcctggggcagagccgattgcgacgtgaagctggtggaaaagagcttcgagacagacaccaacctgaacttccagaacctgagcgtgatcggcttcagaatcctgctgctgaaagtggccggctttaacctgctgatgaccctgcggctgtggtccagcagggccaagcgatctggatctggagcaacaaacttctcactactcaaacaagcaggtgacgtggaggagaatcccgggcctactagtatggactggatttggcgcatccttttccttgtcggcgctgctaccggcgcgcattccgggccccagctccagctgcaagagtctggacctggcctggtcaagcctagcgagacactgagcctgacctgtaccgtgtccggcgatagcatcagcagcggcgattactactggggctggatcagacagcctcctggcaaaggactggaatggatcggccacatctactacagcggcgtgacctactacaaccccagcctgaagtccagagtgaccatcagcgtggacaccagccggaaccagttctccctgaagctgtctagcgtgacagccgccgataccgccgtgtactactgcaccagagaggacagcagcaactggcggagtagaggccagggaacactggtcacagttagctctggatccggcggaggcggaagtggaggcggaggatctggcggcggaggctctttcgaacaggtgcaactccaggaatctggccccggactggctaagcccagcgagacactgagcctgacctgtaccgtgtccggcgacagcatcaccagctactactggtcctggatcagacagccccctggcaagggcctggaatggatcggctacatctactacagcggcagcaccaactacaaccccagcctgaagtccagagtgaccatcagcgtggacaccagcaagaaccagttctccctgaagctgagcagcgtgacagccgccgacaccgccgtgtattattgcgccagagatcagcggagaatcgccgctgccggcacccacttttacggcatggatgtgtggggccagggcaccaccgtgaccgtgtcatctacgcgtatccagaaccctgatcctgccgtgtaccagctgcgggatagcaagagcagcgacaagagcgtgtgtctgttcaccgacttcgacagccagaccaacgtgtcccagagcaaggactccgacgtgtacatcaccgataagtgcgtgctggacatgcggagcatggacttcaagagcaactccgccgtggcctggtccaacaagtccgatttcgcctgcgccaacgccttcaacaacagcattatccccgaggacacattcttcccaagccccgagagcagctgcggctttaccagcgagagctaccagcagggcgtgctgagcgccaccatcctgtacgagatcctgctgggcaaggccaccctgtacgccgtgctggtgtctgccctggtgctgatggctatggtcaagcggaaggacagccgggga

SEQ ID NO: 4628 - DNA, 2673 bp, synthetic construct
  source 1..2673: mol_type = other DNA
atggccttaccagtgaccgccttgctcctgccgctggccttgctgctccacgccgccaggccggaagtgcagctggttgaatctggcggaggactggttcagcctggcggatctctgagactgtcttgtgccgccagcggcttcagcttcagcgacttttggatgagctgggtccgacaggcccctggcaaaggacttgaatgggtcgccacaatcagccaggccggcagcgagaaggactacgtggactctgtgaagggcagattcaccatcagccgggacaacgccaagaagtccctgtacctccagatgaacagcctgagagccgaggacaccgccgtgtactattgtgcctctggcgtgtacagcttcgactacagaggccagggcaccctggtcacagtctcttctggtaccggcggaggcggatctggcggcggaggtagcggtggcggaggatctgaattcgacatcctgctgacccagagccccgtgatcctgtccgtgtctcctggcgagagagtgtccttcagctgtcgggccagccagagcatcggcaccaacatccactggtatcagcagcggaccaacggcagccccagactgctgattaagtacgccagcgagtccatcagcggcatccccagcagattttccggcagcggctccggcaccgacttcaccctgagcatcaacagcgtggaaagcgaggacattgccgactactactgccagcagaacaacaactggcccaccaccttcggagccggcaccaagctggaactgaagctcgaggacctgaagaacgtgttcccacctgaggtggccgtgttcgagcctagcgaggccgagatcagccacacccagaaagccaccctcgtgtgcctggctaccggcttctaccccgaccatgtggaactgtcttggtgggtcaacggcaaagaggtgcacagcggcgtgtgtaccgacccccagccactgaaagaacagcccgccctgaacgacagccggtactgcctgagcagcagactgagagtgtccgccaccttctggcagaacccccggaaccacttcagatgccaggtgcagttctacggcctgagcgagaacgacgagtggacccaggacagagccaagcccgtgacccagatcgtgtctgccgaagcctggggcagagccgattgcgacgtgaagctggtggaaaagagcttcgagacagacaccaacctgaacttccagaacctgagcgtgatcggcttcagaatcctgctgctgaaagtggccggctttaacctgctgatgaccctgcggctgtggtccagcagggccaagcgatctggatctggagcaacaaacttctcactactcaaacaagcaggtgacgtggaggagaatcccgggcctactagtatggactggatttggcgcatccttttccttgtcggcgctgctaccggcgcgcattccgggccccagctccagctgcaagagtctggacctggcctggtcaagcctagcgagacactgagcctgacctgtaccgtgtccggcgatagcatcagcagcggcgattactactggggctggatcagacagcctcctggcaaaggactggaatggatcggccacatctactacagcggcgtgacctactacaaccccagcctgaagtccagagtgaccatcagcgtggacaccagccggaaccagttctccctgaagctgtctagcgtgacagccgccgataccgccgtgtactactgcaccagagaggacagcagcaactggcggagtagaggccagggaacactggtcacagttagctctggatccggcggaggcggaagtggaggcggaggatctggcggcggaggctctttcgaacaggtgcagctgaagcagagcggacctggcctggtgcagcctagccagagcctgtccatcacctgtaccgtgtccggcttcagcctgaccaactacggcgtgcactgggtgcgccagagccctggaaaaggactggaatggctgggagtgatttggagcggcggcaacaccgactacaacacccccttcaccagcagactgtctatcaacaaggacaacagcaagagccaggtgttcttcaagatgaacagcctccagagcaacgacaccgccatctactactgtgctagagccctgacctactatgactacgagttcgcctactggggccagggcacactcgtgacagtgtctgctacgcgtatccagaaccctgatcctgccgtgtaccagctgcgggatagcaagagcagcgacaagagcgtgtgtctgttcaccgacttcgacagccagaccaacgtgtcccagagcaaggactccgacgtgtacatcaccgataagtgcgtgctggacatgcggagcatggacttcaagagcaactccgccgtggcctggtccaacaagtccgatttcgcctgcgccaacgccttcaacaacagcattatccccgaggacacattcttcccaagccccgagagcagctgcggctttaccagcgagagctaccagcagggcgtgctgagcgccaccatcctgtacgagatcctgctgggcaaggccaccctgtacgccgtgctggtgtctgccctggtgctgatggctatggtcaagcggaaggacagccgggga

SEQ ID NO: 4629 - DNA, 2652 bp, synthetic construct
  source 1..2652: mol_type = other DNA
atggccttaccagtgaccgccttgctcctgccgctggccttgctgctccacgccgccaggccggaagtgcagctggttgaatctggcggaggactggttcagcctggcggatctctgagactgtcttgtgccgccagcggcttcagcttcagcgacttttggatgagctgggtccgacaggcccctggcaaaggacttgaatgggtcgccacaatcagccaggccggcagcgagaaggactacgtggactctgtgaagggcagattcaccatcagccgggacaacgccaagaagtccctgtacctccagatgaacagcctgagagccgaggacaccgccgtgtactattgtgcctctggcgtgtacagcttcgactacagaggccagggcaccctggtcacagtctcttctggtaccggcggaggcggatctggcggcggaggtagcggtggcggaggatctgaattcatgacccagagccccaagttcctgctggtgtctgccggcgacagagtgaccctgacatgcaaggccagccagagcgtgaacaacgacgtgtactggtatcagcaggaacccggccagtcccccaagctgctgatctactgggccagcaccagagaaagcggcgtgcccgatagattcaccggcagcggctctggcaccgacttcaccctgacaatcagcagcgtgcaggccgaggacctggccgtgtactactgcaagcagagctacaacctgtacaccttcggcggaggcaccaagctggaaatcaagagactcgaggacctgaagaacgtgttcccacctgaggtggccgtgttcgagcctagcgaggccgagatcagccacacccagaaagccaccctcgtgtgcctggctaccggcttctaccccgaccatgtggaactgtcttggtgggtcaacggcaaagaggtgcacagcggcgtgtgtaccgacccccagccactgaaagaacagcccgccctgaacgacagccggtactgcctgagcagcagactgagagtgtccgccaccttctggcagaacccccggaaccacttcagatgccaggtgcagttctacggcctgagcgagaacgacgagtggacccaggacagagccaagcccgtgacccagatcgtgtctgccgaagcctggggcagagccgattgcgacgtgaagctggtggaaaagagcttcgagacagacaccaacctgaacttccagaacctgagcgtgatcggcttcagaatcctgctgctgaaagtggccggctttaacctgctgatgaccctgcggctgtggtccagcagggccaagcgatctggatctggagcaacaaacttctcactactcaaacaagcaggtgacgtggaggagaatcccgggcctactagtatggactggatttggcgcatccttttccttgtcggcgctgctaccggcgcgcattccgggccccagctccagctgcaagagtctggacctggcctggtcaagcctagcgagacactgagcctgacctgtaccgtgtccggcgatagcatcagcagcggcgattactactggggctggatcagacagcctcctggcaaaggactggaatggatcggccacatctactacagcggcgtgacctactacaaccccagcctgaagtccagagtgaccatcagcgtggacaccagccggaaccagttctccctgaagctgtctagcgtgacagccgccgataccgccgtgtactactgcaccagagaggacagcagcaactggcggagtagaggccagggaacactggtcacagttagctctggatccggcggaggcggaagtggaggcggaggatctggcggcggaggctctttcgaagaatctggaagaggactggtgcagcctggcggcagcagaaagctgtcttgtgccgccagcggcttcaccttcagcaccagcggaatgcactgggtgcgccaggcccctgagaagggactggaatgggtggcctacatcagctccggcagcaccaccatctaccacgccgataccgtgaagggccggttcaccatcagccgggacaaccccaagaataccctgttcctccagatgaccagcctgcggagcgaggacaccgccatgtactattgctgcgccagaagcggccagttcggcaactacttcgactactggggccagggcaccaccctgaccgtgtcatctacgcgtatccagaaccctgatcctgccgtgtaccagctgcgggatagcaagagcagcgacaagagcgtgtgtctgttcaccgacttcgacagccagaccaacgtgtcccagagcaaggactccgacgtgtacatcaccgataagtgcgtgctggacatgcggagcatggacttcaagagcaactccgccgtggcctggtccaacaagtccgatttcgcctgcgccaacgccttcaacaacagcattatccccgaggacacattcttcccaagccccgagagcagctgcggctttaccagcgagagctaccagcagggcgtgctgagcgccaccatcctgtacgagatcctgctgggcaaggccaccctgtacgccgtgctggtgtctgccctggtgctgatggctatggtcaagcggaaggacagccgggga

SEQ ID NO: 4630 - DNA, 2667 bp, synthetic construct
  source 1..2667: mol_type = other DNA
atggccttaccagtgaccgccttgctcctgccgctggccttgctgctccacgccgccaggccggaagtgcagctggttgaatctggcggaggactggttcagcctggcggatctctgagactgtcttgtgccgccagcggcttcagcttcagcgacttttggatgagctgggtccgacaggcccctggcaaaggacttgaatgggtcgccacaatcagccaggccggcagcgagaaggactacgtggactctgtgaagggcagattcaccatcagccgggacaacgccaagaagtccctgtacctccagatgaacagcctgagagccgaggacaccgccgtgtactattgtgcctctggcgtgtacagcttcgactacagaggccagggcaccctggtcacagtctcttctggtaccggcggaggcggatctggcggcggaggtagcggtggcggaggatctgaattccagagcccatctagcctggctgtgtctgccggcgagaaagtgaccatgagctgcaagagcagccagagcctgctgaacagccggacccggaagaactacctggcctggtatcagcagaagcccggccagagccccaagctgctgatctactgggccagcaccagagaaagcggcgtgcccgatagattcaccggctctggcagcggcaccgacttcaccctgacaatcagcagcgtgcaggccgaggacctggccgtgtactactgcaagcagagcaacctgtacaccttcggcggaggcaccaagctggaaatcaagctcgaggacctgaagaacgtgttcccacctgaggtggccgtgttcgagcctagcgaggccgagatcagccacacccagaaagccaccctcgtgtgcctggctaccggcttctaccccgaccatgtggaactgtcttggtgggtcaacggcaaagaggtgcacagcggcgtgtgtaccgacccccagccactgaaagaacagcccgccctgaacgacagccggtactgcctgagcagcagactgagagtgtccgccaccttctggcagaacccccggaaccacttcagatgccaggtgcagttctacggcctgagcgagaacgacgagtggacccaggacagagccaagcccgtgacccagatcgtgtctgccgaagcctggggcagagccgattgcgacgtgaagctggtggaaaagagcttcgagacagacaccaacctgaacttccagaacctgagcgtgatcggcttcagaatcctgctgctgaaagtggccggctttaacctgctgatgaccctgcggctgtggtccagcagggccaagcgatctggatctggagcaacaaacttctcactactcaaacaagcaggtgacgtggaggagaatcccgggcctactagtatggactggatttggcgcatccttttccttgtcggcgctgctaccggcgcgcattccgggccccagctccagctgcaagagtctggacctggcctggtcaagcctagcgagacactgagcctgacctgtaccgtgtccggcgatagcatcagcagcggcgattactactggggctggatcagacagcctcctggcaaaggactggaatggatcggccacatctactacagcggcgtgacctactacaaccccagcctgaagtccagagtgaccatcagcgtggacaccagccggaaccagttctccctgaagctgtctagcgtgacagccgccgataccgccgtgtactactgcaccagagaggacagcagcaactggcggagtagaggccagggaacactggtcacagttagctctggatccggcggaggcggaagtggaggcggaggatctggcggcggaggctctttcgaacaggtgcagctggaagagtctggacccgagcttgtgaagcctggggccagcgtgaagctgtcctgtaaagccagcggctacaccttcaccgagtacatcatccactgggtcaagcagcggagcggccagggcctggaatggatcggctggttttaccctggctccggcagcatcaagtacaacgagaagttcaaggacaaggccaccctgaccgccgacaagtccagcagcaccgtgtacatggaactgagcggcctgaccagcgaggacagcgccgtgtatttctgcgccagacacgacggctacagctacttcgactattggggccagggcaccacactgaccgtgtcctctacgcgtatccagaaccctgatcctgccgtgtaccagctgcgggatagcaagagcagcgacaagagcgtgtgtctgttcaccgacttcgacagccagaccaacgtgtcccagagcaaggactccgacgtgtacatcaccgataagtgcgtgctggacatgcggagcatggacttcaagagcaactccgccgtggcctggtccaacaagtccgatttcgcctgcgccaacgccttcaacaacagcattatccccgaggacacattcttcccaagccccgagagcagctgcggctttaccagcgagagctaccagcagggcgtgctgagcgccaccatcctgtacgagatcctgctgggcaaggccaccctgtacgccgtgctggtgtctgccctggtgctgatggctatggtcaagcggaaggacagccgggga

SEQ ID NO: 4631 - DNA, 2676 bp, synthetic construct
  source 1..2676: mol_type = other DNA
atggccttaccagtgaccgccttgctcctgccgctggccttgctgctccacgccgccaggccggaagtgcagctggttgaatctggcggaggactggttcagcctggcggatctctgagactgtcttgtgccgccagcggcttcagcttcagcgacttttggatgagctgggtccgacaggcccctggcaaaggacttgaatgggtcgccacaatcagccaggccggcagcgagaaggactacgtggactctgtgaagggcagattcaccatcagccgggacaacgccaagaagtccctgtacctccagatgaacagcctgagagccgaggacaccgccgtgtactattgtgcctctggcgtgtacagcttcgactacagaggccagggcaccctggtcacagtctcttctggtaccggcggaggcggatctggcggcggaggtagcggtggcggaggatctgaattcgacatccagatgacccagagccccagcagcctgtctgcctctctgggcgagagagtgtccctgacctgtcgggccacacaggaactgagcggctacctgtcttggctgcagcagaagcccgacggcaccatcaagcggctgatctacgccgccagcaccctggatagcggcgtgcccaagagattcagcggcaacagaagcggcagcgactacagcctgaccatcagctccctggaaagcgaggacttcgccgactactactgcctgcagtacgccatctacccctacaccttcggcggaggcaccaagctggaaatcaagctcgaggacctgaagaacgtgttcccacctgaggtggccgtgttcgagcctagcgaggccgagatcagccacacccagaaagccaccctcgtgtgcctggctaccggcttctaccccgaccatgtggaactgtcttggtgggtcaacggcaaagaggtgcacagcggcgtgtgtaccgacccccagccactgaaagaacagcccgccctgaacgacagccggtactgcctgagcagcagactgagagtgtccgccaccttctggcagaacccccggaaccacttcagatgccaggtgcagttctacggcctgagcgagaacgacgagtggacccaggacagagccaagcccgtgacccagatcgtgtctgccgaagcctggggcagagccgattgcgacgtgaagctggtggaaaagagcttcgagacagacaccaacctgaacttccagaacctgagcgtgatcggcttcagaatcctgctgctgaaagtggccggctttaacctgctgatgaccctgcggctgtggtccagcagggccaagcgatctggatctggagcaacaaacttctcactactcaaacaagcaggtgacgtggaggagaatcccgggcctactagtatggactggatttggcgcatccttttccttgtcggcgctgctaccggcgcgcattccgggccccagctccagctgcaagagtctggacctggcctggtcaagcctagcgagacactgagcctgacctgtaccgtgtccggcgatagcatcagcagcggcgattactactggggctggatcagacagcctcctggcaaaggactggaatggatcggccacatctactacagcggcgtgacctactacaaccccagcctgaagtccagagtgaccatcagcgtggacaccagccggaaccagttctccctgaagctgtctagcgtgacagccgccgataccgccgtgtactactgcaccagagaggacagcagcaactggcggagtagaggccagggaacactggtcacagttagctctggatccggcggaggcggaagtggaggcggaggatctggcggcggaggctctttcgaagaggtgcaactgcagcagtctggccccgagcttgtgaagcctggcgcctccgtgaagatgagctgcaaggccagcggctacacctttaccagctacttcatccactgggtcaagcagaaacccggccagggcctggaatggatcggcttcatcaacccttacaacgacggcagcaagtacaacgagaagttcaagggcaaggccaccctgaccagcgacaagagcagcagcaccgcctacatggaactgtccagcctgacatccgaggacagcgccgtgtactactgcaccagggacgacggctactacggctacgccatggactactggggccagggaacaagcgtcaccgtgtcctctacgcgtatccagaaccctgatcctgccgtgtaccagctgcgggatagcaagagcagcgacaagagcgtgtgtctgttcaccgacttcgacagccagaccaacgtgtcccagagcaaggactccgacgtgtacatcaccgataagtgcgtgctggacatgcggagcatggacttcaagagcaactccgccgtggcctggtccaacaagtccgatttcgcctgcgccaacgccttcaacaacagcattatccccgaggacacattcttcccaagccccgagagcagctgcggctttaccagcgagagctaccagcagggcgtgctgagcgccaccatcctgtacgagatcctgctgggcaaggccaccctgtacgccgtgctggtgtctgccctggtgctgatggctatggtcaagcggaaggacagccgggga

SEQ ID NO: 4632 - DNA, 2691 bp, synthetic construct
  source 1..2691: mol_type = other DNA
atggccttaccagtgaccgccttgctcctgccgctggccttgctgctccacgccgccaggccggaagtgcagctggttgaatctggcggaggactggttcagcctggcggatctctgagactgtcttgtgccgccagcggcttcagcttcagcgacttttggatgagctgggtccgacaggcccctggcaaaggacttgaatgggtcgccacaatcagccaggccggcagcgagaaggactacgtggactctgtgaagggcagattcaccatcagccgggacaacgccaagaagtccctgtacctccagatgaacagcctgagagccgaggacaccgccgtgtactattgtgcctctggcgtgtacagcttcgactacagaggccagggcaccctggtcacagtctcttctggtaccggcggaggcggatctggcggcggaggtagcggtggcggaggatctgaattcgacaccatcgtgctgacacagagccctgcttccctggccgtgtccctgggacagagagccaccatctcttgcagagccagcgagagcgtggacagctacggcaacagcttcatgcactggtatcagcagaagcccggccagccccccaagctgctgatctacctggcctccaacctggaaagcggcgtgcccgccagattttctggcagcggcagcagaaccgacttcaccctgaccatcgaccccgtggaagccgatgatgccgccacctactactgccagcagaacaactacgacccctggaccttcggcggaggcaccaagctggaaatcaagctcgaggacctgaagaacgtgttcccacctgaggtggccgtgttcgagcctagcgaggccgagatcagccacacccagaaagccaccctcgtgtgcctggctaccggcttctaccccgaccatgtggaactgtcttggtgggtcaacggcaaagaggtgcacagcggcgtgtgtaccgacccccagccactgaaagaacagcccgccctgaacgacagccggtactgcctgagcagcagactgagagtgtccgccaccttctggcagaacccccggaaccacttcagatgccaggtgcagttctacggcctgagcgagaacgacgagtggacccaggacagagccaagcccgtgacccagatcgtgtctgccgaagcctggggcagagccgattgcgacgtgaagctggtggaaaagagcttcgagacagacaccaacctgaacttccagaacctgagcgtgatcggcttcagaatcctgctgctgaaagtggccggctttaacctgctgatgaccctgcggctgtggtccagcagggccaagcgatctggatctggagcaacaaacttctcactactcaaacaagcaggtgacgtggaggagaatcccgggcctactagtatggactggatttggcgcatccttttccttgtcggcgctgctaccggcgcgcattccgggccccagctccagctgcaagagtctggacctggcctggtcaagcctagcgagacactgagcctgacctgtaccgtgtccggcgatagcatcagcagcggcgattactactggggctggatcagacagcctcctggcaaaggactggaatggatcggccacatctactacagcggcgtgacctactacaaccccagcctgaagtccagagtgaccatcagcgtggacaccagccggaaccagttctccctgaagctgtctagcgtgacagccgccgataccgccgtgtactactgcaccagagaggacagcagcaactggcggagtagaggccagggaacactggtcacagttagctctggatccggcggaggcggaagtggaggcggaggatctggcggcggaggctctttcgaagaagtgcaactccagcagagcggccctgagcttgtgaagcctggcgcttccgtgaagatgagctgcaaggccagcggctacaccttcaccagctacgtgatgcactgggtcaagcagaaacctggacagggcctggaatggatcggctacatcaacccctacaacgacggcaccaagtacaacgagaagttcaagggcaaggccaccctgacaagcgacaccagcagcagcaccgcctacatggaactgaacagcctgaccagcgaggacagcgccgtgtacttctgcgccagacccatctacttcgacaacgactacttcgattactggggccagggcaccaccctgaaggtgtcctctacgcgtatccagaaccctgatcctgccgtgtaccagctgcgggatagcaagagcagcgacaagagcgtgtgtctgttcaccgacttcgacagccagaccaacgtgtcccagagcaaggactccgacgtgtacatcaccgataagtgcgtgctggacatgcggagcatggacttcaagagcaactccgccgtggcctggtccaacaagtccgatttcgcctgcgccaacgccttcaacaacagcattatccccgaggacacattcttcccaagccccgagagcagctgcggctttaccagcgagagctaccagcagggcgtgctgagcgccaccatcctgtacgagatcctgctgggcaaggccaccctgtacgccgtgctggtgtctgccctggtgctgatggctatggtcaagcggaaggacagccgggga

SEQ ID NO: 4633 - DNA, 2676 bp, synthetic construct
  source 1..2676: mol_type = other DNA
atggccttaccagtgaccgccttgctcctgccgctggccttgctgctccacgccgccaggccggaagtgcagctggttgaatctggcggaggactggttcagcctggcggatctctgagactgtcttgtgccgccagcggcttcagcttcagcgacttttggatgagctgggtccgacaggcccctggcaaaggacttgaatgggtcgccacaatcagccaggccggcagcgagaaggactacgtggactctgtgaagggcagattcaccatcagccgggacaacgccaagaagtccctgtacctccagatgaacagcctgagagccgaggacaccgccgtgtactattgtgcctctggcgtgtacagcttcgactacagaggccagggcaccctggtcacagtctcttctggtaccggcggaggcggatctggcggcggaggtagcggtggcggaggatctgaattcgacatccagatgacccagagccccagcagcctgtctgccagcgtgggcgacagagtgaccatcacatgcaaggccagccaggacgtgggaatcgccgtggcctggtatcagcagaaacccggcaaggtgcccaagctgctgatctactgggccagcaccagacacaccggcgtgcccgatagattttccggcagcggctccggcaccgacttcaccctgacaatcagctccctccagcccgaggacgtggcaacctactactgccagcagtacagcagctacccctacaccttcggccagggcaccaaggtggaaatcaagagactcgaggacctgaagaacgtgttcccacctgaggtggccgtgttcgagcctagcgaggccgagatcagccacacccagaaagccaccctcgtgtgcctggctaccggcttctaccccgaccatgtggaactgtcttggtgggtcaacggcaaagaggtgcacagcggcgtgtgtaccgacccccagccactgaaagaacagcccgccctgaacgacagccggtactgcctgagcagcagactgagagtgtccgccaccttctggcagaacccccggaaccacttcagatgccaggtgcagttctacggcctgagcgagaacgacgagtggacccaggacagagccaagcccgtgacccagatcgtgtctgccgaagcctggggcagagccgattgcgacgtgaagctggtggaaaagagcttcgagacagacaccaacctgaacttccagaacctgagcgtgatcggcttcagaatcctgctgctgaaagtggccggctttaacctgctgatgaccctgcggctgtggtccagcagggccaagcgatctggatctggagcaacaaacttctcactactcaaacaagcaggtgacgtggaggagaatcccgggcctactagtatggactggatttggcgcatccttttccttgtcggcgctgctaccggcgcgcattccgggccccagctccagctgcaagagtctggacctggcctggtcaagcctagcgagacactgagcctgacctgtaccgtgtccggcgatagcatcagcagcggcgattactactggggctggatcagacagcctcctggcaaaggactggaatggatcggccacatctactacagcggcgtgacctactacaaccccagcctgaagtccagagtgaccatcagcgtggacaccagccggaaccagttctccctgaagctgtctagcgtgacagccgccgataccgccgtgtactactgcaccagagaggacagcagcaactggcggagtagaggccagggaacactggtcacagttagctctggatccggcggaggcggaagtggaggcggaggatctggcggcggaggctctttcgaagaagtgcaactggtggaatcaggcggcggactggtgcagcctggcggatctctgagactgagctgtgccgccagcggcttcgacttcagccggtactggatgagctgggtgcgccaggcccctggcaaaggactggaatggatcggcgagatcaaccccgacagcagcaccatcaactacgcccccagcctgaaggacaagttcatcatcagccgggacaacgccaagaacagcctgtacctccagatgaactccctgcgggccgaggacaccgccgtgtactattgcgccagacccgacggcaactactggtacttcgacgtgtggggccagggaaccctcgtgaccgtgtcatctacgcgtatccagaaccctgatcctgccgtgtaccagctgcgggatagcaagagcagcgacaagagcgtgtgtctgttcaccgacttcgacagccagaccaacgtgtcccagagcaaggactccgacgtgtacatcaccgataagtgcgtgctggacatgcggagcatggacttcaagagcaactccgccgtggcctggtccaacaagtccgatttcgcctgcgccaacgccttcaacaacagcattatccccgaggacacattcttcccaagccccgagagcagctgcggctttaccagcgagagctaccagcagggcgtgctgagcgccaccatcctgtacgagatcctgctgggcaaggccaccctgtacgccgtgctggtgtctgccctggtgctgatggctatggtcaagcggaaggacagccgggga

SEQ ID NO: 4634 - DNA, 2676 bp, synthetic construct
  source 1..2676: mol_type = other DNA
atggccttaccagtgaccgccttgctcctgccgctggccttgctgctccacgccgccaggccggaagtgcagctggttgaatctggcggaggactggttcagcctggcggatctctgagactgtcttgtgccgccagcggcttcagcttcagcgacttttggatgagctgggtccgacaggcccctggcaaaggacttgaatgggtcgccacaatcagccaggccggcagcgagaaggactacgtggactctgtgaagggcagattcaccatcagccgggacaacgccaagaagtccctgtacctccagatgaacagcctgagagccgaggacaccgccgtgtactattgtgcctctggcgtgtacagcttcgactacagaggccagggcaccctggtcacagtctcttctggtaccggcggaggcggatctggcggcggaggtagcggtggcggaggatctgaattcgacatcgtgatgacccagagccagaagagcatgagcaccagcgtgggcgacagagtgagcatcacctgcaaggccagccaggacgtgatcaccggcgtggcctggtaccagcagaagcccggccagagccccaagctgctgatctacagcgccagctacagatacaccggcgtgcccgacagattcaccggcagcggcagcggcaccgacttcaccttcaccatcagcaacgtgcaggccgaggacctggccgtgtactactgccagcagcactacagcacccccctgaccttcggcgccggcaccaagctggagctgaagctcgaggacctgaagaacgtgttcccacctgaggtggccgtgttcgagcctagcgaggccgagatcagccacacccagaaagccaccctcgtgtgcctggctaccggcttctaccccgaccatgtggaactgtcttggtgggtcaacggcaaagaggtgcacagcggcgtgtgtaccgacccccagccactgaaagaacagcccgccctgaacgacagccggtactgcctgagcagcagactgagagtgtccgccaccttctggcagaacccccggaaccacttcagatgccaggtgcagttctacggcctgagcgagaacgacgagtggacccaggacagagccaagcccgtgacccagatcgtgtctgccgaagcctggggcagagccgattgcgacgtgaagctggtggaaaagagcttcgagacagacaccaacctgaacttccagaacctgagcgtgatcggcttcagaatcctgctgctgaaagtggccggctttaacctgctgatgaccctgcggctgtggtccagcagggccaagcgatctggatctggagcaacaaacttctcactactcaaacaagcaggtgacgtggaggagaatcccgggcctactagtatggactggatttggcgcatccttttccttgtcggcgctgctaccggcgcgcattccgggccccagctccagctgcaagagtctggacctggcctggtcaagcctagcgagacactgagcctgacctgtaccgtgtccggcgatagcatcagcagcggcgattactactggggctggatcagacagcctcctggcaaaggactggaatggatcggccacatctactacagcggcgtgacctactacaaccccagcctgaagtccagagtgaccatcagcgtggacaccagccggaaccagttctccctgaagctgtctagcgtgacagccgccgataccgccgtgtactactgcaccagagaggacagcagcaactggcggagtagaggccagggaacactggtcacagttagctctggatccggcggaggcggaagtggaggcggaggatctggcggcggaggctctttcgaacaggtgcagctgcagcagcccggcgccgagctggtgagacccggcgccagcgtgaagctgagctgcaaggccagcggctacagcttcaccacctactggatgaactgggtgaagcagagacccggccagggcctggagtggatcggcatgatccaccccagcgacagcgagaccagactgaaccagaagttcaaggacaaggccaccctgaccgtggacaagagcagcagcaccgcctacatgcagctgagcagccccaccagcgaggacagcgccgtgtactactgcgccagaagcaccatgatcgccaccagagccatggactactggggccagggcaccagcgtgaccgtgagcagcacgcgtatccagaaccctgatcctgccgtgtaccagctgcgggatagcaagagcagcgacaagagcgtgtgtctgttcaccgacttcgacagccagaccaacgtgtcccagagcaaggactccgacgtgtacatcaccgataagtgcgtgctggacatgcggagcatggacttcaagagcaactccgccgtggcctggtccaacaagtccgatttcgcctgcgccaacgccttcaacaacagcattatccccgaggacacattcttcccaagccccgagagcagctgcggctttaccagcgagagctaccagcagggcgtgctgagcgccaccatcctgtacgagatcctgctgggcaaggccaccctgtacgccgtgctggtgtctgccctggtgctgatggctatggtcaagcggaaggacagccgggga

SEQ ID NO: 4635 - DNA, 2694 bp, synthetic construct
  source 1..2694: mol_type = other DNA
atggccttaccagtgaccgccttgctcctgccgctggccttgctgctccacgccgccaggccggaagtgcagctggttgaatctggcggaggactggttcagcctggcggatctctgagactgtcttgtgccgccagcggcttcagcttcagcgacttttggatgagctgggtccgacaggcccctggcaaaggacttgaatgggtcgccacaatcagccaggccggcagcgagaaggactacgtggactctgtgaagggcagattcaccatcagccgggacaacgccaagaagtccctgtacctccagatgaacagcctgagagccgaggacaccgccgtgtactattgtgcctctggcgtgtacagcttcgactacagaggccagggcaccctggtcacagtctcttctggtaccggcggaggcggatctggcggcggaggtagcggtggcggaggatctgaattccagagcgtgctgacacagcctccatccgtgtctggcgctccaggccagagagtgaccatctcctgtaccggcagcggcagcaacatcggagccccctacgacgtgtcctggtatcagcaactgcctggcaccgcccccaagctgctgatctaccacaacaacaagcggcccagcggcgtgcccgatagattcagcggctctaagagcggcaccagcgccagcctggctatcactggactccaggccgaggacgaggccgactactactgtgccacagtggaagccggcctgagcggctctgtgtttggcggcggaacaaagctgaccgtgctgggagctctcgaggacctgaagaacgtgttcccacctgaggtggccgtgttcgagcctagcgaggccgagatcagccacacccagaaagccaccctcgtgtgcctggctaccggcttctaccccgaccatgtggaactgtcttggtgggtcaacggcaaagaggtgcacagcggcgtgtgtaccgacccccagccactgaaagaacagcccgccctgaacgacagccggtactgcctgagcagcagactgagagtgtccgccaccttctggcagaacccccggaaccacttcagatgccaggtgcagttctacggcctgagcgagaacgacgagtggacccaggacagagccaagcccgtgacccagatcgtgtctgccgaagcctggggcagagccgattgcgacgtgaagctggtggaaaagagcttcgagacagacaccaacctgaacttccagaacctgagcgtgatcggcttcagaatcctgctgctgaaagtggccggctttaacctgctgatgaccctgcggctgtggtccagcagggccaagcgatctggatctggagcaacaaacttctcactactcaaacaagcaggtgacgtggaggagaatcccgggcctactagtatggactggatttggcgcatccttttccttgtcggcgctgctaccggcgcgcattccgggccccagctccagctgcaagagtctggacctggcctggtcaagcctagcgagacactgagcctgacctgtaccgtgtccggcgatagcatcagcagcggcgattactactggggctggatcagacagcctcctggcaaaggactggaatggatcggccacatctactacagcggcgtgacctactacaaccccagcctgaagtccagagtgaccatcagcgtggacaccagccggaaccagttctccctgaagctgtctagcgtgacagccgccgataccgccgtgtactactgcaccagagaggacagcagcaactggcggagtagaggccagggaacactggtcacagttagctctggatccggcggaggcggaagtggaggcggaggatctggcggcggaggctctttcgaacaggtgcaactggtgcagagcggagccgaagtgaagaaacctggggccagcgtgaaggtgtcctgcaaggtgtccggctacaccctgaccgagctgagcattcactgggtgcgccaggcccctggcaagggactggaatggatgggcggcttcgaccccgaagagaacgagatcgtgtacgcccagcggttccagggcagagtgacaatgaccgaggacaccagcaccgacaccgcctacatggaactgagcagcctgcggagcgaggataccgccgtgtactactgcgccatcgtgggcagcttcagccctctgacactgggcctgtggggccagggaactatggtcaccgtgtccagcacgcgtatccagaaccctgatcctgccgtgtaccagctgcgggatagcaagagcagcgacaagagcgtgtgtctgttcaccgacttcgacagccagaccaacgtgtcccagagcaaggactccgacgtgtacatcaccgataagtgcgtgctggacatgcggagcatggacttcaagagcaactccgccgtggcctggtccaacaagtccgatttcgcctgcgccaacgccttcaacaacagcattatccccgaggacacattcttcccaagccccgagagcagctgcggctttaccagcgagagctaccagcagggcgtgctgagcgccaccatcctgtacgagatcctgctgggcaaggccaccctgtacgccgtgctggtgtctgccctggtgctgatggctatggtcaagcggaaggacagccgggga

SEQ ID NO: 4636 - DNA, 2694 bp, synthetic construct
  source 1..2694: mol_type = other DNA
atggccttaccagtgaccgccttgctcctgccgctggccttgctgctccacgccgccaggccggaagtgcagctggttgaatctggcggaggactggttcagcctggcggatctctgagactgtcttgtgccgccagcggcttcagcttcagcgacttttggatgagctgggtccgacaggcccctggcaaaggacttgaatgggtcgccacaatcagccaggccggcagcgagaaggactacgtggactctgtgaagggcagattcaccatcagccgggacaacgccaagaagtccctgtacctccagatgaacagcctgagagccgaggacaccgccgtgtactattgtgcctctggcgtgtacagcttcgactacagaggccagggcaccctggtcacagtctcttctggtaccggcggaggcggatctggcggcggaggtagcggtggcggaggatctgaattccagagcgtgctgacacagcctccatccgtgtctggcgctccaggccagagagtgaccatctcctgtaccggcagcggcagcaacatcggagccccctacgacgtgtcctggtatcagcaactgcctggcaccgcccccaagctgctgatctaccacaacaacaagcggcccagcggcgtgcccgatagattcagcggctctaagagcggcaccagcgccagcctggctatcactggactccaggccgaggacgaggccgactactactgccagagctacgacagcagcagcatcagcaccatcttcggcggaggcaccaagctgacagtgctgggagctctcgaggacctgaagaacgtgttcccacctgaggtggccgtgttcgagcctagcgaggccgagatcagccacacccagaaagccaccctcgtgtgcctggctaccggcttctaccccgaccatgtggaactgtcttggtgggtcaacggcaaagaggtgcacagcggcgtgtgtaccgacccccagccactgaaagaacagcccgccctgaacgacagccggtactgcctgagcagcagactgagagtgtccgccaccttctggcagaacccccggaaccacttcagatgccaggtgcagttctacggcctgagcgagaacgacgagtggacccaggacagagccaagcccgtgacccagatcgtgtctgccgaagcctggggcagagccgattgcgacgtgaagctggtggaaaagagcttcgagacagacaccaacctgaacttccagaacctgagcgtgatcggcttcagaatcctgctgctgaaagtggccggctttaacctgctgatgaccctgcggctgtggtccagcagggccaagcgatctggatctggagcaacaaacttctcactactcaaacaagcaggtgacgtggaggagaatcccgggcctactagtatggactggatttggcgcatccttttccttgtcggcgctgctaccggcgcgcattccgggccccagctccagctgcaagagtctggacctggcctggtcaagcctagcgagacactgagcctgacctgtaccgtgtccggcgatagcatcagcagcggcgattactactggggctggatcagacagcctcctggcaaaggactggaatggatcggccacatctactacagcggcgtgacctactacaaccccagcctgaagtccagagtgaccatcagcgtggacaccagccggaaccagttctccctgaagctgtctagcgtgacagccgccgataccgccgtgtactactgcaccagagaggacagcagcaactggcggagtagaggccagggaacactggtcacagttagctctggatccggcggaggcggaagtggaggcggaggatctggcggcggaggctctttcgaacaggtgcaactggtgcagagcggagccgaagtgaagaaacctggggccagcgtgaaggtgtcctgcaaggtgtccggctacaccctgaccgagctgagcattcactgggtgcgccaggcccctggcaagggactggaatggatgggcggcttcgaccccgaagagaacgagatcgtgtacgcccagcggttccagggcagagtgacaatgaccgaggacaccagcaccgacaccgcctacatggaactgagcagcctgcggagcgaggataccgccgtgtactactgtgccatcgtgggcagcttcagcggaatcgcctacagaccttggggccagggcacaatggtcaccgtgtctagcacgcgtatccagaaccctgatcctgccgtgtaccagctgcgggatagcaagagcagcgacaagagcgtgtgtctgttcaccgacttcgacagccagaccaacgtgtcccagagcaaggactccgacgtgtacatcaccgataagtgcgtgctggacatgcggagcatggacttcaagagcaactccgccgtggcctggtccaacaagtccgatttcgcctgcgccaacgccttcaacaacagcattatccccgaggacacattcttcccaagccccgagagcagctgcggctttaccagcgagagctaccagcagggcgtgctgagcgccaccatcctgtacgagatcctgctgggcaaggccaccctgtacgccgtgctggtgtctgccctggtgctgatggctatggtcaagcggaaggacagccgggga

SEQ ID NO: 4637 - DNA, 2658 bp, synthetic construct
  source 1..2658: mol_type = other DNA
atggccttaccagtgaccgccttgctcctgccgctggccttgctgctccacgccgccaggccggaagtgcagctggttgaatctggcggaggactggttcagcctggcggatctctgagactgtcttgtgccgccagcggcttcagcttcagcgacttttggatgagctgggtccgacaggcccctggcaaaggacttgaatgggtcgccacaatcagccaggccggcagcgagaaggactacgtggactctgtgaagggcagattcaccatcagccgggacaacgccaagaagtccctgtacctccagatgaacagcctgagagccgaggacaccgccgtgtactattgtgcctctggcgtgtacagcttcgactacagaggccagggcaccctggtcacagtctcttctggtaccggcggaggcggatctggcggcggaggtagcggtggcggaggatctgaattcgacatccagatgacccagagccccagcagcctgtctgccagcgtgggcgacagagtgaccatcacctgtagagccagccagggcatcagaaacaacctggcctggtatcagcagaagcccggcaaggcccccaagcggctgatctacgccgccagcaatctccagagcggcgtgcccagcagattcacaggctctggcagcggcaccgagttcaccctgatcgtgtctagcctccagcccgaggacttcgccacctactactgcctccagcaccacagctaccccctgacatctggcggaggcaccaaggtggaactcgaggacctgaagaacgtgttcccacctgaggtggccgtgttcgagcctagcgaggccgagatcagccacacccagaaagccaccctcgtgtgcctggctaccggcttctaccccgaccatgtggaactgtcttggtgggtcaacggcaaagaggtgcacagcggcgtgtgtaccgacccccagccactgaaagaacagcccgccctgaacgacagccggtactgcctgagcagcagactgagagtgtccgccaccttctggcagaacccccggaaccacttcagatgccaggtgcagttctacggcctgagcgagaacgacgagtggacccaggacagagccaagcccgtgacccagatcgtgtctgccgaagcctggggcagagccgattgcgacgtgaagctggtggaaaagagcttcgagacagacaccaacctgaacttccagaacctgagcgtgatcggcttcagaatcctgctgctgaaagtggccggctttaacctgctgatgaccctgcggctgtggtccagcagggccaagcgatctggatctggagcaacaaacttctcactactcaaacaagcaggtgacgtggaggagaatcccgggcctactagtatggactggatttggcgcatccttttccttgtcggcgctgctaccggcgcgcattccgggccccagctccagctgcaagagtctggacctggcctggtcaagcctagcgagacactgagcctgacctgtaccgtgtccggcgatagcatcagcagcggcgattactactggggctggatcagacagcctcctggcaaaggactggaatggatcggccacatctactacagcggcgtgacctactacaaccccagcctgaagtccagagtgaccatcagcgtggacaccagccggaaccagttctccctgaagctgtctagcgtgacagccgccgataccgccgtgtactactgcaccagagaggacagcagcaactggcggagtagaggccagggaacactggtcacagttagctctggatccggcggaggcggaagtggaggcggaggatctggcggcggaggctctttcgaagaggtgcaggtgctggaaagtggcggaggactggtgcagcctggcggctctctgagactgtcttgtgccgccagcggcttcaccttcagcagctacgccatgagctgggtgcgccaggcccctggaaaaggactggaatgggtgtccgccatcagcggctctggcgggtctaccaactacgccgatagcgtgaagggccggttcaccatcagccgggacaacagcaagaacaccctgtacctccagatgaacagcctgcgggccgaggacaccgccgtgtattattgtgccggcagcagcgggtggagcgagtattggggacagggcaccctcgtgaccgtgtcctctacgcgtatccagaaccctgatcctgccgtgtaccagctgcgggatagcaagagcagcgacaagagcgtgtgtctgttcaccgacttcgacagccagaccaacgtgtcccagagcaaggactccgacgtgtacatcaccgataagtgcgtgctggacatgcggagcatggacttcaagagcaactccgccgtggcctggtccaacaagtccgatttcgcctgcgccaacgccttcaacaacagcattatccccgaggacacattcttcccaagccccgagagcagctgcggctttaccagcgagagctaccagcagggcgtgctgagcgccaccatcctgtacgagatcctgctgggcaaggccaccctgtacgccgtgctggtgtctgccctggtgctgatggctatggtcaagcggaaggacagccgggga

SEQ ID NO: 4638 - DNA, 2676 bp, synthetic construct
  source 1..2676: mol_type = other DNA
atggccttaccagtgaccgccttgctcctgccgctggccttgctgctccacgccgccaggccggaagtgcagctggttgaatctggcggaggactggttcagcctggcggatctctgagactgtcttgtgccgccagcggcttcagcttcagcgacttttggatgagctgggtccgacaggcccctggcaaaggacttgaatgggtcgccacaatcagccaggccggcagcgagaaggactacgtggactctgtgaagggcagattcaccatcagccgggacaacgccaagaagtccctgtacctccagatgaacagcctgagagccgaggacaccgccgtgtactattgtgcctctggcgtgtacagcttcgactacagaggccagggcaccctggtcacagtctcttctggtaccggcggaggcggatctggcggcggaggtagcggtggcggaggatctgaattcgacgagatccagctggtgcagagcggagccgaagtgaagaagcctggcgagagcctgcggatcagctgcaagggcagcggcttcaacatcgaggactactacatccactgggtgcgccagatgcccggcaagggcctggaatggatgggcagaatcgaccccgagaacgacgagactaagtacggccccatcttccagggccacgtgaccatcagcgccgacaccagcatcaacaccgtgtacctccagtggtccagcctgaaggccagcgacaccgccatgtactactgcgcctttagaggcggcgtgtactggggccagggcaccacagtgacagtgtctagcctcgaggacctgaagaacgtgttcccacctgaggtggccgtgttcgagcctagcgaggccgagatcagccacacccagaaagccaccctcgtgtgcctggctaccggcttctaccccgaccatgtggaactgtcttggtgggtcaacggcaaagaggtgcacagcggcgtgtgtaccgacccccagccactgaaagaacagcccgccctgaacgacagccggtactgcctgagcagcagactgagagtgtccgccaccttctggcagaacccccggaaccacttcagatgccaggtgcagttctacggcctgagcgagaacgacgagtggacccaggacagagccaagcccgtgacccagatcgtgtctgccgaagcctggggcagagccgattgcgacgtgaagctggtggaaaagagcttcgagacagacaccaacctgaacttccagaacctgagcgtgatcggcttcagaatcctgctgctgaaagtggccggctttaacctgctgatgaccctgcggctgtggtccagcagggccaagcgatctggatctggagcaacaaacttctcactactcaaacaagcaggtgacgtggaggagaatcccgggcctactagtatggactggatttggcgcatccttttccttgtcggcgctgctaccggcgcgcattccgggccccagctccagctgcaagagtctggacctggcctggtcaagcctagcgagacactgagcctgacctgtaccgtgtccggcgatagcatcagcagcggcgattactactggggctggatcagacagcctcctggcaaaggactggaatggatcggccacatctactacagcggcgtgacctactacaaccccagcctgaagtccagagtgaccatcagcgtggacaccagccggaaccagttctccctgaagctgtctagcgtgacagccgccgataccgccgtgtactactgcaccagagaggacagcagcaactggcggagtagaggccagggaacactggtcacagttagctctggatccggcggaggcggaagtggaggcggaggatctggcggcggaggctctttcgaagatgtcgtgatgacccagagccccgacagcctggctgtgtctctgggagagagagccaccatcaactgcaagtccagccagtccctgctggacagcgacggcaagacctacctgaactggctccagcagaagcccggccagccccccaagagactgatctccctggtgtccaagctggactccggcgtgcccgatagattttccggctctggcagcggcaccgacttcaccctgacaatcagctcccttcaggccgaggacgtggccgtgtactattgctggcagggcacacacttccccggcacctttggcggaggcaccaaggtggaaatcaagacgcgtatccagaaccctgatcctgccgtgtaccagctgcgggatagcaagagcagcgacaagagcgtgtgtctgttcaccgacttcgacagccagaccaacgtgtcccagagcaaggactccgacgtgtacatcaccgataagtgcgtgctggacatgcggagcatggacttcaagagcaactccgccgtggcctggtccaacaagtccgatttcgcctgcgccaacgccttcaacaacagcattatccccgaggacacattcttcccaagccccgagagcagctgcggctttaccagcgagagctaccagcagggcgtgctgagcgccaccatcctgtacgagatcctgctgggcaaggccaccctgtacgccgtgctggtgtctgccctggtgctgatggctatggtcaagcggaaggacagccgggga

SEQ ID NO: 4639 - DNA, 2697 bp, synthetic construct
  source 1..2697: mol_type = other DNA
atggccttaccagtgaccgccttgctcctgccgctggccttgctgctccacgccgccaggccggaagtgcagctggttgaatctggcggaggactggttcagcctggcggatctctgagactgtcttgtgccgccagcggcttcagcttcagcgacttttggatgagctgggtccgacaggcccctggcaaaggacttgaatgggtcgccacaatcagccaggccggcagcgagaaggactacgtggactctgtgaagggcagattcaccatcagccgggacaacgccaagaagtccctgtacctccagatgaacagcctgagagccgaggacaccgccgtgtactattgtgcctctggcgtgtacagcttcgactacagaggccagggcaccctggtcacagtctcttctggtaccggcggaggcggatctggcggcggaggtagcggtggcggaggatctgaattcgacgagcttgtgatgacccagagccccagcagcctgacagtgacagccggcgagaaagtgaccatgagctgcaagagcagccagagcctgctgaacagcggcaaccagaagaactacctgacctggtatcagcagaagcccggccagccccccaagctgctgatctactgggccagcaccagagaaagcggcgtgcccgatagattcaccggctctggcagcggcaccgacttcaccctgacaatcagcagcgtgcaggccgaggacctggccgtgtactactgccagaacgactacagctaccccctgaccttcggagccggcaccaagctggaaatcaagctcgaggacctgaagaacgtgttcccacctgaggtggccgtgttcgagcctagcgaggccgagatcagccacacccagaaagccaccctcgtgtgcctggctaccggcttctaccccgaccatgtggaactgtcttggtgggtcaacggcaaagaggtgcacagcggcgtgtgtaccgacccccagccactgaaagaacagcccgccctgaacgacagccggtactgcctgagcagcagactgagagtgtccgccaccttctggcagaacccccggaaccacttcagatgccaggtgcagttctacggcctgagcgagaacgacgagtggacccaggacagagccaagcccgtgacccagatcgtgtctgccgaagcctggggcagagccgattgcgacgtgaagctggtggaaaagagcttcgagacagacaccaacctgaacttccagaacctgagcgtgatcggcttcagaatcctgctgctgaaagtggccggctttaacctgctgatgaccctgcggctgtggtccagcagggccaagcgatctggatctggagcaacaaacttctcactactcaaacaagcaggtgacgtggaggagaatcccgggcctactagtatggactggatttggcgcatccttttccttgtcggcgctgctaccggcgcgcattccgggccccagctccagctgcaagagtctggacctggcctggtcaagcctagcgagacactgagcctgacctgtaccgtgtccggcgatagcatcagcagcggcgattactactggggctggatcagacagcctcctggcaaaggactggaatggatcggccacatctactacagcggcgtgacctactacaaccccagcctgaagtccagagtgaccatcagcgtggacaccagccggaaccagttctccctgaagctgtctagcgtgacagccgccgataccgccgtgtactactgcaccagagaggacagcagcaactggcggagtagaggccagggaacactggtcacagttagctctggatccggcggaggcggaagtggaggcggaggatctggcggcggaggctctttcgaagaagtgcagctgctggaacagtctggcgccgaacttgtgcggcctggcaccagcgtgaagatcagctgtaaagccagcggctacgccttcaccaactactggctgggctgggtcaagcagaggcctggacacggcctggaatggatcggcgacatctttcccggctccggcaacatccactacaacgagaagttcaagggcaaggccaccctgaccgccgacaagtctagcagcaccgcctacatgcagctgtccagcctgacctttgaggacagcgccgtgtatttctgtgcccggctgcggaactgggacgagcccatggattattggggccagggcaccaccgtgaccgtgtctagtacgcgtatccagaaccctgatcctgccgtgtaccagctgcgggatagcaagagcagcgacaagagcgtgtgtctgttcaccgacttcgacagccagaccaacgtgtcccagagcaaggactccgacgtgtacatcaccgataagtgcgtgctggacatgcggagcatggacttcaagagcaactccgccgtggcctggtccaacaagtccgatttcgcctgcgccaacgccttcaacaacagcattatccccgaggacacattcttcccaagccccgagagcagctgcggctttaccagcgagagctaccagcagggcgtgctgagcgccaccatcctgtacgagatcctgctgggcaaggccaccctgtacgccgtgctggtgtctgccctggtgctgatggctatggtcaagcggaaggacagccgggga

SEQ ID NO: 4640 - DNA, 2700 bp, synthetic construct
  source 1..2700: mol_type = other DNA
atggccttaccagtgaccgccttgctcctgccgctggccttgctgctccacgccgccaggccggaagtgcagctggttgaatctggcggaggactggttcagcctggcggatctctgagactgtcttgtgccgccagcggcttcagcttcagcgacttttggatgagctgggtccgacaggcccctggcaaaggacttgaatgggtcgccacaatcagccaggccggcagcgagaaggactacgtggactctgtgaagggcagattcaccatcagccgggacaacgccaagaagtccctgtacctccagatgaacagcctgagagccgaggacaccgccgtgtactattgtgcctctggcgtgtacagcttcgactacagaggccagggcaccctggtcacagtctcttctggtaccggcggaggcggatctggcggcggaggtagcggtggcggaggatctgaattcgacgagctgcagatgacccagagccctagcagcctgtctgccagcgtgggcgacagagtgaccatcacctgtagagccagccagagcatcagcagctacctgaactggtatcagcagaagcccggccagccccccaaactgctgatctactgggccagcaccagagaaagcggcgtgcccgatagattcagcggcagcgagagcggcaccaactacaccctgaccatcagctccctgcagcccgaggacttcgccacctacttttgccagcagagcgacagcctgcccatcacctttggacagggcacccggctggacattcagctcgaggacctgaagaacgtgttcccacctgaggtggccgtgttcgagcctagcgaggccgagatcagccacacccagaaagccaccctcgtgtgcctggctaccggcttctaccccgaccatgtggaactgtcttggtgggtcaacggcaaagaggtgcacagcggcgtgtgtaccgacccccagccactgaaagaacagcccgccctgaacgacagccggtactgcctgagcagcagactgagagtgtccgccaccttctggcagaacccccggaaccacttcagatgccaggtgcagttctacggcctgagcgagaacgacgagtggacccaggacagagccaagcccgtgacccagatcgtgtctgccgaagcctggggcagagccgattgcgacgtgaagctggtggaaaagagcttcgagacagacaccaacctgaacttccagaacctgagcgtgatcggcttcagaatcctgctgctgaaagtggccggctttaacctgctgatgaccctgcggctgtggtccagcagggccaagcgatctggatctggagcaacaaacttctcactactcaaacaagcaggtgacgtggaggagaatcccgggcctactagtatggactggatttggcgcatccttttccttgtcggcgctgctaccggcgcgcattccgggccccagctccagctgcaagagtctggacctggcctggtcaagcctagcgagacactgagcctgacctgtaccgtgtccggcgatagcatcagcagcggcgattactactggggctggatcagacagcctcctggcaaaggactggaatggatcggccacatctactacagcggcgtgacctactacaaccccagcctgaagtccagagtgaccatcagcgtggacaccagccggaaccagttctccctgaagctgtctagcgtgacagccgccgataccgccgtgtactactgcaccagagaggacagcagcaactggcggagtagaggccagggaacactggtcacagttagctctggatccggcggaggcggaagtggaggcggaggatctggcggcggaggctctttcgaagaggtgcaactgctggaatctgggggcggagtggtgcagcctggcagaagcctgagactgagctgtgccgccagcggcttcaccttcagctcctacggaatgcactgggtgcgccaggcccctggcaaaggactggaatgggtggccgtgatctcctacgacggcagcaacaagtactacgccgacagcgtgaagggccggttcaccatcagccgggacaacagcaagaacaccctgtacctgcagatgaacagcctgcgggccgaggacaccgccgtgtactactgcgccaaggatatgggctggggcagcggctggcggccttactactactacggcatggacgtgtggggccagggcaccaccgtgacagtgtcatctacgcgtatccagaaccctgatcctgccgtgtaccagctgcgggatagcaagagcagcgacaagagcgtgtgtctgttcaccgacttcgacagccagaccaacgtgtcccagagcaaggactccgacgtgtacatcaccgataagtgcgtgctggacatgcggagcatggacttcaagagcaactccgccgtggcctggtccaacaagtccgatttcgcctgcgccaacgccttcaacaacagcattatccccgaggacacattcttcccaagccccgagagcagctgcggctttaccagcgagagctaccagcagggcgtgctgagcgccaccatcctgtacgagatcctgctgggcaaggccaccctgtacgccgtgctggtgtctgccctggtgctgatggctatggtcaagcggaaggacagccgggga

SEQ ID NO: 4641 - DNA, 2691 bp, synthetic construct
  source 1..2691: mol_type = other DNA
atggccttaccagtgaccgccttgctcctgccgctggccttgctgctccacgccgccaggccggaagtgcagctggttgaatctggcggaggactggttcagcctggcggatctctgagactgtcttgtgccgccagcggcttcagcttcagcgacttttggatgagctgggtccgacaggcccctggcaaaggacttgaatgggtcgccacaatcagccaggccggcagcgagaaggactacgtggactctgtgaagggcagattcaccatcagccgggacaacgccaagaagtccctgtacctccagatgaacagcctgagagccgaggacaccgccgtgtactattgtgcctctggcgtgtacagcttcgactacagaggccagggcaccctggtcacagtctcttctggtaccggcggaggcggatctggcggcggaggtagcggtggcggaggatctgaattcgacgacatccaaatgacacagagtccttctagtttgagtgcgagcgtgggggacagggtgaccattacctgcagggccagccagagcataagctcataccttaattggtaccagcaaaaaccaggtaaggcccctaagctcctgatctacgcggcctcttcacttcaatctggggtcccttcccgcttcagtggctccggcagcggcaccgacttcacgctcactatatcaagtctgcagcctgaggatctcgccacctattactgtcaacaaagttattccacccctttcacctttggaccgggcacgaaagtggatattaagctcgaggacctgaagaacgtgttcccacctgaggtggccgtgttcgagcctagcgaggccgagatcagccacacccagaaagccaccctcgtgtgcctggctaccggcttctaccccgaccatgtggaactgtcttggtgggtcaacggcaaagaggtgcacagcggcgtgtgtaccgacccccagccactgaaagaacagcccgccctgaacgacagccggtactgcctgagcagcagactgagagtgtccgccaccttctggcagaacccccggaaccacttcagatgccaggtgcagttctacggcctgagcgagaacgacgagtggacccaggacagagccaagcccgtgacccagatcgtgtctgccgaagcctggggcagagccgattgcgacgtgaagctggtggaaaagagcttcgagacagacaccaacctgaacttccagaacctgagcgtgatcggcttcagaatcctgctgctgaaagtggccggctttaacctgctgatgaccctgcggctgtggtccagcagggccaagcgatctggatctggagcaacaaacttctcactactcaaacaagcaggtgacgtggaggagaatcccgggcctactagtatggactggatttggcgcatccttttccttgtcggcgctgctaccggcgcgcattccgggccccagctccagctgcaagagtctggacctggcctggtcaagcctagcgagacactgagcctgacctgtaccgtgtccggcgatagcatcagcagcggcgattactactggggctggatcagacagcctcctggcaaaggactggaatggatcggccacatctactacagcggcgtgacctactacaaccccagcctgaagtccagagtgaccatcagcgtggacaccagccggaaccagttctccctgaagctgtctagcgtgacagccgccgataccgccgtgtactactgcaccagagaggacagcagcaactggcggagtagaggccagggaacactggtcacagttagctctggatccggcggaggcggaagtggaggcggaggatctggcggcggaggctctttcgaagtgcacgaggtccagcttgtgcagtccggggcagaggtcaagaagcctggttctagcgtaaaagtgagttgcaaagcctcaggtgggacattttcatcctacgcgatcagttgggttagacaggctcctggtcaagggctggaatggatgggcggaattattccaatcttcggaacagcgaattacgcgcagaagttccagggtagagtaaccatcactgctgacaagtccacctccaccgcatacatggaattgtctagtctccggagcgaggatacggcggtgtattattgtgctacgttcgccctgtttggcttccgcgaacaggctttcgacatctgggggcagggcacgacagtcacggttagtagtacgcgtatccagaaccctgatcctgccgtgtaccagctgcgggatagcaagagcagcgacaagagcgtgtgtctgttcaccgacttcgacagccagaccaacgtgtcccagagcaaggactccgacgtgtacatcaccgataagtgcgtgctggacatgcggagcatggacttcaagagcaactccgccgtggcctggtccaacaagtccgatttcgcctgcgccaacgccttcaacaacagcattatccccgaggacacattcttcccaagccccgagagcagctgcggctttaccagcgagagctaccagcagggcgtgctgagcgccaccatcctgtacgagatcctgctgggcaaggccaccctgtacgccgtgctggtgtctgccctggtgctgatggctatggtcaagcggaaggacagccgggga

SEQ ID NO: 4642 - DNA, 2685 bp, synthetic construct
  source 1..2685: mol_type = other DNA
atggccttaccagtgaccgccttgctcctgccgctggccttgctgctccacgccgccaggccggaagtgcagctggttgaatctggcggaggactggttcagcctggcggatctctgagactgtcttgtgccgccagcggcttcagcttcagcgacttttggatgagctgggtccgacaggcccctggcaaaggacttgaatgggtcgccacaatcagccaggccggcagcgagaaggactacgtggactctgtgaagggcagattcaccatcagccgggacaacgccaagaagtccctgtacctccagatgaacagcctgagagccgaggacaccgccgtgtactattgtgcctctggcgtgtacagcttcgactacagaggccagggcaccctggtcacagtctcttctggtaccggcggaggcggatctggcggcggaggtagcggtggcggaggatctgaattcgacatcgtgctgacccagagccctctgagcctggccgtgtctctgggacagcctgccatcatcagctgcaaggccagccagagcgtgtcctttgccggcacctctctgatgcactggtatcaccagaagcccggccagcagcccagactgctgatctacagagccagcaacctggaagccggcgtgcccgatagattttccggcagcggcagcaagaccgacttcaccctgaccatcagccccgtggaagccgaagatgccgccacctactactgccagcagagcagagagtacccctacaccttcggcggaggcaccaagctggaaatcaagaggctcgaggacctgaagaacgtgttcccacctgaggtggccgtgttcgagcctagcgaggccgagatcagccacacccagaaagccaccctcgtgtgcctggctaccggcttctaccccgaccatgtggaactgtcttggtgggtcaacggcaaagaggtgcacagcggcgtgtgtaccgacccccagccactgaaagaacagcccgccctgaacgacagccggtactgcctgagcagcagactgagagtgtccgccaccttctggcagaacccccggaaccacttcagatgccaggtgcagttctacggcctgagcgagaacgacgagtggacccaggacagagccaagcccgtgacccagatcgtgtctgccgaagcctggggcagagccgattgcgacgtgaagctggtggaaaagagcttcgagacagacaccaacctgaacttccagaacctgagcgtgatcggcttcagaatcctgctgctgaaagtggccggctttaacctgctgatgaccctgcggctgtggtccagcagggccaagcgatctggatctggagcaacaaacttctcactactcaaacaagcaggtgacgtggaggagaatcccgggcctactagtatggactggatttggcgcatccttttccttgtcggcgctgctaccggcgcgcattccgggccccagctccagctgcaagagtctggacctggcctggtcaagcctagcgagacactgagcctgacctgtaccgtgtccggcgatagcatcagcagcggcgattactactggggctggatcagacagcctcctggcaaaggactggaatggatcggccacatctactacagcggcgtgacctactacaaccccagcctgaagtccagagtgaccatcagcgtggacaccagccggaaccagttctccctgaagctgtctagcgtgacagccgccgataccgccgtgtactactgcaccagagaggacagcagcaactggcggagtagaggccagggaacactggtcacagttagctctggatccggcggaggcggaagtggaggcggaggatctggcggcggaggctctttcgaacaggtccaactggtgcagagcggagccgaggtcgtgaagcctggcgcttccgtgaagattagctgcaaagccagcggctacacctttaccggctactttatgaactgggtcaagcagagccctggccagagcctggaatggatcggcagaatccacccctacgacggcgacaccttctacaaccagaagttccagggcaaggccaccctgacagtggacaagagcagcaacaccgcccacatggaactgctgagcctgaccagcgaggacttcgccgtgtactactgcaccagatacgacggcagccgggctatggactattggggccagggcaccaccgtgaccgtgtctagtacgcgtatccagaaccctgatcctgccgtgtaccagctgcgggatagcaagagcagcgacaagagcgtgtgtctgttcaccgacttcgacagccagaccaacgtgtcccagagcaaggactccgacgtgtacatcaccgataagtgcgtgctggacatgcggagcatggacttcaagagcaactccgccgtggcctggtccaacaagtccgatttcgcctgcgccaacgccttcaacaacagcattatccccgaggacacattcttcccaagccccgagagcagctgcggctttaccagcgagagctaccagcagggcgtgctgagcgccaccatcctgtacgagatcctgctgggcaaggccaccctgtacgccgtgctggtgtctgccctggtgctgatggctatggtcaagcggaaggacagccgggga

SEQ ID NO: 4643 - DNA, 2676 bp, synthetic construct
  source 1..2676: mol_type = other DNA
atggccttaccagtgaccgccttgctcctgccgctggccttgctgctccacgccgccaggccggaagtgcagctggttgaatctggcggaggactggttcagcctggcggatctctgagactgtcttgtgccgccagcggcttcagcttcagcgacttttggatgagctgggtccgacaggcccctggcaaaggacttgaatgggtcgccacaatcagccaggccggcagcgagaaggactacgtggactctgtgaagggcagattcaccatcagccgggacaacgccaagaagtccctgtacctccagatgaacagcctgagagccgaggacaccgccgtgtactattgtgcctctggcgtgtacagcttcgactacagaggccagggcaccctggtcacagtctcttctggtaccggcggaggcggatctggcggcggaggtagcggtggcggaggatctgaattcgacgacgttgtgatgacccagacccccctgagcctgcctgtgacacctggcgaacctgccagcatcagctgtcggagcagccagagcctggtgcacagaaacggcaacacctacctgcactggtatctccagaagcccggccagagccccaagctgctgatccacaaggtgtccaacagattcagcggcgtgcccgacagattctccggcagcggctctggcaccgacttcaccctgaagatcagccgggtggaagccgaggacctgggcgtgtacttctgtagccagagcacccatgtgccccccctgacatttggagccggcaccaagctggaactgaagctcgaggacctgaagaacgtgttcccacctgaggtggccgtgttcgagcctagcgaggccgagatcagccacacccagaaagccaccctcgtgtgcctggctaccggcttctaccccgaccatgtggaactgtcttggtgggtcaacggcaaagaggtgcacagcggcgtgtgtaccgacccccagccactgaaagaacagcccgccctgaacgacagccggtactgcctgagcagcagactgagagtgtccgccaccttctggcagaacccccggaaccacttcagatgccaggtgcagttctacggcctgagcgagaacgacgagtggacccaggacagagccaagcccgtgacccagatcgtgtctgccgaagcctggggcagagccgattgcgacgtgaagctggtggaaaagagcttcgagacagacaccaacctgaacttccagaacctgagcgtgatcggcttcagaatcctgctgctgaaagtggccggctttaacctgctgatgaccctgcggctgtggtccagcagggccaagcgatctggatctggagcaacaaacttctcactactcaaacaagcaggtgacgtggaggagaatcccgggcctactagtatggactggatttggcgcatccttttccttgtcggcgctgctaccggcgcgcattccgggccccagctccagctgcaagagtctggacctggcctggtcaagcctagcgagacactgagcctgacctgtaccgtgtccggcgatagcatcagcagcggcgattactactggggctggatcagacagcctcctggcaaaggactggaatggatcggccacatctactacagcggcgtgacctactacaaccccagcctgaagtccagagtgaccatcagcgtggacaccagccggaaccagttctccctgaagctgtctagcgtgacagccgccgataccgccgtgtactactgcaccagagaggacagcagcaactggcggagtagaggccagggaacactggtcacagttagctctggatccggcggaggcggaagtggaggcggaggatctggcggcggaggctctttcgaagaagtgcagctggtgcagtctggcgctgaggtggaaaagcctggggccagcgtgaagattagctgcaaggccagcggcagcagcttcaccggctacaacatgaactgggtgcgccagaacatcggcaagagcctggaatggatcggagccatcgacccctactacggcggcaccagctacaaccagaagttcaagggcagagccaccctgaccgtggacaagagcaccagcaccgcctacatgcacctgaagtccctgcggagcgaggacaccgccgtgtactactgtgtgtccggcatggaatattggggccagggcaccagcgtgaccgtgtctagtacgcgtatccagaaccctgatcctgccgtgtaccagctgcgggatagcaagagcagcgacaagagcgtgtgtctgttcaccgacttcgacagccagaccaacgtgtcccagagcaaggactccgacgtgtacatcaccgataagtgcgtgctggacatgcggagcatggacttcaagagcaactccgccgtggcctggtccaacaagtccgatttcgcctgcgccaacgccttcaacaacagcattatccccgaggacacattcttcccaagccccgagagcagctgcggctttaccagcgagagctaccagcagggcgtgctgagcgccaccatcctgtacgagatcctgctgggcaaggccaccctgtacgccgtgctggtgtctgccctggtgctgatggctatggtcaagcggaaggacagccgggga

SEQ ID NO: 4644 - DNA, 2670 bp, synthetic construct
  source 1..2670: mol_type = other DNA
atggccttaccagtgaccgccttgctcctgccgctggccttgctgctccacgccgccaggccggaagtgcagctggttgaatctggcggaggactggttcagcctggcggatctctgagactgtcttgtgccgccagcggcttcagcttcagcgacttttggatgagctgggtccgacaggcccctggcaaaggacttgaatgggtcgccacaatcagccaggccggcagcgagaaggactacgtggactctgtgaagggcagattcaccatcagccgggacaacgccaagaagtccctgtacctccagatgaacagcctgagagccgaggacaccgccgtgtactattgtgcctctggcgtgtacagcttcgactacagaggccagggcaccctggtcacagtctcttctggtaccggcggaggcggatctggcggcggaggtagcggtggcggaggatctgaattcgacgagatcgtgatgacccagacccctgccaccctgtctgtgtctgccggcgagagagtgaccattacctgcaaggccagccagagcgtgtccaacgacgtgacctggtatcagcagaagcccggccaggcccccagactgctgatctacagcgccagcaacagatacagcggcgtgcccgccagattttccggcagcggctacggcaccgagttcaccttcaccatcagcagcgtgcagagcgaggacttcgccgtgtacttctgtcagcaagactacagcagcttcggccagggcaccaagctggaaatcaagaggctcgaggacctgaagaacgtgttcccacctgaggtggccgtgttcgagcctagcgaggccgagatcagccacacccagaaagccaccctcgtgtgcctggctaccggcttctaccccgaccatgtggaactgtcttggtgggtcaacggcaaagaggtgcacagcggcgtgtgtaccgacccccagccactgaaagaacagcccgccctgaacgacagccggtactgcctgagcagcagactgagagtgtccgccaccttctggcagaacccccggaaccacttcagatgccaggtgcagttctacggcctgagcgagaacgacgagtggacccaggacagagccaagcccgtgacccagatcgtgtctgccgaagcctggggcagagccgattgcgacgtgaagctggtggaaaagagcttcgagacagacaccaacctgaacttccagaacctgagcgtgatcggcttcagaatcctgctgctgaaagtggccggctttaacctgctgatgaccctgcggctgtggtccagcagggccaagcgatctggatctggagcaacaaacttctcactactcaaacaagcaggtgacgtggaggagaatcccgggcctactagtatggactggatttggcgcatccttttccttgtcggcgctgctaccggcgcgcattccgggccccagctccagctgcaagagtctggacctggcctggtcaagcctagcgagacactgagcctgacctgtaccgtgtccggcgatagcatcagcagcggcgattactactggggctggatcagacagcctcctggcaaaggactggaatggatcggccacatctactacagcggcgtgacctactacaaccccagcctgaagtccagagtgaccatcagcgtggacaccagccggaaccagttctccctgaagctgtctagcgtgacagccgccgataccgccgtgtactactgcaccagagaggacagcagcaactggcggagtagaggccagggaacactggtcacagttagctctggatccggcggaggcggaagtggaggcggaggatctggcggcggaggctctttcgaacaggtgcagctggtggaatctggacctggcgtggtgcagcctggcagaagcctgagaatcagctgtgccgtgtccggcttcagcgtgaccaactacggcgtgcactgggtgcgccagccacctggaaaaggactggaatggctgggcgtgatctgggctggcggcatcaccaactacaacagcgccttcatgtcccggctgaccatctccaaggacaacagcaagaacaccgtgtacctccagatgaacagcctgcgggccgaggacaccgccatgtactactgtgcttccagaggcggccactacggctacgccctggattattggggccagggaaccctcgtgaccgtgtcctctacgcgtatccagaaccctgatcctgccgtgtaccagctgcgggatagcaagagcagcgacaagagcgtgtgtctgttcaccgacttcgacagccagaccaacgtgtcccagagcaaggactccgacgtgtacatcaccgataagtgcgtgctggacatgcggagcatggacttcaagagcaactccgccgtggcctggtccaacaagtccgatttcgcctgcgccaacgccttcaacaacagcattatccccgaggacacattcttcccaagccccgagagcagctgcggctttaccagcgagagctaccagcagggcgtgctgagcgccaccatcctgtacgagatcctgctgggcaaggccaccctgtacgccgtgctggtgtctgccctggtgctgatggctatggtcaagcggaaggacagccgggga

SEQ ID NO: 4645 - DNA, 2676 bp, synthetic construct
  source 1..2676: mol_type = other DNA
atggccttaccagtgaccgccttgctcctgccgctggccttgctgctccacgccgccaggccggaagtgcagctggttgaatctggcggaggactggttcagcctggcggatctctgagactgtcttgtgccgccagcggcttcagcttcagcgacttttggatgagctgggtccgacaggcccctggcaaaggacttgaatgggtcgccacaatcagccaggccggcagcgagaaggactacgtggactctgtgaagggcagattcaccatcagccgggacaacgccaagaagtccctgtacctccagatgaacagcctgagagccgaggacaccgccgtgtactattgtgcctctggcgtgtacagcttcgactacagaggccagggcaccctggtcacagtctcttctggtaccggcggaggcggatctggcggcggaggtagcggtggcggaggatctgaattcgacatccagatgacccagaccgccagcagcctgcctgcctctctgggcgacagagtgaccatctcctgtagcgccagccaggacatcagcaactacctgaactggtatcagcagaaacccgacggcaccgtgaagctgctgatcttctacagcagcaacctgcacagcggcgtgcccagcagattttctggcggcggaagcggcaccgactacagcctgaccatcagcaatctggaacccgaggacattgccacctacttttgccaccagtacagcaagctgccctggacctttggcggaggcaccaagctggaaatcaagagactcgaggacctgaagaacgtgttcccacctgaggtggccgtgttcgagcctagcgaggccgagatcagccacacccagaaagccaccctcgtgtgcctggctaccggcttctaccccgaccatgtggaactgtcttggtgggtcaacggcaaagaggtgcacagcggcgtgtgtaccgacccccagccactgaaagaacagcccgccctgaacgacagccggtactgcctgagcagcagactgagagtgtccgccaccttctggcagaacccccggaaccacttcagatgccaggtgcagttctacggcctgagcgagaacgacgagtggacccaggacagagccaagcccgtgacccagatcgtgtctgccgaagcctggggcagagccgattgcgacgtgaagctggtggaaaagagcttcgagacagacaccaacctgaacttccagaacctgagcgtgatcggcttcagaatcctgctgctgaaagtggccggctttaacctgctgatgaccctgcggctgtggtccagcagggccaagcgatctggatctggagcaacaaacttctcactactcaaacaagcaggtgacgtggaggagaatcccgggcctactagtatggactggatttggcgcatccttttccttgtcggcgctgctaccggcgcgcattccgggccccagctccagctgcaagagtctggacctggcctggtcaagcctagcgagacactgagcctgacctgtaccgtgtccggcgatagcatcagcagcggcgattactactggggctggatcagacagcctcctggcaaaggactggaatggatcggccacatctactacagcggcgtgacctactacaaccccagcctgaagtccagagtgaccatcagcgtggacaccagccggaaccagttctccctgaagctgtctagcgtgacagccgccgataccgccgtgtactactgcaccagagaggacagcagcaactggcggagtagaggccagggaacactggtcacagttagctctggatccggcggaggcggaagtggaggcggaggatctggcggcggaggctctttcgaagaagtgaccctggtggaaagcggcggagacttcgtgaagcctggcggctctctgaaggtgtcctgtgccgccagcggcttcgcctttagccactacgccatgagctgggtgcgccagacccctgccaagagactggaatgggtggcctacatcagcagcggcggctccggcacctactactccgatagcgtgaagggccggttcaccatcagccgggacaacgccaagaacaccctgtacctccagatgcggagcctgcggagcgaggacagcgccatgtatttctgcaccagagtgaagctgggcacctattacttcgactcttggggccagggcaccaccctgaccgtgtcatctacgcgtatccagaaccctgatcctgccgtgtaccagctgcgggatagcaagagcagcgacaagagcgtgtgtctgttcaccgacttcgacagccagaccaacgtgtcccagagcaaggactccgacgtgtacatcaccgataagtgcgtgctggacatgcggagcatggacttcaagagcaactccgccgtggcctggtccaacaagtccgatttcgcctgcgccaacgccttcaacaacagcattatccccgaggacacattcttcccaagccccgagagcagctgcggctttaccagcgagagctaccagcagggcgtgctgagcgccaccatcctgtacgagatcctgctgggcaaggccaccctgtacgccgtgctggtgtctgccctggtgctgatggctatggtcaagcggaaggacagccgggga

SEQ ID NO: 4646 - DNA, 2682 bp, synthetic construct
  source 1..2682: mol_type = other DNA
atggccttaccagtgaccgccttgctcctgccgctggccttgctgctccacgccgccaggccggaagtgcagctggttgaatctggcggaggactggttcagcctggcggatctctgagactgtcttgtgccgccagcggcttcagcttcagcgacttttggatgagctgggtccgacaggcccctggcaaaggacttgaatgggtcgccacaatcagccaggccggcagcgagaaggactacgtggactctgtgaagggcagattcaccatcagccgggacaacgccaagaagtccctgtacctccagatgaacagcctgagagccgaggacaccgccgtgtactattgtgcctctggcgtgtacagcttcgactacagaggccagggcaccctggtcacagtctcttctggtaccggcggaggcggatctggcggcggaggtagcggtggcggaggatctgaattccagttcgtgctgacccagagcccttctgcctctgctgccctgggagcctctgccaagctgacctgtacactgagcagcgcccacaagacctacaccatcgactggtatcagcagcagaagggaaaggcccccagatacctgatccaagtgaagtccgacggcacctacacaaaggccaccggcgtgcccgatagattcagcggcagtagcagcggagccgatagatacctgattatccccagcgtgcaggccgacgacgaggccgattactactgcggcaccgattacaccggcggctacgtgttcggcggaggcacacaactgaccgtgacactcgaggacctgaagaacgtgttcccacctgaggtggccgtgttcgagcctagcgaggccgagatcagccacacccagaaagccaccctcgtgtgcctggctaccggcttctaccccgaccatgtggaactgtcttggtgggtcaacggcaaagaggtgcacagcggcgtgtgtaccgacccccagccactgaaagaacagcccgccctgaacgacagccggtactgcctgagcagcagactgagagtgtccgccaccttctggcagaacccccggaaccacttcagatgccaggtgcagttctacggcctgagcgagaacgacgagtggacccaggacagagccaagcccgtgacccagatcgtgtctgccgaagcctggggcagagccgattgcgacgtgaagctggtggaaaagagcttcgagacagacaccaacctgaacttccagaacctgagcgtgatcggcttcagaatcctgctgctgaaagtggccggctttaacctgctgatgaccctgcggctgtggtccagcagggccaagcgatctggatctggagcaacaaacttctcactactcaaacaagcaggtgacgtggaggagaatcccgggcctactagtatggactggatttggcgcatccttttccttgtcggcgctgctaccggcgcgcattccgggccccagctccagctgcaagagtctggacctggcctggtcaagcctagcgagacactgagcctgacctgtaccgtgtccggcgatagcatcagcagcggcgattactactggggctggatcagacagcctcctggcaaaggactggaatggatcggccacatctactacagcggcgtgacctactacaaccccagcctgaagtccagagtgaccatcagcgtggacaccagccggaaccagttctccctgaagctgtctagcgtgacagccgccgataccgccgtgtactactgcaccagagaggacagcagcaactggcggagtagaggccagggaacactggtcacagttagctctggatccggcggaggcggaagtggaggcggaggatctggcggcggaggctctttcgaagagcaactgaaagagtctggcggcggactgttcaagcccaccgataccctgaccctgacctgcaccgtgtccggcttcagcctgagctactacggcgtgaactgggtgcgccaggcccctggcaatggcctggaatggatcggcacaatcggcggcagcggcgacacctactatgcctcttgggccaagtccagaagcaccatcatcagaaacaccaacgagaacaccgtgaccctgaagatgaccagcctgacagccgccgacaccgccacctacttttgcgtcagatacgccaacatcggctacgagtatttcaacgtgtggggacccggcaccctcgtgaccgtgtcatctacgcgtatccagaaccctgatcctgccgtgtaccagctgcgggatagcaagagcagcgacaagagcgtgtgtctgttcaccgacttcgacagccagaccaacgtgtcccagagcaaggactccgacgtgtacatcaccgataagtgcgtgctggacatgcggagcatggacttcaagagcaactccgccgtggcctggtccaacaagtccgatttcgcctgcgccaacgccttcaacaacagcattatccccgaggacacattcttcccaagccccgagagcagctgcggctttaccagcgagagctaccagcagggcgtgctgagcgccaccatcctgtacgagatcctgctgggcaaggccaccctgtacgccgtgctggtgtctgccctggtgctgatggctatggtcaagcggaaggacagccgggga

SEQ ID NO: 4647 - DNA, 2697 bp, synthetic construct
  source 1..2697: mol_type = other DNA
atggccttaccagtgaccgccttgctcctgccgctggccttgctgctccacgccgccaggccggaagtgcagctggttgaatctggcggaggactggttcagcctggcggatctctgagactgtcttgtgccgccagcggcttcagcttcagcgacttttggatgagctgggtccgacaggcccctggcaaaggacttgaatgggtcgccacaatcagccaggccggcagcgagaaggactacgtggactctgtgaagggcagattcaccatcagccgggacaacgccaagaagtccctgtacctccagatgaacagcctgagagccgaggacaccgccgtgtactattgtgcctctggcgtgtacagcttcgactacagaggccagggcaccctggtcacagtctcttctggtaccggcggaggcggatctggcggcggaggtagcggtggcggaggatctgaattccagttcgtgctgacccagagcccttctgtgtctgccgccctgggagcctctgccaagctgacctgtacactgagcagcgcccacaagacctacaccatcgactggtatcagcagcagcagggcgaggcccccagatacctgatgcaagtgaagtccgacggcagctacaccaagggcaccggcgtgcccgatagattcagcggcagtagcagcggagccgatagatacctgattatccccagcgtgcaggccgacgacgaggccggatatgtgtgcggcgctgacgacaatggcggctacgtgttcggcggaggcacccaactgacagtgacactcgaggacctgaagaacgtgttcccacctgaggtggccgtgttcgagcctagcgaggccgagatcagccacacccagaaagccaccctcgtgtgcctggctaccggcttctaccccgaccatgtggaactgtcttggtgggtcaacggcaaagaggtgcacagcggcgtgtgtaccgacccccagccactgaaagaacagcccgccctgaacgacagccggtactgcctgagcagcagactgagagtgtccgccaccttctggcagaacccccggaaccacttcagatgccaggtgcagttctacggcctgagcgagaacgacgagtggacccaggacagagccaagcccgtgacccagatcgtgtctgccgaagcctggggcagagccgattgcgacgtgaagctggtggaaaagagcttcgagacagacaccaacctgaacttccagaacctgagcgtgatcggcttcagaatcctgctgctgaaagtggccggctttaacctgctgatgaccctgcggctgtggtccagcagggccaagcgatctggatctggagcaacaaacttctcactactcaaacaagcaggtgacgtggaggagaatcccgggcctactagtatggactggatttggcgcatccttttccttgtcggcgctgctaccggcgcgcattccgggccccagctccagctgcaagagtctggacctggcctggtcaagcctagcgagacactgagcctgacctgtaccgtgtccggcgatagcatcagcagcggcgattactactggggctggatcagacagcctcctggcaaaggactggaatggatcggccacatctactacagcggcgtgacctactacaaccccagcctgaagtccagagtgaccatcagcgtggacaccagccggaaccagttctccctgaagctgtctagcgtgacagccgccgataccgccgtgtactactgcaccagagaggacagcagcaactggcggagtagaggccagggaacactggtcacagttagctctggatccggcggaggcggaagtggaggcggaggatctggcggcggaggctctttcgaacagagcgtgaaagagtctgagggcggcctgttcaagcccaccgataccctgaccctgacctgcaccgtgtccggcttcagcctgagcagacacgccctgacatgggtgcgccaggcccctggaaatggcctggaatggatcggagccatcgacaacgccggcaccacctactatgcctcttgggccaagtccagaagcaccatcacccggaacaccgacctgcacaccgtgaccctgaagatgaccagcctgaccgccagcgacaccgccacctacttttgcgccagagtgttctacgacatcaacagcggctactacctggacggcatggacctgtggggacctggcacacttgtgaccgtgtccagcacgcgtatccagaaccctgatcctgccgtgtaccagctgcgggatagcaagagcagcgacaagagcgtgtgtctgttcaccgacttcgacagccagaccaacgtgtcccagagcaaggactccgacgtgtacatcaccgataagtgcgtgctggacatgcggagcatggacttcaagagcaactccgccgtggcctggtccaacaagtccgatttcgcctgcgccaacgccttcaacaacagcattatccccgaggacacattcttcccaagccccgagagcagctgcggctttaccagcgagagctaccagcagggcgtgctgagcgccaccatcctgtacgagatcctgctgggcaaggccaccctgtacgccgtgctggtgtctgccctggtgctgatggctatggtcaagcggaaggacagccgggga

SEQ ID NO: 4648 - DNA, 2679 bp, synthetic construct
  source 1..2679: mol_type = other DNA
atggccttaccagtgaccgccttgctcctgccgctggccttgctgctccacgccgccaggccggaagtgcagctggttgaatctggcggaggactggttcagcctggcggatctctgagactgtcttgtgccgccagcggcttcagcttcagcgacttttggatgagctgggtccgacaggcccctggcaaaggacttgaatgggtcgccacaatcagccaggccggcagcgagaaggactacgtggactctgtgaagggcagattcaccatcagccgggacaacgccaagaagtccctgtacctccagatgaacagcctgagagccgaggacaccgccgtgtactattgtgcctctggcgtgtacagcttcgactacagaggccagggcaccctggtcacagtctcttctggtaccggcggaggcggatctggcggcggaggtagcggtggcggaggatctgaattcgacatccagatgacccagagccccagcagcctgtctgccagcgtgggcgacagagtgaccatcacctgtagagccagccagggcatcagctcttggctggcctggtatcagcagaagcccgagaaggcccccaagagcctgatctacgccgcctctagtctccagagcggcgtgcccagcagattttctggcagcggctccggcaccgacttcaccctgacaatcagctccctccagcccgaggacttcgccacctactactgccagcagtacaacagctacccccccacctttggcggaggcaccaaggtggaaatcaagctcgaggacctgaagaacgtgttcccacctgaggtggccgtgttcgagcctagcgaggccgagatcagccacacccagaaagccaccctcgtgtgcctggctaccggcttctaccccgaccatgtggaactgtcttggtgggtcaacggcaaagaggtgcacagcggcgtgtgtaccgacccccagccactgaaagaacagcccgccctgaacgacagccggtactgcctgagcagcagactgagagtgtccgccaccttctggcagaacccccggaaccacttcagatgccaggtgcagttctacggcctgagcgagaacgacgagtggacccaggacagagccaagcccgtgacccagatcgtgtctgccgaagcctggggcagagccgattgcgacgtgaagctggtggaaaagagcttcgagacagacaccaacctgaacttccagaacctgagcgtgatcggcttcagaatcctgctgctgaaagtggccggctttaacctgctgatgaccctgcggctgtggtccagcagggccaagcgatctggatctggagcaacaaacttctcactactcaaacaagcaggtgacgtggaggagaatcccgggcctactagtatggactggatttggcgcatccttttccttgtcggcgctgctaccggcgcgcattccgggccccagctccagctgcaagagtctggacctggcctggtcaagcctagcgagacactgagcctgacctgtaccgtgtccggcgatagcatcagcagcggcgattactactggggctggatcagacagcctcctggcaaaggactggaatggatcggccacatctactacagcggcgtgacctactacaaccccagcctgaagtccagagtgaccatcagcgtggacaccagccggaaccagttctccctgaagctgtctagcgtgacagccgccgataccgccgtgtactactgcaccagagaggacagcagcaactggcggagtagaggccagggaacactggtcacagttagctctggatccggcggaggcggaagtggaggcggaggatctggcggcggaggctctttcgaagaagtgcaactggtggaatcaggcggcggactggtgcagcctggcgagtctctgagactgagctgtgtggcctccggcttcaccttcagccggtacaagatgaactgggtgcgccaggcccctggcaagggactggaatgggtgtcctacatcagccgcagcggcagagacatctactacgccgacagcgtgaagggccggttcaccatcagcagagacaacgccaagaacagcctgtacctccagatgaactccctgcgggacgaggacaccgccgtgtactactgtgccggaaccgtgaccacctattactacttcggcatggacgtgtggggccacggcaccaccgtgacagtgtcatctacgcgtatccagaaccctgatcctgccgtgtaccagctgcgggatagcaagagcagcgacaagagcgtgtgtctgttcaccgacttcgacagccagaccaacgtgtcccagagcaaggactccgacgtgtacatcaccgataagtgcgtgctggacatgcggagcatggacttcaagagcaactccgccgtggcctggtccaacaagtccgatttcgcctgcgccaacgccttcaacaacagcattatccccgaggacacattcttcccaagccccgagagcagctgcggctttaccagcgagagctaccagcagggcgtgctgagcgccaccatcctgtacgagatcctgctgggcaaggccaccctgtacgccgtgctggtgtctgccctggtgctgatggctatggtcaagcggaaggacagccgggga

SEQ ID NO: 4649 - DNA, 2682 bp, synthetic construct
  source 1..2682: mol_type = other DNA
atggccttaccagtgaccgccttgctcctgccgctggccttgctgctccacgccgccaggccggaagtgcagctggttgaatctggcggaggactggttcagcctggcggatctctgagactgtcttgtgccgccagcggcttcagcttcagcgacttttggatgagctgggtccgacaggcccctggcaaaggacttgaatgggtcgccacaatcagccaggccggcagcgagaaggactacgtggactctgtgaagggcagattcaccatcagccgggacaacgccaagaagtccctgtacctccagatgaacagcctgagagccgaggacaccgccgtgtactattgtgcctctggcgtgtacagcttcgactacagaggccagggcaccctggtcacagtctcttctggtaccggcggaggcggatctggcggcggaggtagcggtggcggaggatctgaattcgacatccagatgacccagagccccagcagcctgtctgccagcgtgggcgacagagtgaccatcacctgtagagccagccagggcatcagctcttggctggcctggtatcagcagaagcccgagaaggcccccaagagcctgatctacgccgcctctagtctccagagcggcgtgcccagcagattttctggcagcggctccggcaccgacttcaccctgacaatcagctccctccagcccgaggacttcgccacctactactgccagcagtacaacagctaccctcccacctttggcggaggcaccaaggtggaaatcaagctcgaggacctgaagaacgtgttcccacctgaggtggccgtgttcgagcctagcgaggccgagatcagccacacccagaaagccaccctcgtgtgcctggctaccggcttctaccccgaccatgtggaactgtcttggtgggtcaacggcaaagaggtgcacagcggcgtgtgtaccgacccccagccactgaaagaacagcccgccctgaacgacagccggtactgcctgagcagcagactgagagtgtccgccaccttctggcagaacccccggaaccacttcagatgccaggtgcagttctacggcctgagcgagaacgacgagtggacccaggacagagccaagcccgtgacccagatcgtgtctgccgaagcctggggcagagccgattgcgacgtgaagctggtggaaaagagcttcgagacagacaccaacctgaacttccagaacctgagcgtgatcggcttcagaatcctgctgctgaaagtggccggctttaacctgctgatgaccctgcggctgtggtccagcagggccaagcgatctggatctggagcaacaaacttctcactactcaaacaagcaggtgacgtggaggagaatcccgggcctactagtatggactggatttggcgcatccttttccttgtcggcgctgctaccggcgcgcattccgggccccagctccagctgcaagagtctggacctggcctggtcaagcctagcgagacactgagcctgacctgtaccgtgtccggcgatagcatcagcagcggcgattactactggggctggatcagacagcctcctggcaaaggactggaatggatcggccacatctactacagcggcgtgacctactacaaccccagcctgaagtccagagtgaccatcagcgtggacaccagccggaaccagttctccctgaagctgtctagcgtgacagccgccgataccgccgtgtactactgcaccagagaggacagcagcaactggcggagtagaggccagggaacactggtcacagttagctctggatccggcggaggcggaagtggaggcggaggatctggcggcggaggctctttcgaagaagtgcaactggtggaatccgggggaggctctgtgcagcctggcgagtctctgagactgagctgtgtggcctccggcttcaccttcagccggtacaagatgaactgggtgcgccaggcccctggcaagggactggaatgggtgtcctacatcagccgcagcggcagagacatctactacgccgacagcgtgaagggccggttcaccatcagcagagacaacgccaagaacagcctgtacctccagatgaactccctgcgggacgaggacaccgccgtgtactactgtgccggaaccgtgaccacctattactacgacttcggcatggacgtgtggggccagggcacaaccgtgacagtgtctagcacgcgtatccagaaccctgatcctgccgtgtaccagctgcgggatagcaagagcagcgacaagagcgtgtgtctgttcaccgacttcgacagccagaccaacgtgtcccagagcaaggactccgacgtgtacatcaccgataagtgcgtgctggacatgcggagcatggacttcaagagcaactccgccgtggcctggtccaacaagtccgatttcgcctgcgccaacgccttcaacaacagcattatccccgaggacacattcttcccaagccccgagagcagctgcggctttaccagcgagagctaccagcagggcgtgctgagcgccaccatcctgtacgagatcctgctgggcaaggccaccctgtacgccgtgctggtgtctgccctggtgctgatggctatggtcaagcggaaggacagccgggga

SEQ ID NO: 4650 - DNA, 2676 bp, synthetic construct
  source 1..2676: mol_type = other DNA
atggccttaccagtgaccgccttgctcctgccgctggccttgctgctccacgccgccaggccggaagtgcagctggttgaatctggcggaggactggttcagcctggcggatctctgagactgtcttgtgccgccagcggcttcagcttcagcgacttttggatgagctgggtccgacaggcccctggcaaaggacttgaatgggtcgccacaatcagccaggccggcagcgagaaggactacgtggactctgtgaagggcagattcaccatcagccgggacaacgccaagaagtccctgtacctccagatgaacagcctgagagccgaggacaccgccgtgtactattgtgcctctggcgtgtacagcttcgactacagaggccagggcaccctggtcacagtctcttctggtaccggcggaggcggatctggcggcggaggtagcggtggcggaggatctgaattccagtctgtgctgacacagcctccatctgcctctggcacacctggacagagagtgaccatcagctgtagcggcagcagaagcaacgtcggcggcaactacgtgttctggtatcagcaggtcccaggcgctacccctaagctgctgatctacagaagcaatcagcggcctagcggcgtgcccgatagatttgccggaagcaagagcggcagctctgccagccttgccatctctggactgagaagcgaggacgaggccgactactactgtgccacctgggatgatagcctgagcggcttcgtgtttggcaccggcaccaaagtgacagtgcttggtctcgaggacctgaagaacgtgttcccacctgaggtggccgtgttcgagcctagcgaggccgagatcagccacacccagaaagccaccctcgtgtgcctggctaccggcttctaccccgaccatgtggaactgtcttggtgggtcaacggcaaagaggtgcacagcggcgtgtgtaccgacccccagccactgaaagaacagcccgccctgaacgacagccggtactgcctgagcagcagactgagagtgtccgccaccttctggcagaacccccggaaccacttcagatgccaggtgcagttctacggcctgagcgagaacgacgagtggacccaggacagagccaagcccgtgacccagatcgtgtctgccgaagcctggggcagagccgattgcgacgtgaagctggtggaaaagagcttcgagacagacaccaacctgaacttccagaacctgagcgtgatcggcttcagaatcctgctgctgaaagtggccggctttaacctgctgatgaccctgcggctgtggtccagcagggccaagcgatctggatctggagcaacaaacttctcactactcaaacaagcaggtgacgtggaggagaatcccgggcctactagtatggactggatttggcgcatccttttccttgtcggcgctgctaccggcgcgcattccgggccccagctccagctgcaagagtctggacctggcctggtcaagcctagcgagacactgagcctgacctgtaccgtgtccggcgatagcatcagcagcggcgattactactggggctggatcagacagcctcctggcaaaggactggaatggatcggccacatctactacagcggcgtgacctactacaaccccagcctgaagtccagagtgaccatcagcgtggacaccagccggaaccagttctccctgaagctgtctagcgtgacagccgccgataccgccgtgtactactgcaccagagaggacagcagcaactggcggagtagaggccagggaacactggtcacagttagctctggatccggcggaggcggaagtggaggcggaggatctggcggcggaggctctttcgaagttcagctggttgaatctggcggcggactggttaagcctggcggatctctgagactgtcttgtgccgccagcggcttcaccttcagcgattactacatgagctggatcagacaggcccctggcaaaggactggaatgggtgtcctacatcagcagcagcggctccaccatctactacgccgatagcgtgaagggcagattcaccatcagccgggacaacgccaagaacagcctgtacctccagatgaactccctgagagccgaggacaccgccgtgtactattgcgccagaggctacggcaaagcctacgatcaatggggccagggcacactggtcaccgtttcttctacgcgtatccagaaccctgatcctgccgtgtaccagctgcgggatagcaagagcagcgacaagagcgtgtgtctgttcaccgacttcgacagccagaccaacgtgtcccagagcaaggactccgacgtgtacatcaccgataagtgcgtgctggacatgcggagcatggacttcaagagcaactccgccgtggcctggtccaacaagtccgatttcgcctgcgccaacgccttcaacaacagcattatccccgaggacacattcttcccaagccccgagagcagctgcggctttaccagcgagagctaccagcagggcgtgctgagcgccaccatcctgtacgagatcctgctgggcaaggccaccctgtacgccgtgctggtgtctgccctggtgctgatggctatggtcaagcggaaggacagccgggga

SEQ ID NO: 4651 - DNA, 2673 bp, synthetic construct
  source 1..2673: mol_type = other DNA
atggccttaccagtgaccgccttgctcctgccgctggccttgctgctccacgccgccaggccggaagtgcagctggttgaatctggcggaggactggttcagcctggcggatctctgagactgtcttgtgccgccagcggcttcagcttcagcgacttttggatgagctgggtccgacaggcccctggcaaaggacttgaatgggtcgccacaatcagccaggccggcagcgagaaggactacgtggactctgtgaagggcagattcaccatcagccgggacaacgccaagaagtccctgtacctccagatgaacagcctgagagccgaggacaccgccgtgtactattgtgcctctggcgtgtacagcttcgactacagaggccagggcaccctggtcacagtctcttctggtaccggcggaggcggatctggcggcggaggtagcggtggcggaggatctgaattccagtctgtggtcacacagccacctagcatgtctgccgctccaggccagcaagtgaccatctcttgtagcggcggcaacagcaacatcgagcggaactacgtgtcctggtatctgcaactgcctggcacagcccctaagctggtcatcttcgacaacgacagacggcccagcggcatccccgatagattttctggcagcaagagcggcaccagcgccacactgggaattaccggacttcagacaggcgacgaggccgactactactgtggcacatgggactctagcctgagaggctgggttttcggcggaggcacaaagctgacagtgcttggtctcgaggacctgaagaacgtgttcccacctgaggtggccgtgttcgagcctagcgaggccgagatcagccacacccagaaagccaccctcgtgtgcctggctaccggcttctaccccgaccatgtggaactgtcttggtgggtcaacggcaaagaggtgcacagcggcgtgtgtaccgacccccagccactgaaagaacagcccgccctgaacgacagccggtactgcctgagcagcagactgagagtgtccgccaccttctggcagaacccccggaaccacttcagatgccaggtgcagttctacggcctgagcgagaacgacgagtggacccaggacagagccaagcccgtgacccagatcgtgtctgccgaagcctggggcagagccgattgcgacgtgaagctggtggaaaagagcttcgagacagacaccaacctgaacttccagaacctgagcgtgatcggcttcagaatcctgctgctgaaagtggccggctttaacctgctgatgaccctgcggctgtggtccagcagggccaagcgatctggatctggagcaacaaacttctcactactcaaacaagcaggtgacgtggaggagaatcccgggcctactagtatggactggatttggcgcatccttttccttgtcggcgctgctaccggcgcgcattccgggccccagctccagctgcaagagtctggacctggcctggtcaagcctagcgagacactgagcctgacctgtaccgtgtccggcgatagcatcagcagcggcgattactactggggctggatcagacagcctcctggcaaaggactggaatggatcggccacatctactacagcggcgtgacctactacaaccccagcctgaagtccagagtgaccatcagcgtggacaccagccggaaccagttctccctgaagctgtctagcgtgacagccgccgataccgccgtgtactactgcaccagagaggacagcagcaactggcggagtagaggccagggaacactggtcacagttagctctggatccggcggaggcggaagtggaggcggaggatctggcggcggaggctctttcgaagtgcagctcgttgagtctggcggcggactgattcaacctggcggaagcctgagactgagctgtgccgcttccggcttcaccttcagcaactacgccatgaactgggttcgacaggcccctggcaaaggactggaatgggtgtccaccatcaacggcagaggcagcagcaccatctacgccgattctgtgaagggcagattcaccatcagccgggacaacagcaagaacaccctgtacctccagatgaactccctgagagccgaggacaccgccacctattactgtgcccggtacatcagcagaggactgggcgattcttggggccagggcacactggttacagtgacgcgtatccagaaccctgatcctgccgtgtaccagctgcgggatagcaagagcagcgacaagagcgtgtgtctgttcaccgacttcgacagccagaccaacgtgtcccagagcaaggactccgacgtgtacatcaccgataagtgcgtgctggacatgcggagcatggacttcaagagcaactccgccgtggcctggtccaacaagtccgatttcgcctgcgccaacgccttcaacaacagcattatccccgaggacacattcttcccaagccccgagagcagctgcggctttaccagcgagagctaccagcagggcgtgctgagcgccaccatcctgtacgagatcctgctgggcaaggccaccctgtacgccgtgctggtgtctgccctggtgctgatggctatggtcaagcggaaggacagccgggga

SEQ ID NO: 4652 - DNA, 2676 bp, synthetic construct
  source 1..2676: mol_type = other DNA
atggccttaccagtgaccgccttgctcctgccgctggccttgctgctccacgccgccaggccggaagtgcagctggttgaatctggcggaggactggttcagcctggcggatctctgagactgtcttgtgccgccagcggcttcagcttcagcgacttttggatgagctgggtccgacaggcccctggcaaaggacttgaatgggtcgccacaatcagccaggccggcagcgagaaggactacgtggactctgtgaagggcagattcaccatcagccgggacaacgccaagaagtccctgtacctccagatgaacagcctgagagccgaggacaccgccgtgtactattgtgcctctggcgtgtacagcttcgactacagaggccagggcaccctggtcacagtctcttctggtaccggcggaggcggatctggcggcggaggtagcggtggcggaggatctgaattcgacgtcgtgatgacccagacccctctgagcctgcctgtgtccctgggcgatcaggccagcatcagctgtagaagcagccagagcctggtgcacagcaacggcaacacctacctgcactggtatctccagaagcccggccagagccccaagctgctgatctacaaggtgtccaacagattcagcggcgtgcccgacagattctccggcagcggctctggcaccgacttcaccctgaagatcagccgggtggaagccgaggacctgggcgtgtacttctgtagccagaacacccccgtgccccccaagtttggcagcggcaccaagctggaaatcaagctcgaggacctgaagaacgtgttcccacctgaggtggccgtgttcgagcctagcgaggccgagatcagccacacccagaaagccaccctcgtgtgcctggctaccggcttctaccccgaccatgtggaactgtcttggtgggtcaacggcaaagaggtgcacagcggcgtgtgtaccgacccccagccactgaaagaacagcccgccctgaacgacagccggtactgcctgagcagcagactgagagtgtccgccaccttctggcagaacccccggaaccacttcagatgccaggtgcagttctacggcctgagcgagaacgacgagtggacccaggacagagccaagcccgtgacccagatcgtgtctgccgaagcctggggcagagccgattgcgacgtgaagctggtggaaaagagcttcgagacagacaccaacctgaacttccagaacctgagcgtgatcggcttcagaatcctgctgctgaaagtggccggctttaacctgctgatgaccctgcggctgtggtccagcagggccaagcgatctggatctggagcaacaaacttctcactactcaaacaagcaggtgacgtggaggagaatcccgggcctactagtatggactggatttggcgcatccttttccttgtcggcgctgctaccggcgcgcattccgggccccagctccagctgcaagagtctggacctggcctggtcaagcctagcgagacactgagcctgacctgtaccgtgtccggcgatagcatcagcagcggcgattactactggggctggatcagacagcctcctggcaaaggactggaatggatcggccacatctactacagcggcgtgacctactacaaccccagcctgaagtccagagtgaccatcagcgtggacaccagccggaaccagttctccctgaagctgtctagcgtgacagccgccgataccgccgtgtactactgcaccagagaggacagcagcaactggcggagtagaggccagggaacactggtcacagttagctctggatccggcggaggcggaagtggaggcggaggatctggcggcggaggctctttcgaacaggtgcagctccagcagtctggcgctgaactcgtgcggcctggcgcttctgtgaagctgtcttgcaaggccagcggctacaccttcaacgactacgagatgcactgggtcaagcagacccctgtgcacggcctgaagtggatcggagccctggaacccaagaccggcgataccgcctacagccagaagttcaagggcaaggccaccctgaccgccgacaagagcagcagcacagcctacatggaactgcggagcctgaccagcgaggacagcgccgtgtactactgcaccagctgctactactacacctacagcggccagggcaccctcgtgacagtgtctgctacgcgtatccagaaccctgatcctgccgtgtaccagctgcgggatagcaagagcagcgacaagagcgtgtgtctgttcaccgacttcgacagccagaccaacgtgtcccagagcaaggactccgacgtgtacatcaccgataagtgcgtgctggacatgcggagcatggacttcaagagcaactccgccgtggcctggtccaacaagtccgatttcgcctgcgccaacgccttcaacaacagcattatccccgaggacacattcttcccaagccccgagagcagctgcggctttaccagcgagagctaccagcagggcgtgctgagcgccaccatcctgtacgagatcctgctgggcaaggccaccctgtacgccgtgctggtgtctgccctggtgctgatggctatggtcaagcggaaggacagccgggga

SEQ ID NO: 4653 - DNA, 2673 bp, synthetic construct
  source 1..2673: mol_type = other DNA
atggccttaccagtgaccgccttgctcctgccgctggccttgctgctccacgccgccaggccggaagtgcagctggttgaatctggcggaggactggttcagcctggcggatctctgagactgtcttgtgccgccagcggcttcagcttcagcgacttttggatgagctgggtccgacaggcccctggcaaaggacttgaatgggtcgccacaatcagccaggccggcagcgagaaggactacgtggactctgtgaagggcagattcaccatcagccgggacaacgccaagaagtccctgtacctccagatgaacagcctgagagccgaggacaccgccgtgtactattgtgcctctggcgtgtacagcttcgactacagaggccagggcaccctggtcacagtctcttctggtaccggcggaggcggatctggcggcggaggtagcggtggcggaggatctgaattcgacatccaactgacccagagccccagcagcctgtctgcctctgtgggcgacagagtgaccatcacctgtagagccagccagggcatcagaaacgacctgggctggtatcagcagaagcccggcaaggcccccaagcggctgatctatgctgccagctccctccagaatggcgtgcccagcagattttccggcagcggctctggcaccgagttcaccctgaccatcagctccctccagcccgaggacttcgccacctactactgcctccagcacaacacctaccccgccttcggccagggcaccaaggtggaaatcaagagactcgaggacctgaagaacgtgttcccacctgaggtggccgtgttcgagcctagcgaggccgagatcagccacacccagaaagccaccctcgtgtgcctggctaccggcttctaccccgaccatgtggaactgtcttggtgggtcaacggcaaagaggtgcacagcggcgtgtgtaccgacccccagccactgaaagaacagcccgccctgaacgacagccggtactgcctgagcagcagactgagagtgtccgccaccttctggcagaacccccggaaccacttcagatgccaggtgcagttctacggcctgagcgagaacgacgagtggacccaggacagagccaagcccgtgacccagatcgtgtctgccgaagcctggggcagagccgattgcgacgtgaagctggtggaaaagagcttcgagacagacaccaacctgaacttccagaacctgagcgtgatcggcttcagaatcctgctgctgaaagtggccggctttaacctgctgatgaccctgcggctgtggtccagcagggccaagcgatctggatctggagcaacaaacttctcactactcaaacaagcaggtgacgtggaggagaatcccgggcctactagtatggactggatttggcgcatccttttccttgtcggcgctgctaccggcgcgcattccgggccccagctccagctgcaagagtctggacctggcctggtcaagcctagcgagacactgagcctgacctgtaccgtgtccggcgatagcatcagcagcggcgattactactggggctggatcagacagcctcctggcaaaggactggaatggatcggccacatctactacagcggcgtgacctactacaaccccagcctgaagtccagagtgaccatcagcgtggacaccagccggaaccagttctccctgaagctgtctagcgtgacagccgccgataccgccgtgtactactgcaccagagaggacagcagcaactggcggagtagaggccagggaacactggtcacagttagctctggatccggcggaggcggaagtggaggcggaggatctggcggcggaggctctttcgaacaggtgcaactccaggaatctggccctggcctcgtgaagcctagccagaccctgagcctgacctgtaccgtgtctggcggcagcatcagcagcttcaactactactggtcctggatcagacaccaccctggcaagggcctggaatggatcggctacatctactacagcggcagcacctacagcaaccccagcctgaagtcccgcgtgaccatctccgtggacaccagcaagaaccagtttagcctgaccctgtccagcgtgacagccgccgataccgccgtgtactactgcgccagaggctacaactggaactacttcgactactggggccagggaaccctcgtgaccgtgtctagtacgcgtatccagaaccctgatcctgccgtgtaccagctgcgggatagcaagagcagcgacaagagcgtgtgtctgttcaccgacttcgacagccagaccaacgtgtcccagagcaaggactccgacgtgtacatcaccgataagtgcgtgctggacatgcggagcatggacttcaagagcaactccgccgtggcctggtccaacaagtccgatttcgcctgcgccaacgccttcaacaacagcattatccccgaggacacattcttcccaagccccgagagcagctgcggctttaccagcgagagctaccagcagggcgtgctgagcgccaccatcctgtacgagatcctgctgggcaaggccaccctgtacgccgtgctggtgtctgccctggtgctgatggctatggtcaagcggaaggacagccgggga

SEQ ID NO: 4654 - DNA, 2679 bp, synthetic construct
  source 1..2679: mol_type = other DNA
atggccttaccagtgaccgccttgctcctgccgctggccttgctgctccacgccgccaggccggaagtgcagctggttgaatctggcggaggactggttcagcctggcggatctctgagactgtcttgtgccgccagcggcttcagcttcagcgacttttggatgagctgggtccgacaggcccctggcaaaggacttgaatgggtcgccacaatcagccaggccggcagcgagaaggactacgtggactctgtgaagggcagattcaccatcagccgggacaacgccaagaagtccctgtacctccagatgaacagcctgagagccgaggacaccgccgtgtactattgtgcctctggcgtgtacagcttcgactacagaggccagggcaccctggtcacagtctcttctggtaccggcggaggcggatctggcggcggaggtagcggtggcggaggatctgaattcgacgacatcgtgctgacccagagccccgccagcctggccgtgagcctgggccagagcgtgaccatcagctgcagagccagcgagagcgtggagtactacggcaccagcctgatgcagtggtaccagcagaagcccggccagccccccaagctgctgatctacgccaccagcaacgtggagagcggcgtgcccgccagattcagcggcagcggcagcggcaccgacttcagcctgaacatccaccccgtggaggaggacgacatcgccatgtacttctgccagcagagcagaaagctgcccagcaccttcggcggcggcaccaagctggagatcaagctcgaggacctgaagaacgtgttcccacctgaggtggccgtgttcgagcctagcgaggccgagatcagccacacccagaaagccaccctcgtgtgcctggctaccggcttctaccccgaccatgtggaactgtcttggtgggtcaacggcaaagaggtgcacagcggcgtgtgtaccgacccccagccactgaaagaacagcccgccctgaacgacagccggtactgcctgagcagcagactgagagtgtccgccaccttctggcagaacccccggaaccacttcagatgccaggtgcagttctacggcctgagcgagaacgacgagtggacccaggacagagccaagcccgtgacccagatcgtgtctgccgaagcctggggcagagccgattgcgacgtgaagctggtggaaaagagcttcgagacagacaccaacctgaacttccagaacctgagcgtgatcggcttcagaatcctgctgctgaaagtggccggctttaacctgctgatgaccctgcggctgtggtccagcagggccaagcgatctggatctggagcaacaaacttctcactactcaaacaagcaggtgacgtggaggagaatcccgggcctactagtatggactggatttggcgcatccttttccttgtcggcgctgctaccggcgcgcattccgggccccagctccagctgcaagagtctggacctggcctggtcaagcctagcgagacactgagcctgacctgtaccgtgtccggcgatagcatcagcagcggcgattactactggggctggatcagacagcctcctggcaaaggactggaatggatcggccacatctactacagcggcgtgacctactacaaccccagcctgaagtccagagtgaccatcagcgtggacaccagccggaaccagttctccctgaagctgtctagcgtgacagccgccgataccgccgtgtactactgcaccagagaggacagcagcaactggcggagtagaggccagggaacactggtcacagttagctctggatccggcggaggcggaagtggaggcggaggatctggcggcggaggctctttcgaagacgtgagactgcaggagagcggccccggccaggtgaagcccagccagaccgtgagcctgacctgcagcgtgaccggctacagcatcaccaacggcaaccactggtggaactggatcagacaggtgagcggcagcaagctggagtggatcggctacatcagcagcagcggcagcaccgacagcaaccccagcctgaagagcagaatcagcatcaccagagacaccagcaagaaccagctgttcctgcagctgaacagcgtgaccaccgaggacatcgccacctactactgcgccagaggctactacttcgactactggggccagggcaccaccctgaccgtgagcagcacgcgtatccagaaccctgatcctgccgtgtaccagctgcgggatagcaagagcagcgacaagagcgtgtgtctgttcaccgacttcgacagccagaccaacgtgtcccagagcaaggactccgacgtgtacatcaccgataagtgcgtgctggacatgcggagcatggacttcaagagcaactccgccgtggcctggtccaacaagtccgatttcgcctgcgccaacgccttcaacaacagcattatccccgaggacacattcttcccaagccccgagagcagctgcggctttaccagcgagagctaccagcagggcgtgctgagcgccaccatcctgtacgagatcctgctgggcaaggccaccctgtacgccgtgctggtgtctgccctggtgctgatggctatggtcaagcggaaggacagccgggga

SEQ ID NO: 4655 - DNA, 2676 bp, synthetic construct
  source 1..2676: mol_type = other DNA
atggccttaccagtgaccgccttgctcctgccgctggccttgctgctccacgccgccaggccggaagtgcagctggttgaatctggcggaggactggttcagcctggcggatctctgagactgtcttgtgccgccagcggcttcagcttcagcgacttttggatgagctgggtccgacaggcccctggcaaaggacttgaatgggtcgccacaatcagccaggccggcagcgagaaggactacgtggactctgtgaagggcagattcaccatcagccgggacaacgccaagaagtccctgtacctccagatgaacagcctgagagccgaggacaccgccgtgtactattgtgcctctggcgtgtacagcttcgactacagaggccagggcaccctggtcacagtctcttctggtaccggcggaggcggatctggcggcggaggtagcggtggcggaggatctgaattcgacatccagatgacccagagccccagcagcctgtctgccagcgtgggcgacagagtgaccatcacctgtagagccagccaggacgtgaacaccgccgtggcctggtatcagcagaagcctggcaaggcccccaagctgctgatctacagcgccagcttcctggaaagcggcgtgcccagcagattcagcggaagcagaagcggcaccgacttcaccctgaccatcagctccctccagcccgaggacttcgccacctactactgccagcagcactacaccacccctcccaccttcggccagaccaaggtggaaatcaagagactcgaggacctgaagaacgtgttcccacctgaggtggccgtgttcgagcctagcgaggccgagatcagccacacccagaaagccaccctcgtgtgcctggctaccggcttctaccccgaccatgtggaactgtcttggtgggtcaacggcaaagaggtgcacagcggcgtgtgtaccgacccccagccactgaaagaacagcccgccctgaacgacagccggtactgcctgagcagcagactgagagtgtccgccaccttctggcagaacccccggaaccacttcagatgccaggtgcagttctacggcctgagcgagaacgacgagtggacccaggacagagccaagcccgtgacccagatcgtgtctgccgaagcctggggcagagccgattgcgacgtgaagctggtggaaaagagcttcgagacagacaccaacctgaacttccagaacctgagcgtgatcggcttcagaatcctgctgctgaaagtggccggctttaacctgctgatgaccctgcggctgtggtccagcagggccaagcgatctggatctggagcaacaaacttctcactactcaaacaagcaggtgacgtggaggagaatcccgggcctactagtatggactggatttggcgcatccttttccttgtcggcgctgctaccggcgcgcattccgggccccagctccagctgcaagagtctggacctggcctggtcaagcctagcgagacactgagcctgacctgtaccgtgtccggcgatagcatcagcagcggcgattactactggggctggatcagacagcctcctggcaaaggactggaatggatcggccacatctactacagcggcgtgacctactacaaccccagcctgaagtccagagtgaccatcagcgtggacaccagccggaaccagttctccctgaagctgtctagcgtgacagccgccgataccgccgtgtactactgcaccagagaggacagcagcaactggcggagtagaggccagggaacactggtcacagttagctctggatccggcggaggcggaagtggaggcggaggatctggcggcggaggctctttcgaagaagtgcaactggtggaatctggcggcggactggtgcagcctggcggatctctgagactgagctgtgccgccagcggcttcaacatcaaggacacctacatccactgggtgcgccaggcccctggaaagggactggaatgggtggcccggatctaccccaccaacggctacaccagatacgccgacagcgtgaagggccggttcaccatcagcgccgacaccagcaagaataccgcctacctccagatgaacagcctgcgggccgaggataccgccgtgtactactgctcaagatggggaggcgacggcttctacgctatggacgtgtggggccagggcacccttgtgaccgtgtcatctacgcgtatccagaaccctgatcctgccgtgtaccagctgcgggatagcaagagcagcgacaagagcgtgtgtctgttcaccgacttcgacagccagaccaacgtgtcccagagcaaggactccgacgtgtacatcaccgataagtgcgtgctggacatgcggagcatggacttcaagagcaactccgccgtggcctggtccaacaagtccgatttcgcctgcgccaacgccttcaacaacagcattatccccgaggacacattcttcccaagccccgagagcagctgcggctttaccagcgagagctaccagcagggcgtgctgagcgccaccatcctgtacgagatcctgctgggcaaggccaccctgtacgccgtgctggtgtctgccctggtgctgatggctatggtcaagcggaaggacagccgggga

SEQ ID NO: 4656 - DNA, 2673 bp, synthetic construct
  source 1..2673: mol_type = other DNA
atggccttaccagtgaccgccttgctcctgccgctggccttgctgctccacgccgccaggccggaagtgcagctggttgaatctggcggaggactggttcagcctggcggatctctgagactgtcttgtgccgccagcggcttcagcttcagcgacttttggatgagctgggtccgacaggcccctggcaaaggacttgaatgggtcgccacaatcagccaggccggcagcgagaaggactacgtggactctgtgaagggcagattcaccatcagccgggacaacgccaagaagtccctgtacctccagatgaacagcctgagagccgaggacaccgccgtgtactattgtgcctctggcgtgtacagcttcgactacagaggccagggcaccctggtcacagtctcttctggtaccggcggaggcggatctggcggcggaggtagcggtggcggaggatctgaattcgaccagagcgtgctgacacagcctcctagcgtgtcagtggcccctggcaagaccgccagaatcccctgcgagggcaactacatcggcagcagcaacgtgcactggtatcagcagaagcccggccaggctcccgtgctcgtgatccacttcgacagcgacagacccagcggcatccccgacagattcagcggcagcaacagcggcaacatggctaccctgaccatcagcagagtggaagccggggacgaggccgactactactgtcaagtgtgggagaaccacggctgggtgttcggcggaggcaccaagctgacagtgctgtctctcgaggacctgaagaacgtgttcccacctgaggtggccgtgttcgagcctagcgaggccgagatcagccacacccagaaagccaccctcgtgtgcctggctaccggcttctaccccgaccatgtggaactgtcttggtgggtcaacggcaaagaggtgcacagcggcgtgtgtaccgacccccagccactgaaagaacagcccgccctgaacgacagccggtactgcctgagcagcagactgagagtgtccgccaccttctggcagaacccccggaaccacttcagatgccaggtgcagttctacggcctgagcgagaacgacgagtggacccaggacagagccaagcccgtgacccagatcgtgtctgccgaagcctggggcagagccgattgcgacgtgaagctggtggaaaagagcttcgagacagacaccaacctgaacttccagaacctgagcgtgatcggcttcagaatcctgctgctgaaagtggccggctttaacctgctgatgaccctgcggctgtggtccagcagggccaagcgatctggatctggagcaacaaacttctcactactcaaacaagcaggtgacgtggaggagaatcccgggcctactagtatggactggatttggcgcatccttttccttgtcggcgctgctaccggcgcgcattccgggccccagctccagctgcaagagtctggacctggcctggtcaagcctagcgagacactgagcctgacctgtaccgtgtccggcgatagcatcagcagcggcgattactactggggctggatcagacagcctcctggcaaaggactggaatggatcggccacatctactacagcggcgtgacctactacaaccccagcctgaagtccagagtgaccatcagcgtggacaccagccggaaccagttctccctgaagctgtctagcgtgacagccgccgataccgccgtgtactactgcaccagagaggacagcagcaactggcggagtagaggccagggaacactggtcacagttagctctggatccggcggaggcggaagtggaggcggaggatctggcggcggaggctctttcgaagaggtgcaactggtggaaacaggcggcggactggtgcagcctggcgagtctctgagactgagctgtgccgccagcggcttcaccttcagcgactacgagatgaactgggtgcgccaggcccctggaaagggcctggaatgggtgtcctacatcagcagctccggcagcaccatctactacgccgacagcgtgaagggccggtttaccatctaccgggacaacgccaagaacagcctgtacctccagatgaactccctgcgggccgaggacaccgccctgtactattgtgccagagcctggggcgtgggaccccctgattattggggacagggcaccctcgtgaccgtgtcctctacgcgtatccagaaccctgatcctgccgtgtaccagctgcgggatagcaagagcagcgacaagagcgtgtgtctgttcaccgacttcgacagccagaccaacgtgtcccagagcaaggactccgacgtgtacatcaccgataagtgcgtgctggacatgcggagcatggacttcaagagcaactccgccgtggcctggtccaacaagtccgatttcgcctgcgccaacgccttcaacaacagcattatccccgaggacacattcttcccaagccccgagagcagctgcggctttaccagcgagagctaccagcagggcgtgctgagcgccaccatcctgtacgagatcctgctgggcaaggccaccctgtacgccgtgctggtgtctgccctggtgctgatggctatggtcaagcggaaggacagccgggga

SEQ ID NO: 4657 - DNA, 2697 bp, synthetic construct
  source 1..2697: mol_type = other DNA
atggccttaccagtgaccgccttgctcctgccgctggccttgctgctccacgccgccaggccggaagtgcagctggttgaatctggcggaggactggttcagcctggcggatctctgagactgtcttgtgccgccagcggcttcagcttcagcgacttttggatgagctgggtccgacaggcccctggcaaaggacttgaatgggtcgccacaatcagccaggccggcagcgagaaggactacgtggactctgtgaagggcagattcaccatcagccgggacaacgccaagaagtccctgtacctccagatgaacagcctgagagccgaggacaccgccgtgtactattgtgcctctggcgtgtacagcttcgactacagaggccagggcaccctggtcacagtctcttctggtaccggcggaggcggatctggcggcggaggtagcggtggcggaggatctgaattcgacatccagatgacccagagccccagcagcctgtctgccagcgtgggcgataccgtgaccatcacctgtcaggccaacggctacctgaactggtatcagcagcggagaggcaaggcccccaagctgctgatctacgacggcagcaagctggaaagaggcgtgcccagcagattcagcggcagaagatggggccaggagtacaacctgaccatcaacaacctccagcccgaggatattgccacatacttttgccaggtgtacgagttcgtggtgcccggcacacggctggacctgaagagaacagtggctgctcctctcgaggacctgaagaacgtgttcccacctgaggtggccgtgttcgagcctagcgaggccgagatcagccacacccagaaagccaccctcgtgtgcctggctaccggcttctaccccgaccatgtggaactgtcttggtgggtcaacggcaaagaggtgcacagcggcgtgtgtaccgacccccagccactgaaagaacagcccgccctgaacgacagccggtactgcctgagcagcagactgagagtgtccgccaccttctggcagaacccccggaaccacttcagatgccaggtgcagttctacggcctgagcgagaacgacgagtggacccaggacagagccaagcccgtgacccagatcgtgtctgccgaagcctggggcagagccgattgcgacgtgaagctggtggaaaagagcttcgagacagacaccaacctgaacttccagaacctgagcgtgatcggcttcagaatcctgctgctgaaagtggccggctttaacctgctgatgaccctgcggctgtggtccagcagggccaagcgatctggatctggagcaacaaacttctcactactcaaacaagcaggtgacgtggaggagaatcccgggcctactagtatggactggatttggcgcatccttttccttgtcggcgctgctaccggcgcgcattccgggccccagctccagctgcaagagtctggacctggcctggtcaagcctagcgagacactgagcctgacctgtaccgtgtccggcgatagcatcagcagcggcgattactactggggctggatcagacagcctcctggcaaaggactggaatggatcggccacatctactacagcggcgtgacctactacaaccccagcctgaagtccagagtgaccatcagcgtggacaccagccggaaccagttctccctgaagctgtctagcgtgacagccgccgataccgccgtgtactactgcaccagagaggacagcagcaactggcggagtagaggccagggaacactggtcacagttagctctggatccggcggaggcggaagtggaggcggaggatctggcggcggaggctctttcgaacaggtgcagctgctccagtctggcgctgccgtgacaaagcctggcgcttctgtgcgggtgtcctgtgaagccagcggctacaacatccgggactacttcatccactggtggcggcaggctccaggccagggactccagtgggtgggatggatcaaccccaagaccggccagcccaacaaccccagacagttccagggcagagtgtccctgaccagacacgccagctgggacttcgacaccttcagcttctacatggatctgaaggccctgcggagcgacgataccgccgtgtacttctgcgccagacagagaagcgactactgggatttcgacgtgtggggcagcggcacccaagtgacagtgtctagcgccagcaccaagggacccacgcgtatccagaaccctgatcctgccgtgtaccagctgcgggatagcaagagcagcgacaagagcgtgtgtctgttcaccgacttcgacagccagaccaacgtgtcccagagcaaggactccgacgtgtacatcaccgataagtgcgtgctggacatgcggagcatggacttcaagagcaactccgccgtggcctggtccaacaagtccgatttcgcctgcgccaacgccttcaacaacagcattatccccgaggacacattcttcccaagccccgagagcagctgcggctttaccagcgagagctaccagcagggcgtgctgagcgccaccatcctgtacgagatcctgctgggcaaggccaccctgtacgccgtgctggtgtctgccctggtgctgatggctatggtcaagcggaaggacagccgggga

SEQ ID NO: 4658 - DNA, 2715 bp, synthetic construct
  source 1..2715: mol_type = other DNA
atggccttaccagtgaccgccttgctcctgccgctggccttgctgctccacgccgccaggccggaagtgcagctggttgaatctggcggaggactggttcagcctggcggatctctgagactgtcttgtgccgccagcggcttcagcttcagcgacttttggatgagctgggtccgacaggcccctggcaaaggacttgaatgggtcgccacaatcagccaggccggcagcgagaaggactacgtggactctgtgaagggcagattcaccatcagccgggacaacgccaagaagtccctgtacctccagatgaacagcctgagagccgaggacaccgccgtgtactattgtgcctctggcgtgtacagcttcgactacagaggccagggcaccctggtcacagtctcttctggtaccggcggaggcggatctggcggcggaggtagcggtggcggaggatctgaattccagtctgccctgacacagcctcctagcgcctctggctctcccggccagagcatcaccatcagctgtaccggcaccagcaacaacttcgtgtcctggtatcagcagcacgccggcaaggcccccaagctcgtgatctacgacgtgaacaagcggcccagcggcgtgcccgatagattcagcggcagcaagagcggcaacaccgccagcctgacagtgtctggcctccagaccgatgacgaggccgtgtactactgcggcagcctcgtgggcaactgggacgtgatctttggcggaggcaccaagctgaccgtgctgctcgaggacctgaagaacgtgttcccacctgaggtggccgtgttcgagcctagcgaggccgagatcagccacacccagaaagccaccctcgtgtgcctggctaccggcttctaccccgaccatgtggaactgtcttggtgggtcaacggcaaagaggtgcacagcggcgtgtgtaccgacccccagccactgaaagaacagcccgccctgaacgacagccggtactgcctgagcagcagactgagagtgtccgccaccttctggcagaacccccggaaccacttcagatgccaggtgcagttctacggcctgagcgagaacgacgagtggacccaggacagagccaagcccgtgacccagatcgtgtctgccgaagcctggggcagagccgattgcgacgtgaagctggtggaaaagagcttcgagacagacaccaacctgaacttccagaacctgagcgtgatcggcttcagaatcctgctgctgaaagtggccggctttaacctgctgatgaccctgcggctgtggtccagcagggccaagcgatctggatctggagcaacaaacttctcactactcaaacaagcaggtgacgtggaggagaatcccgggcctactagtatggactggatttggcgcatccttttccttgtcggcgctgctaccggcgcgcattccgggccccagctccagctgcaagagtctggacctggcctggtcaagcctagcgagacactgagcctgacctgtaccgtgtccggcgatagcatcagcagcggcgattactactggggctggatcagacagcctcctggcaaaggactggaatggatcggccacatctactacagcggcgtgacctactacaaccccagcctgaagtccagagtgaccatcagcgtggacaccagccggaaccagttctccctgaagctgtctagcgtgacagccgccgataccgccgtgtactactgcaccagagaggacagcagcaactggcggagtagaggccagggaacactggtcacagttagctctggatccggcggaggcggaagtggaggcggaggatctggcggcggaggctctttcgaacagccccagctccaggaatctggccccacactggtggaagccagcgagacactgagcctgacctgtgccgtgtccggcgattctaccgccgcctgcaatagcttctggggctgggtgcgccagcctcctggaaagggactggaatgggtgggaagcctgagccactgcgccagctattggaaccggggctggacctaccacaaccccagcctgaagtccagactgaccctggccctggacacccccaagaacctggtgttcctgaagctgaacagcgtgacagccgccgacaccgccacctactactgtgccagatttggcggcgaggtgctgcggtacaccgactggcctaaacctgcctgggtggacctgtggggcagaggaacactcgtgaccgtgtccagcacgcgtatccagaaccctgatcctgccgtgtaccagctgcgggatagcaagagcagcgacaagagcgtgtgtctgttcaccgacttcgacagccagaccaacgtgtcccagagcaaggactccgacgtgtacatcaccgataagtgcgtgctggacatgcggagcatggacttcaagagcaactccgccgtggcctggtccaacaagtccgatttcgcctgcgccaacgccttcaacaacagcattatccccgaggacacattcttcccaagccccgagagcagctgcggctttaccagcgagagctaccagcagggcgtgctgagcgccaccatcctgtacgagatcctgctgggcaaggccaccctgtacgccgtgctggtgtctgccctggtgctgatggctatggtcaagcggaaggacagccgggga

SEQ ID NO: 4659 - DNA, 2670 bp, synthetic construct
  source 1..2670: mol_type = other DNA
atggccttaccagtgaccgccttgctcctgccgctggccttgctgctccacgccgccaggccggaagtgcagctggttgaatctggcggaggactggttcagcctggcggatctctgagactgtcttgtgccgccagcggcttcagcttcagcgacttttggatgagctgggtccgacaggcccctggcaaaggacttgaatgggtcgccacaatcagccaggccggcagcgagaaggactacgtggactctgtgaagggcagattcaccatcagccgggacaacgccaagaagtccctgtacctccagatgaacagcctgagagccgaggacaccgccgtgtactattgtgcctctggcgtgtacagcttcgactacagaggccagggcaccctggtcacagtctcttctggtaccggcggaggcggatctggcggcggaggtagcggtggcggaggatctgaattcgagatcgtgctgacacagagccctggcaccctgagcctgtctccaggcgagacagccatcatcagctgccggacaagccagtacggcagcctggcctggtatcagcagaggccaggacaggcccccagactcgtgatctacagcggcagcacaagagccgccggaatccccgatagattcagcggctccagatggggacccgactacaacctgaccatcagcaacctggaaagcggcgacttcggcgtgtactactgccagcagtacgagttcttcggccagggcaccaaggtgcaggtggacatcaaaagactcgaggacctgaagaacgtgttcccacctgaggtggccgtgttcgagcctagcgaggccgagatcagccacacccagaaagccaccctcgtgtgcctggctaccggcttctaccccgaccatgtggaactgtcttggtgggtcaacggcaaagaggtgcacagcggcgtgtgtaccgacccccagccactgaaagaacagcccgccctgaacgacagccggtactgcctgagcagcagactgagagtgtccgccaccttctggcagaacccccggaaccacttcagatgccaggtgcagttctacggcctgagcgagaacgacgagtggacccaggacagagccaagcccgtgacccagatcgtgtctgccgaagcctggggcagagccgattgcgacgtgaagctggtggaaaagagcttcgagacagacaccaacctgaacttccagaacctgagcgtgatcggcttcagaatcctgctgctgaaagtggccggctttaacctgctgatgaccctgcggctgtggtccagcagggccaagcgatctggatctggagcaacaaacttctcactactcaaacaagcaggtgacgtggaggagaatcccgggcctactagtatggactggatttggcgcatccttttccttgtcggcgctgctaccggcgcgcattccgggccccagctccagctgcaagagtctggacctggcctggtcaagcctagcgagacactgagcctgacctgtaccgtgtccggcgatagcatcagcagcggcgattactactggggctggatcagacagcctcctggcaaaggactggaatggatcggccacatctactacagcggcgtgacctactacaaccccagcctgaagtccagagtgaccatcagcgtggacaccagccggaaccagttctccctgaagctgtctagcgtgacagccgccgataccgccgtgtactactgcaccagagaggacagcagcaactggcggagtagaggccagggaacactggtcacagttagctctggatccggcggaggcggaagtggaggcggaggatctggcggcggaggctctttcgaacaggtgcagctggtgcagtctggcggccagatgaagaaacccggcgagagcatgagaatcagctgtcgggcctccggctacgagttcatcgactgcaccctgaactggatcagactggcccctggcaagcggcctgagtggatgggatggctgaagcctagaggcggagccgtgaactacgccagacctctccagggcagagtgaccatgaccagggacgtgtacagcgataccgccttcctggaactgcggagcctgaccgtggatgataccgccgtgtacttctgcaccagaggcaagaactgcgattacaactgggacttcgagcactggggcagaggcacccctgtgatcgtgtctagcacgcgtatccagaaccctgatcctgccgtgtaccagctgcgggatagcaagagcagcgacaagagcgtgtgtctgttcaccgacttcgacagccagaccaacgtgtcccagagcaaggactccgacgtgtacatcaccgataagtgcgtgctggacatgcggagcatggacttcaagagcaactccgccgtggcctggtccaacaagtccgatttcgcctgcgccaacgccttcaacaacagcattatccccgaggacacattcttcccaagccccgagagcagctgcggctttaccagcgagagctaccagcagggcgtgctgagcgccaccatcctgtacgagatcctgctgggcaaggccaccctgtacgccgtgctggtgtctgccctggtgctgatggctatggtcaagcggaaggacagccgggga

SEQ ID NO: 4660 - DNA, 2700 bp, synthetic construct
  source 1..2700: mol_type = other DNA
atggccttaccagtgaccgccttgctcctgccgctggccttgctgctccacgccgccaggccggaagtgcagctggttgaatctggcggaggactggttcagcctggcggatctctgagactgtcttgtgccgccagcggcttcagcttcagcgacttttggatgagctgggtccgacaggcccctggcaaaggacttgaatgggtcgccacaatcagccaggccggcagcgagaaggactacgtggactctgtgaagggcagattcaccatcagccgggacaacgccaagaagtccctgtacctccagatgaacagcctgagagccgaggacaccgccgtgtactattgtgcctctggcgtgtacagcttcgactacagaggccagggcaccctggtcacagtctcttctggtaccggcggaggcggatctggcggcggaggtagcggtggcggaggatctgaattcgagctggtgctgacacagagccctggcaccctgtctctgtctgccggcgaaagagccaccctgagctgtagagccagccagagcgtgtcctctggcagcctggcttggtatcagcagaagccaggccaggcccccagactgctgatctacggcgcttctaccagagccaccggcatccccgatagattcagcggctctggctccggcaccgacttcaccctgacaatcggcagactggaacccgaggacctggccgtgtactactgccagcagtacggcaccagcccctacacattcggccagggcaccaagctggaaatcctcgaggacctgaagaacgtgttcccacctgaggtggccgtgttcgagcctagcgaggccgagatcagccacacccagaaagccaccctcgtgtgcctggctaccggcttctaccccgaccatgtggaactgtcttggtgggtcaacggcaaagaggtgcacagcggcgtgtgtaccgacccccagccactgaaagaacagcccgccctgaacgacagccggtactgcctgagcagcagactgagagtgtccgccaccttctggcagaacccccggaaccacttcagatgccaggtgcagttctacggcctgagcgagaacgacgagtggacccaggacagagccaagcccgtgacccagatcgtgtctgccgaagcctggggcagagccgattgcgacgtgaagctggtggaaaagagcttcgagacagacaccaacctgaacttccagaacctgagcgtgatcggcttcagaatcctgctgctgaaagtggccggctttaacctgctgatgaccctgcggctgtggtccagcagggccaagcgatctggatctggagcaacaaacttctcactactcaaacaagcaggtgacgtggaggagaatcccgggcctactagtatggactggatttggcgcatccttttccttgtcggcgctgctaccggcgcgcattccgggccccagctccagctgcaagagtctggacctggcctggtcaagcctagcgagacactgagcctgacctgtaccgtgtccggcgatagcatcagcagcggcgattactactggggctggatcagacagcctcctggcaaaggactggaatggatcggccacatctactacagcggcgtgacctactacaaccccagcctgaagtccagagtgaccatcagcgtggacaccagccggaaccagttctccctgaagctgtctagcgtgacagccgccgataccgccgtgtactactgcaccagagaggacagcagcaactggcggagtagaggccagggaacactggtcacagttagctctggatccggcggaggcggaagtggaggcggaggatctggcggcggaggctctttcgaactggaacagagcggagccgaagtgaagaaacccggcagcagcgtgcaggtgtcctgcaaagcaagcggcggcaccttctctatgtacggcttcaactgggtgcgccaggctcctggacacggcctggaatggatgggcggcatcatccccatcttcggcacctccaactacgcccagaaattccggggcagagtgaccttcaccgccgaccaggccacaagcaccgcctacatggaactgaccaacctgcggagcgacgacaccgccgtgtattattgcgccagagacttcggccccgactgggaggatggcgacagctacgatggcagcggcagaggcttcttcgacttctggggccagggaacccttgtgaccgtgtcctcaacgcgtatccagaaccctgatcctgccgtgtaccagctgcgggatagcaagagcagcgacaagagcgtgtgtctgttcaccgacttcgacagccagaccaacgtgtcccagagcaaggactccgacgtgtacatcaccgataagtgcgtgctggacatgcggagcatggacttcaagagcaactccgccgtggcctggtccaacaagtccgatttcgcctgcgccaacgccttcaacaacagcattatccccgaggacacattcttcccaagccccgagagcagctgcggctttaccagcgagagctaccagcagggcgtgctgagcgccaccatcctgtacgagatcctgctgggcaaggccaccctgtacgccgtgctggtgtctgccctggtgctgatggctatggtcaagcggaaggacagccgggga

SEQ ID NO: 4661 - DNA, 2640 bp, synthetic construct
  source 1..2640: mol_type = other DNA
atggccttaccagtgaccgccttgctcctgccgctggccttgctgctccacgccgccaggccggaagtgcagctggttgaatctggcggaggactggttcagcctggcggatctctgagactgtcttgtgccgccagcggcttcagcttcagcgacttttggatgagctgggtccgacaggcccctggcaaaggacttgaatgggtcgccacaatcagccaggccggcagcgagaaggactacgtggactctgtgaagggcagattcaccatcagccgggacaacgccaagaagtccctgtacctccagatgaacagcctgagagccgaggacaccgccgtgtactattgtgcctctggcgtgtacagcttcgactacagaggccagggcaccctggtcacagtctcttctggtaccggcggaggcggatctggcggcggaggtagcggtggcggaggatctgaattcgacatccagatgacccagagccccagcagcctgtctgccagcgtgggcgacagagtgaccatcacctgtcaggccagccaggacatcaacaactacctgaactggtatcagcagaagcccggcaaggcccccaagctgctgatctacgacgccagcaatctgcagaccggcgtgcccagcagattttccggctctggcagcggcaccgacttcaccttcaccatcgaggacattgccacctactactgccagcagtacaccttcggccctggcaccaaggtggacatcaaactcgaggacctgaagaacgtgttcccacctgaggtggccgtgttcgagcctagcgaggccgagatcagccacacccagaaagccaccctcgtgtgcctggctaccggcttctaccccgaccatgtggaactgtcttggtgggtcaacggcaaagaggtgcacagcggcgtgtgtaccgacccccagccactgaaagaacagcccgccctgaacgacagccggtactgcctgagcagcagactgagagtgtccgccaccttctggcagaacccccggaaccacttcagatgccaggtgcagttctacggcctgagcgagaacgacgagtggacccaggacagagccaagcccgtgacccagatcgtgtctgccgaagcctggggcagagccgattgcgacgtgaagctggtggaaaagagcttcgagacagacaccaacctgaacttccagaacctgagcgtgatcggcttcagaatcctgctgctgaaagtggccggctttaacctgctgatgaccctgcggctgtggtccagcagggccaagcgatctggatctggagcaacaaacttctcactactcaaacaagcaggtgacgtggaggagaatcccgggcctactagtatggactggatttggcgcatccttttccttgtcggcgctgctaccggcgcgcattccgggccccagctccagctgcaagagtctggacctggcctggtcaagcctagcgagacactgagcctgacctgtaccgtgtccggcgatagcatcagcagcggcgattactactggggctggatcagacagcctcctggcaaaggactggaatggatcggccacatctactacagcggcgtgacctactacaaccccagcctgaagtccagagtgaccatcagcgtggacaccagccggaaccagttctccctgaagctgtctagcgtgacagccgccgataccgccgtgtactactgcaccagagaggacagcagcaactggcggagtagaggccagggaacactggtcacagttagctctggatccggcggaggcggaagtggaggcggaggatctggcggcggaggctctttcgaagaagtgcaactgctggaatctggcggcggactggtgcagcctggcggatctctgagactgagctgtgccgccagcggcttcacctttagctggtacagcatgacctgggtgcgccaggcccctggcaaaggactggaatgggtgtccagcatcgtgccctggggcgatttcacccagtacgccgatagcgtgaagggccggttcaccatcagccgggacaacagcaagaacaccctgtacctgcagatgaacagcctgcgggccgaggacaccgccgtgtactattgtgccaagggacctggctggggcagcttcgatctgtggggcagaggaacccttgtgaccgtgtccagcacgcgtatccagaaccctgatcctgccgtgtaccagctgcgggatagcaagagcagcgacaagagcgtgtgtctgttcaccgacttcgacagccagaccaacgtgtcccagagcaaggactccgacgtgtacatcaccgataagtgcgtgctggacatgcggagcatggacttcaagagcaactccgccgtggcctggtccaacaagtccgatttcgcctgcgccaacgccttcaacaacagcattatccccgaggacacattcttcccaagccccgagagcagctgcggctttaccagcgagagctaccagcagggcgtgctgagcgccaccatcctgtacgagatcctgctgggcaaggccaccctgtacgccgtgctggtgtctgccctggtgctgatggctatggtcaagcggaaggacagccgggga

SEQ ID NO: 4662 - DNA, 2670 bp, synthetic construct
  source 1..2670: mol_type = other DNA
atggccttaccagtgaccgccttgctcctgccgctggccttgctgctccacgccgccaggccggaagtgcagctggttgaatctggcggaggactggttcagcctggcggatctctgagactgtcttgtgccgccagcggcttcagcttcagcgacttttggatgagctgggtccgacaggcccctggcaaaggacttgaatgggtcgccacaatcagccaggccggcagcgagaaggactacgtggactctgtgaagggcagattcaccatcagccgggacaacgccaagaagtccctgtacctccagatgaacagcctgagagccgaggacaccgccgtgtactattgtgcctctggcgtgtacagcttcgactacagaggccagggcaccctggtcacagtctcttctggtaccggcggaggcggatctggcggcggaggtagcggtggcggaggatctgaattcgacatccagatgacccagagccccagcagcctgtctgccagcgtgggcgacagagtgaccatcacctgtaccgccagcctgagcgtgtccagcacctacctgcactggtatcagcagaagcccggcagcagccccaagctgtggatctacagcaccagcaacctggcctccggcgtgcccagcagattttctggcagcggctctggcaccagctacaccctgaccatcagctccctccagcccgaggacttcgccacctactactgccaccagtaccacagaagccccctgacctttggcggaggcaccaaggtggaaatcaagagactcgaggacctgaagaacgtgttcccacctgaggtggccgtgttcgagcctagcgaggccgagatcagccacacccagaaagccaccctcgtgtgcctggctaccggcttctaccccgaccatgtggaactgtcttggtgggtcaacggcaaagaggtgcacagcggcgtgtgtaccgacccccagccactgaaagaacagcccgccctgaacgacagccggtactgcctgagcagcagactgagagtgtccgccaccttctggcagaacccccggaaccacttcagatgccaggtgcagttctacggcctgagcgagaacgacgagtggacccaggacagagccaagcccgtgacccagatcgtgtctgccgaagcctggggcagagccgattgcgacgtgaagctggtggaaaagagcttcgagacagacaccaacctgaacttccagaacctgagcgtgatcggcttcagaatcctgctgctgaaagtggccggctttaacctgctgatgaccctgcggctgtggtccagcagggccaagcgatctggatctggagcaacaaacttctcactactcaaacaagcaggtgacgtggaggagaatcccgggcctactagtatggactggatttggcgcatccttttccttgtcggcgctgctaccggcgcgcattccgggccccagctccagctgcaagagtctggacctggcctggtcaagcctagcgagacactgagcctgacctgtaccgtgtccggcgatagcatcagcagcggcgattactactggggctggatcagacagcctcctggcaaaggactggaatggatcggccacatctactacagcggcgtgacctactacaaccccagcctgaagtccagagtgaccatcagcgtggacaccagccggaaccagttctccctgaagctgtctagcgtgacagccgccgataccgccgtgtactactgcaccagagaggacagcagcaactggcggagtagaggccagggaacactggtcacagttagctctggatccggcggaggcggaagtggaggcggaggatctggcggcggaggctctttcgaagaagtgcaactggtggaatctggcggcggactggtgcagcctggcggatctctgagactgagctgtgccgccagcggcttcagcctgaccaaatacggcgtgcactgggtgcgccaggcccctggaaaaggactggaatgggtgggagtgaagtgggctggcggctccaccgactacaacagcgccctgatgagccggttcaccatcagcaaggacaacgccaagaacagcctgtacctccagatgaactccctgcgggccgaggacaccgccgtgtactactgtgccagagatcaccgggacgctatggactactggggccagggaacactcgtgaccgtgtcctctacgcgtatccagaaccctgatcctgccgtgtaccagctgcgggatagcaagagcagcgacaagagcgtgtgtctgttcaccgacttcgacagccagaccaacgtgtcccagagcaaggactccgacgtgtacatcaccgataagtgcgtgctggacatgcggagcatggacttcaagagcaactccgccgtggcctggtccaacaagtccgatttcgcctgcgccaacgccttcaacaacagcattatccccgaggacacattcttcccaagccccgagagcagctgcggctttaccagcgagagctaccagcagggcgtgctgagcgccaccatcctgtacgagatcctgctgggcaaggccaccctgtacgccgtgctggtgtctgccctggtgctgatggctatggtcaagcggaaggacagccgggga

SEQ ID NO: 4663 - DNA, 2682 bp, synthetic construct
  source 1..2682: mol_type = other DNA
atggccttaccagtgaccgccttgctcctgccgctggccttgctgctccacgccgccaggccggaagtgcagctggttgaatctggcggaggactggttcagcctggcggatctctgagactgtcttgtgccgccagcggcttcagcttcagcgacttttggatgagctgggtccgacaggcccctggcaaaggacttgaatgggtcgccacaatcagccaggccggcagcgagaaggactacgtggactctgtgaagggcagattcaccatcagccgggacaacgccaagaagtccctgtacctccagatgaacagcctgagagccgaggacaccgccgtgtactattgtgcctctggcgtgtacagcttcgactacagaggccagggcaccctggtcacagtctcttctggtaccggcggaggcggatctggcggcggaggtagcggtggcggaggatctgaattcgacatccagatgacccagagccccagcagcctgtctgccagcgtgggcgacagagtgaccatcacatgcaaggccagccaggacgtgggaacagccgtggcctggtatcagcagaagcctggcaaggcccccaagctgctgatctacagcgccagctacagatccaccggcgtgcccagcagattttccggctctggcagcggcaccgacttcaccctgaccatctctagcctccagcccgaggacttcgccacctactactgccagcaccactactccgccccctggacatttggcggaggcaccaaggtggaaatcaagctcgaggacctgaagaacgtgttcccacctgaggtggccgtgttcgagcctagcgaggccgagatcagccacacccagaaagccaccctcgtgtgcctggctaccggcttctaccccgaccatgtggaactgtcttggtgggtcaacggcaaagaggtgcacagcggcgtgtgtaccgacccccagccactgaaagaacagcccgccctgaacgacagccggtactgcctgagcagcagactgagagtgtccgccaccttctggcagaacccccggaaccacttcagatgccaggtgcagttctacggcctgagcgagaacgacgagtggacccaggacagagccaagcccgtgacccagatcgtgtctgccgaagcctggggcagagccgattgcgacgtgaagctggtggaaaagagcttcgagacagacaccaacctgaacttccagaacctgagcgtgatcggcttcagaatcctgctgctgaaagtggccggctttaacctgctgatgaccctgcggctgtggtccagcagggccaagcgatctggatctggagcaacaaacttctcactactcaaacaagcaggtgacgtggaggagaatcccgggcctactagtatggactggatttggcgcatccttttccttgtcggcgctgctaccggcgcgcattccgggccccagctccagctgcaagagtctggacctggcctggtcaagcctagcgagacactgagcctgacctgtaccgtgtccggcgatagcatcagcagcggcgattactactggggctggatcagacagcctcctggcaaaggactggaatggatcggccacatctactacagcggcgtgacctactacaaccccagcctgaagtccagagtgaccatcagcgtggacaccagccggaaccagttctccctgaagctgtctagcgtgacagccgccgataccgccgtgtactactgcaccagagaggacagcagcaactggcggagtagaggccagggaacactggtcacagttagctctggatccggcggaggcggaagtggaggcggaggatctggcggcggaggctctttcgaagaagtgcaactggtggaatcaggcggcggactggtgcagcctggcggatctctgagactgagctgtgccgccagcggcttcaccttcagcagaaacggcatgagctgggtgcgccaggcccctggaaaaggactggaatgggtggcaaccgtgtccagcggcggcagctacatctactacgccgacagcgtgaagggccggttcaccatctccagagacaacgccaagaacagcctgtacctccagatgaactccctgcgggccgaggacaccgccgtgtactattgtgccagacagggcaccaccgccctggctaccagattcttcgatgtgtggggccagggcaccctcgtgaccgtgtcatctacgcgtatccagaaccctgatcctgccgtgtaccagctgcgggatagcaagagcagcgacaagagcgtgtgtctgttcaccgacttcgacagccagaccaacgtgtcccagagcaaggactccgacgtgtacatcaccgataagtgcgtgctggacatgcggagcatggacttcaagagcaactccgccgtggcctggtccaacaagtccgatttcgcctgcgccaacgccttcaacaacagcattatccccgaggacacattcttcccaagccccgagagcagctgcggctttaccagcgagagctaccagcagggcgtgctgagcgccaccatcctgtacgagatcctgctgggcaaggccaccctgtacgccgtgctggtgtctgccctggtgctgatggctatggtcaagcggaaggacagccgggga

SEQ ID NO: 4664 - DNA, 2670 bp, synthetic construct
  source 1..2670: mol_type = other DNA
atggccttaccagtgaccgccttgctcctgccgctggccttgctgctccacgccgccaggccggaagtgcagctggttgaatctggcggaggactggttcagcctggcggatctctgagactgtcttgtgccgccagcggcttcagcttcagcgacttttggatgagctgggtccgacaggcccctggcaaaggacttgaatgggtcgccacaatcagccaggccggcagcgagaaggactacgtggactctgtgaagggcagattcaccatcagccgggacaacgccaagaagtccctgtacctccagatgaacagcctgagagccgaggacaccgccgtgtactattgtgcctctggcgtgtacagcttcgactacagaggccagggcaccctggtcacagtctcttctggtaccggcggaggcggatctggcggcggaggtagcggtggcggaggatctgaattcgacatccagatgacccagagcccccctagcctgtctgcctctgtgggcggcaaagtgaccatcacatgcaaggccagccaggacatcgaccgctacatggcctggtatcaggacaagcccggcaagggacccaagctgctgatccacgataccagcaccctccagcccggcatccccagcagattttctggcagcggctccggcagagactacagcttcagcatcagcaacctggaacccgaggacattgccacctactactgcctccagtacgacaacctgtggaccttcggcggaggcaccaagctggaaatcaagagactcgaggacctgaagaacgtgttcccacctgaggtggccgtgttcgagcctagcgaggccgagatcagccacacccagaaagccaccctcgtgtgcctggctaccggcttctaccccgaccatgtggaactgtcttggtgggtcaacggcaaagaggtgcacagcggcgtgtgtaccgacccccagccactgaaagaacagcccgccctgaacgacagccggtactgcctgagcagcagactgagagtgtccgccaccttctggcagaacccccggaaccacttcagatgccaggtgcagttctacggcctgagcgagaacgacgagtggacccaggacagagccaagcccgtgacccagatcgtgtctgccgaagcctggggcagagccgattgcgacgtgaagctggtggaaaagagcttcgagacagacaccaacctgaacttccagaacctgagcgtgatcggcttcagaatcctgctgctgaaagtggccggctttaacctgctgatgaccctgcggctgtggtccagcagggccaagcgatctggatctggagcaacaaacttctcactactcaaacaagcaggtgacgtggaggagaatcccgggcctactagtatggactggatttggcgcatccttttccttgtcggcgctgctaccggcgcgcattccgggccccagctccagctgcaagagtctggacctggcctggtcaagcctagcgagacactgagcctgacctgtaccgtgtccggcgatagcatcagcagcggcgattactactggggctggatcagacagcctcctggcaaaggactggaatggatcggccacatctactacagcggcgtgacctactacaaccccagcctgaagtccagagtgaccatcagcgtggacaccagccggaaccagttctccctgaagctgtctagcgtgacagccgccgataccgccgtgtactactgcaccagagaggacagcagcaactggcggagtagaggccagggaacactggtcacagttagctctggatccggcggaggcggaagtggaggcggaggatctggcggcggaggctctttcgaacaggtgcaactggtgcagagcggagccgagcttgtgaagcctggcgcttccgtgaagatgagctgcaaagccagcggctacatcttcaccaactacaacatccactgggtcaagaagtccccaggccagggcctggaatggatcggagccatctaccccggaaacggcgacgccccttacagccagaagttccaggacagagccaccctgaccgccgacaccagcagcagcaccacctacatggaactgagcagcctgaccagcgaggacagcgccgtgtactattgcgtgcgggccaactgggatgtggccttcgcctattggggccagggcacactggtgtccgtgtcctctacgcgtatccagaaccctgatcctgccgtgtaccagctgcgggatagcaagagcagcgacaagagcgtgtgtctgttcaccgacttcgacagccagaccaacgtgtcccagagcaaggactccgacgtgtacatcaccgataagtgcgtgctggacatgcggagcatggacttcaagagcaactccgccgtggcctggtccaacaagtccgatttcgcctgcgccaacgccttcaacaacagcattatccccgaggacacattcttcccaagccccgagagcagctgcggctttaccagcgagagctaccagcagggcgtgctgagcgccaccatcctgtacgagatcctgctgggcaaggccaccctgtacgccgtgctggtgtctgccctggtgctgatggctatggtcaagcggaaggacagccgggga

SEQ ID NO: 4665 - DNA, 2673 bp, synthetic construct
  source 1..2673: mol_type = other DNA
atggccttaccagtgaccgccttgctcctgccgctggccttgctgctccacgccgccaggccggaagtgcagctggttgaatctggcggaggactggttcagcctggcggatctctgagactgtcttgtgccgccagcggcttcagcttcagcgacttttggatgagctgggtccgacaggcccctggcaaaggacttgaatgggtcgccacaatcagccaggccggcagcgagaaggactacgtggactctgtgaagggcagattcaccatcagccgggacaacgccaagaagtccctgtacctccagatgaacagcctgagagccgaggacaccgccgtgtactattgtgcctctggcgtgtacagcttcgactacagaggccagggcaccctggtcacagtctcttctggtaccggcggaggcggatctggcggcggaggtagcggtggcggaggatctgaattcgacatccagatgacccagagccctgccagcctgtctgcctctgtgggcgagacagtgaccatcacctgtcgggtgtccggcaacatccacaactacctggcctggtatcagcagaagcagggcaagagcccccaactgctggtgtacaacgccaagaccctggccgatggcgtgcccagcagattttctggctctggcagcggcacccagtacagcctgaagatcaacagcctccagcccgaggacttcggcagctactactgccagcacttctggtccaacccctacaccttcggcggaggcaccaagctggaaatcaagctcgaggacctgaagaacgtgttcccacctgaggtggccgtgttcgagcctagcgaggccgagatcagccacacccagaaagccaccctcgtgtgcctggctaccggcttctaccccgaccatgtggaactgtcttggtgggtcaacggcaaagaggtgcacagcggcgtgtgtaccgacccccagccactgaaagaacagcccgccctgaacgacagccggtactgcctgagcagcagactgagagtgtccgccaccttctggcagaacccccggaaccacttcagatgccaggtgcagttctacggcctgagcgagaacgacgagtggacccaggacagagccaagcccgtgacccagatcgtgtctgccgaagcctggggcagagccgattgcgacgtgaagctggtggaaaagagcttcgagacagacaccaacctgaacttccagaacctgagcgtgatcggcttcagaatcctgctgctgaaagtggccggctttaacctgctgatgaccctgcggctgtggtccagcagggccaagcgatctggatctggagcaacaaacttctcactactcaaacaagcaggtgacgtggaggagaatcccgggcctactagtatggactggatttggcgcatccttttccttgtcggcgctgctaccggcgcgcattccgggccccagctccagctgcaagagtctggacctggcctggtcaagcctagcgagacactgagcctgacctgtaccgtgtccggcgatagcatcagcagcggcgattactactggggctggatcagacagcctcctggcaaaggactggaatggatcggccacatctactacagcggcgtgacctactacaaccccagcctgaagtccagagtgaccatcagcgtggacaccagccggaaccagttctccctgaagctgtctagcgtgacagccgccgataccgccgtgtactactgcaccagagaggacagcagcaactggcggagtagaggccagggaacactggtcacagttagctctggatccggcggaggcggaagtggaggcggaggatctggcggcggaggctctttcgaacaggtgcaactccagcagtctggcgcttccgtgaaggtgtcctgcaaggccagcgaactcgtgcggcctggcacaggctacgccttcaccaattacctgatcgagtgggtcaagcagaggcccggacagggcctggaatggatcggagtgattaacccaggcagcggcggcaccaactacaacgagaagttcaagggcaaggccaccctgaccgccgacaagagcagcagcacagcctacatgcaactgagcagcctgaccagcgacgacagcgccgtgtacttctgcgcccggtacagaagctacgactggtacttcgacgtgtggggagccggcaccaccgtgacagtgtcatctacgcgtatccagaaccctgatcctgccgtgtaccagctgcgggatagcaagagcagcgacaagagcgtgtgtctgttcaccgacttcgacagccagaccaacgtgtcccagagcaaggactccgacgtgtacatcaccgataagtgcgtgctggacatgcggagcatggacttcaagagcaactccgccgtggcctggtccaacaagtccgatttcgcctgcgccaacgccttcaacaacagcattatccccgaggacacattcttcccaagccccgagagcagctgcggctttaccagcgagagctaccagcagggcgtgctgagcgccaccatcctgtacgagatcctgctgggcaaggccaccctgtacgccgtgctggtgtctgccctggtgctgatggctatggtcaagcggaaggacagccgggga

SEQ ID NO: 4666 - DNA, 2670 bp, synthetic construct
  source 1..2670: mol_type = other DNA
atggccttaccagtgaccgccttgctcctgccgctggccttgctgctccacgccgccaggccggaagtgcagctggttgaatctggcggaggactggttcagcctggcggatctctgagactgtcttgtgccgccagcggcttcagcttcagcgacttttggatgagctgggtccgacaggcccctggcaaaggacttgaatgggtcgccacaatcagccaggccggcagcgagaaggactacgtggactctgtgaagggcagattcaccatcagccgggacaacgccaagaagtccctgtacctccagatgaacagcctgagagccgaggacaccgccgtgtactattgtgcctctggcgtgtacagcttcgactacagaggccagggcaccctggtcacagtctcttctggtaccggcggaggcggatctggcggcggaggtagcggtggcggaggatctgaattcgacatccagatgacccagagcttcagcagcctgagcgccagcgtgggcgacagagtgaccatcacctgtagagccagccaggacatcagcaactacctgaactggtatcagcagaagcccggcaaggcccccaagctgctgatctactacaccagcagactgcacagcggcgtgcccagcagattttctggcagcggctccggcaccgactacaccctgacaatcagctccctgcagcccgaggacttcgctacctacttctgtcagcaaggcaacaccctgccctggacctttggcggaggcaccaagctggaaatcaagagactcgaggacctgaagaacgtgttcccacctgaggtggccgtgttcgagcctagcgaggccgagatcagccacacccagaaagccaccctcgtgtgcctggctaccggcttctaccccgaccatgtggaactgtcttggtgggtcaacggcaaagaggtgcacagcggcgtgtgtaccgacccccagccactgaaagaacagcccgccctgaacgacagccggtactgcctgagcagcagactgagagtgtccgccaccttctggcagaacccccggaaccacttcagatgccaggtgcagttctacggcctgagcgagaacgacgagtggacccaggacagagccaagcccgtgacccagatcgtgtctgccgaagcctggggcagagccgattgcgacgtgaagctggtggaaaagagcttcgagacagacaccaacctgaacttccagaacctgagcgtgatcggcttcagaatcctgctgctgaaagtggccggctttaacctgctgatgaccctgcggctgtggtccagcagggccaagcgatctggatctggagcaacaaacttctcactactcaaacaagcaggtgacgtggaggagaatcccgggcctactagtatggactggatttggcgcatccttttccttgtcggcgctgctaccggcgcgcattccgggccccagctccagctgcaagagtctggacctggcctggtcaagcctagcgagacactgagcctgacctgtaccgtgtccggcgatagcatcagcagcggcgattactactggggctggatcagacagcctcctggcaaaggactggaatggatcggccacatctactacagcggcgtgacctactacaaccccagcctgaagtccagagtgaccatcagcgtggacaccagccggaaccagttctccctgaagctgtctagcgtgacagccgccgataccgccgtgtactactgcaccagagaggacagcagcaactggcggagtagaggccagggaacactggtcacagttagctctggatccggcggaggcggaagtggaggcggaggatctggcggcggaggctctttcgaagaagtgcaactggtgcagtccggcggagggctggtgcagagcggaggatctctgagactgagctgcagagccagcggctacaccttcacccggtactggatgctgtgggtgcgccagaggccaggcaagggactggaatgggtggccgagatcaacccccggaacgaccggaccaactacaacgagaagttcaagacccggttcaccatcagcgtggacagaagcaagaacaccctgtacctgcagatggacagcctgcgggccgaggataccgccgtgtacttttgtgctctgggaggcggctacgctatggactactggggccagggaacccttgtgaccgtgtcctctacgcgtatccagaaccctgatcctgccgtgtaccagctgcgggatagcaagagcagcgacaagagcgtgtgtctgttcaccgacttcgacagccagaccaacgtgtcccagagcaaggactccgacgtgtacatcaccgataagtgcgtgctggacatgcggagcatggacttcaagagcaactccgccgtggcctggtccaacaagtccgatttcgcctgcgccaacgccttcaacaacagcattatccccgaggacacattcttcccaagccccgagagcagctgcggctttaccagcgagagctaccagcagggcgtgctgagcgccaccatcctgtacgagatcctgctgggcaaggccaccctgtacgccgtgctggtgtctgccctggtgctgatggctatggtcaagcggaaggacagccgggga

SEQ ID NO: 4667 - DNA, 2673 bp, synthetic construct
  source 1..2673: mol_type = other DNA
atggccttaccagtgaccgccttgctcctgccgctggccttgctgctccacgccgccaggccggaagtgcagctggttgaatctggcggaggactggttcagcctggcggatctctgagactgtcttgtgccgccagcggcttcagcttcagcgacttttggatgagctgggtccgacaggcccctggcaaaggacttgaatgggtcgccacaatcagccaggccggcagcgagaaggactacgtggactctgtgaagggcagattcaccatcagccgggacaacgccaagaagtccctgtacctccagatgaacagcctgagagccgaggacaccgccgtgtactattgtgcctctggcgtgtacagcttcgactacagaggccagggcaccctggtcacagtctcttctggtaccggcggaggcggatctggcggcggaggtagcggtggcggaggatctgaattcgacatccagatgacacagtctccggcgtcactgtccgcctccgtgggggagactgtgactattatttgtagggcatcagttaacatctactcttatttggcctggtaccagcagaagcaaggcaagagtcctcagctgctggtgtataatgcgaagatcctggcagagggcgtgccgagccggttctccggcagcggctcaggtacccaattttccctcaagatcaattcactgcagccagaggactttggcagttactattgtcaacaccactacggcacattcactttcgggtccggtacaaaattggagattaagcgactcgaggacctgaagaacgtgttcccacctgaggtggccgtgttcgagcctagcgaggccgagatcagccacacccagaaagccaccctcgtgtgcctggctaccggcttctaccccgaccatgtggaactgtcttggtgggtcaacggcaaagaggtgcacagcggcgtgtgtaccgacccccagccactgaaagaacagcccgccctgaacgacagccggtactgcctgagcagcagactgagagtgtccgccaccttctggcagaacccccggaaccacttcagatgccaggtgcagttctacggcctgagcgagaacgacgagtggacccaggacagagccaagcccgtgacccagatcgtgtctgccgaagcctggggcagagccgattgcgacgtgaagctggtggaaaagagcttcgagacagacaccaacctgaacttccagaacctgagcgtgatcggcttcagaatcctgctgctgaaagtggccggctttaacctgctgatgaccctgcggctgtggtccagcagggccaagcgatctggatctggagcaacaaacttctcactactcaaacaagcaggtgacgtggaggagaatcccgggcctactagtatggactggatttggcgcatccttttccttgtcggcgctgctaccggcgcgcattccgggccccagctccagctgcaagagtctggacctggcctggtcaagcctagcgagacactgagcctgacctgtaccgtgtccggcgatagcatcagcagcggcgattactactggggctggatcagacagcctcctggcaaaggactggaatggatcggccacatctactacagcggcgtgacctactacaaccccagcctgaagtccagagtgaccatcagcgtggacaccagccggaaccagttctccctgaagctgtctagcgtgacagccgccgataccgccgtgtactactgcaccagagaggacagcagcaactggcggagtagaggccagggaacactggtcacagttagctctggatccggcggaggcggaagtggaggcggaggatctggcggcggaggctctttcgaacaggtacagttgaaagaaagcgggcctggactggtagcgccttcccaatctctctccatcacgtgcaccatctctggcttctccctgacttcctatggagttcactgggtgaggcagccccccggcaagggactggaatggctggtcgtcatctggtccgacgggtccacaacctacaactccgctctgaaaagtcggctctctatttctaaagataatagcaagagccaggtgtttctgaaaatgaactctctgcagaccgatgatacggccatttactactgcgcttcacactatggctcaaccttggcattcgcttcctggggccacggaacactggtgaccgtttccgcagccacgcgtatccagaaccctgatcctgccgtgtaccagctgcgggatagcaagagcagcgacaagagcgtgtgtctgttcaccgacttcgacagccagaccaacgtgtcccagagcaaggactccgacgtgtacatcaccgataagtgcgtgctggacatgcggagcatggacttcaagagcaactccgccgtggcctggtccaacaagtccgatttcgcctgcgccaacgccttcaacaacagcattatccccgaggacacattcttcccaagccccgagagcagctgcggctttaccagcgagagctaccagcagggcgtgctgagcgccaccatcctgtacgagatcctgctgggcaaggccaccctgtacgccgtgctggtgtctgccctggtgctgatggctatggtcaagcggaaggacagccgggga

SEQ ID NO: 4668 - DNA, 2697 bp, synthetic construct
  source 1..2697: mol_type = other DNA
atggccttaccagtgaccgccttgctcctgccgctggccttgctgctccacgccgccaggccggaagtgcagctggttgaatctggcggaggactggttcagcctggcggatctctgagactgtcttgtgccgccagcggcttcagcttcagcgacttttggatgagctgggtccgacaggcccctggcaaaggacttgaatgggtcgccacaatcagccaggccggcagcgagaaggactacgtggactctgtgaagggcagattcaccatcagccgggacaacgccaagaagtccctgtacctccagatgaacagcctgagagccgaggacaccgccgtgtactattgtgcctctggcgtgtacagcttcgactacagaggccagggcaccctggtcacagtctcttctggtaccggcggaggcggatctggcggcggaggtagcggtggcggaggatctgaattcgacattgtgatgacccagtctcacaaattcatgtccacatcagtaggagacagggtcagcgtcacctgcaaggccagtcagaatgtgggtaataatgtagcctggtatcaacagaaaccagggcaatctcctaaagtactgatttactcggcatcctaccggtacagtggagtccctgatcgcttcacaggcagtggatctgggacagatttcactctcaccatcagtaatgtgcagtctgaagacttggcagagtatttctgtcagcaatataacacctatccattcacgttcggctcggggacaaagttggaaataaaactcgaggacctgaagaacgtgttcccacctgaggtggccgtgttcgagcctagcgaggccgagatcagccacacccagaaagccaccctcgtgtgcctggctaccggcttctaccccgaccatgtggaactgtcttggtgggtcaacggcaaagaggtgcacagcggcgtgtgtaccgacccccagccactgaaagaacagcccgccctgaacgacagccggtactgcctgagcagcagactgagagtgtccgccaccttctggcagaacccccggaaccacttcagatgccaggtgcagttctacggcctgagcgagaacgacgagtggacccaggacagagccaagcccgtgacccagatcgtgtctgccgaagcctggggcagagccgattgcgacgtgaagctggtggaaaagagcttcgagacagacaccaacctgaacttccagaacctgagcgtgatcggcttcagaatcctgctgctgaaagtggccggctttaacctgctgatgaccctgcggctgtggtccagcagggccaagcgatctggatctggagcaacaaacttctcactactcaaacaagcaggtgacgtggaggagaatcccgggcctactagtatggactggatttggcgcatccttttccttgtcggcgctgctaccggcgcgcattccgggccccagctccagctgcaagagtctggacctggcctggtcaagcctagcgagacactgagcctgacctgtaccgtgtccggcgatagcatcagcagcggcgattactactggggctggatcagacagcctcctggcaaaggactggaatggatcggccacatctactacagcggcgtgacctactacaaccccagcctgaagtccagagtgaccatcagcgtggacaccagccggaaccagttctccctgaagctgtctagcgtgacagccgccgataccgccgtgtactactgcaccagagaggacagcagcaactggcggagtagaggccagggaacactggtcacagttagctctggatccggcggaggcggaagtggaggcggaggatctggcggcggaggctctttcgaagaggtacagctggaggaaagcggtggaggactggtgcaacctggagggtctatgaagctctcttgcgtagcttctgggttcacgttctccaattactggatgaactgggtgcggcagtcccccgagaaaggcctggaatgggtagcagaaattcggttcaagtcccataactatgctacacactttgccgagtctgtcaaaggccggttcactattagtcgagacgacagcaagtcttcagtctacctgcagatgaataacttgcgggcagaggacacaggtatctactactgcaccaggagaatcggcaactccgactatgactggtggtactttgacgtctggggagcaggcaccagcgtgacggtgagttcagcctcaacgcgtatccagaaccctgatcctgccgtgtaccagctgcgggatagcaagagcagcgacaagagcgtgtgtctgttcaccgacttcgacagccagaccaacgtgtcccagagcaaggactccgacgtgtacatcaccgataagtgcgtgctggacatgcggagcatggacttcaagagcaactccgccgtggcctggtccaacaagtccgatttcgcctgcgccaacgccttcaacaacagcattatccccgaggacacattcttcccaagccccgagagcagctgcggctttaccagcgagagctaccagcagggcgtgctgagcgccaccatcctgtacgagatcctgctgggcaaggccaccctgtacgccgtgctggtgtctgccctggtgctgatggctatggtcaagcggaaggacagccgggga

SEQ ID NO: 4669 - DNA, 2676 bp, synthetic construct
  source 1..2676: mol_type = other DNA
atggccttaccagtgaccgccttgctcctgccgctggccttgctgctccacgccgccaggccggaagtgcagctggttgaatctggcggaggactggttcagcctggcggatctctgagactgtcttgtgccgccagcggcttcagcttcagcgacttttggatgagctgggtccgacaggcccctggcaaaggacttgaatgggtcgccacaatcagccaggccggcagcgagaaggactacgtggactctgtgaagggcagattcaccatcagccgggacaacgccaagaagtccctgtacctccagatgaacagcctgagagccgaggacaccgccgtgtactattgtgcctctggcgtgtacagcttcgactacagaggccagggcaccctggtcacagtctcttctggtaccggcggaggcggatctggcggcggaggtagcggtggcggaggatctgaattcgaccagatcgtgctgacccagtcccccgctattatgtccgcatcaccgggcgaaaaagtgacgatctcctgtagcgcttcatctagcgtctcctacatgtattggtatcaacagaaacctgggtctagcccaaagccgtggatctacagaaccagtaaccttgccagtggggtgccagcccgcttcagcggtagtggcagtggaacttcctatagcctcacaataagcaacatggaggctgaagatgccgctgcctattactgccagcagtaccacagttacccaaccacgttcggcgggggaactaagctcgaagtaaaactcgaggacctgaagaacgtgttcccacctgaggtggccgtgttcgagcctagcgaggccgagatcagccacacccagaaagccaccctcgtgtgcctggctaccggcttctaccccgaccatgtggaactgtcttggtgggtcaacggcaaagaggtgcacagcggcgtgtgtaccgacccccagccactgaaagaacagcccgccctgaacgacagccggtactgcctgagcagcagactgagagtgtccgccaccttctggcagaacccccggaaccacttcagatgccaggtgcagttctacggcctgagcgagaacgacgagtggacccaggacagagccaagcccgtgacccagatcgtgtctgccgaagcctggggcagagccgattgcgacgtgaagctggtggaaaagagcttcgagacagacaccaacctgaacttccagaacctgagcgtgatcggcttcagaatcctgctgctgaaagtggccggctttaacctgctgatgaccctgcggctgtggtccagcagggccaagcgatctggatctggagcaacaaacttctcactactcaaacaagcaggtgacgtggaggagaatcccgggcctactagtatggactggatttggcgcatccttttccttgtcggcgctgctaccggcgcgcattccgggccccagctccagctgcaagagtctggacctggcctggtcaagcctagcgagacactgagcctgacctgtaccgtgtccggcgatagcatcagcagcggcgattactactggggctggatcagacagcctcctggcaaaggactggaatggatcggccacatctactacagcggcgtgacctactacaaccccagcctgaagtccagagtgaccatcagcgtggacaccagccggaaccagttctccctgaagctgtctagcgtgacagccgccgataccgccgtgtactactgcaccagagaggacagcagcaactggcggagtagaggccagggaacactggtcacagttagctctggatccggcggaggcggaagtggaggcggaggatctggcggcggaggctctttcgaagaggtgcagctggtggaatctgggggcggcctggtccaacctaagggatcactcaagctctcttgtgcggccagcggattctctttcaatacctatgctatgaattgggtgagacaggcgcccggaaagggcctcgaatggatagcccatatccggtcaaaatcaaacaatttcgcaacctactatgcggactccgtgaaggaccgattttccatctcccgagatgcctccgagaatattctgttcctgcagatgaataacctcaagacagaggacaccgccatgtactactgtgtgcgccagggcggtgactttcccatggattactgggggcaggggaccagcgtgaccgtgagctctacgcgtatccagaaccctgatcctgccgtgtaccagctgcgggatagcaagagcagcgacaagagcgtgtgtctgttcaccgacttcgacagccagaccaacgtgtcccagagcaaggactccgacgtgtacatcaccgataagtgcgtgctggacatgcggagcatggacttcaagagcaactccgccgtggcctggtccaacaagtccgatttcgcctgcgccaacgccttcaacaacagcattatccccgaggacacattcttcccaagccccgagagcagctgcggctttaccagcgagagctaccagcagggcgtgctgagcgccaccatcctgtacgagatcctgctgggcaaggccaccctgtacgccgtgctggtgtctgccctggtgctgatggctatggtcaagcggaaggacagccgggga

SEQ ID NO: 4670 - DNA, 2673 bp, synthetic construct
  source 1..2673: mol_type = other DNA
atggccttaccagtgaccgccttgctcctgccgctggccttgctgctccacgccgccaggccggaagtgcagctggttgaatctggcggaggactggttcagcctggcggatctctgagactgtcttgtgccgccagcggcttcagcttcagcgacttttggatgagctgggtccgacaggcccctggcaaaggacttgaatgggtcgccacaatcagccaggccggcagcgagaaggactacgtggactctgtgaagggcagattcaccatcagccgggacaacgccaagaagtccctgtacctccagatgaacagcctgagagccgaggacaccgccgtgtactattgtgcctctggcgtgtacagcttcgactacagaggccagggcaccctggtcacagtctcttctggtaccggcggaggcggatctggcggcggaggtagcggtggcggaggatctgaattcgacgacatccagatgacccagagcagcagcagcttcagcgtgagcctgggcgacagagtgaccatcacctgcatggccagcgaggacatctacatcagactggcctggtaccagcagaagcccggcaacgcccccagactgctgatcagcgccgccaccagcctggagaccggcgtgcccagcagattcagcggcagcggcagcggcaaggactacaccctgagcatcaccagcctgcagaccgaggacgtgggcacctactactgccagcagtactggagcagcccctggaccttcggcggcggcaccaagctggagatcaacctcgaggacctgaagaacgtgttcccacctgaggtggccgtgttcgagcctagcgaggccgagatcagccacacccagaaagccaccctcgtgtgcctggctaccggcttctaccccgaccatgtggaactgtcttggtgggtcaacggcaaagaggtgcacagcggcgtgtgtaccgacccccagccactgaaagaacagcccgccctgaacgacagccggtactgcctgagcagcagactgagagtgtccgccaccttctggcagaacccccggaaccacttcagatgccaggtgcagttctacggcctgagcgagaacgacgagtggacccaggacagagccaagcccgtgacccagatcgtgtctgccgaagcctggggcagagccgattgcgacgtgaagctggtggaaaagagcttcgagacagacaccaacctgaacttccagaacctgagcgtgatcggcttcagaatcctgctgctgaaagtggccggctttaacctgctgatgaccctgcggctgtggtccagcagggccaagcgatctggatctggagcaacaaacttctcactactcaaacaagcaggtgacgtggaggagaatcccgggcctactagtatggactggatttggcgcatccttttccttgtcggcgctgctaccggcgcgcattccgggccccagctccagctgcaagagtctggacctggcctggtcaagcctagcgagacactgagcctgacctgtaccgtgtccggcgatagcatcagcagcggcgattactactggggctggatcagacagcctcctggcaaaggactggaatggatcggccacatctactacagcggcgtgacctactacaaccccagcctgaagtccagagtgaccatcagcgtggacaccagccggaaccagttctccctgaagctgtctagcgtgacagccgccgataccgccgtgtactactgcaccagagaggacagcagcaactggcggagtagaggccagggaacactggtcacagttagctctggatccggcggaggcggaagtggaggcggaggatctggcggcggaggctctttcgaagacgtgcagctgcaggagagcggccccggcctggtgaagcccagccagagcctgagcctgacctgcaccgtgaccggctacagcatcaccagcgactacacctggaactggatcagacagttccccggcaacaagctggagtggatgggctacatcacctacagcggcagcaccagctacaaccccagcctgaagagcagaaacagcatcaccagagacaccagcaagaaccagttcttcctgcagctgaacagcgtgaccaccgaggacaccgccacctactactgcgccagactgggcagaagatacacaatggactactggggccagggcaccagcgtgaccgtgagcagcacgcgtatccagaaccctgatcctgccgtgtaccagctgcgggatagcaagagcagcgacaagagcgtgtgtctgttcaccgacttcgacagccagaccaacgtgtcccagagcaaggactccgacgtgtacatcaccgataagtgcgtgctggacatgcggagcatggacttcaagagcaactccgccgtggcctggtccaacaagtccgatttcgcctgcgccaacgccttcaacaacagcattatccccgaggacacattcttcccaagccccgagagcagctgcggctttaccagcgagagctaccagcagggcgtgctgagcgccaccatcctgtacgagatcctgctgggcaaggccaccctgtacgccgtgctggtgtctgccctggtgctgatggctatggtcaagcggaaggacagccgggga

SEQ ID NO: 4671 - DNA, 2682 bp, synthetic construct
  source 1..2682: mol_type = other DNA
atggccttaccagtgaccgccttgctcctgccgctggccttgctgctccacgccgccaggccggaagtgcagctggttgaatctggcggaggactggttcagcctggcggatctctgagactgtcttgtgccgccagcggcttcagcttcagcgacttttggatgagctgggtccgacaggcccctggcaaaggacttgaatgggtcgccacaatcagccaggccggcagcgagaaggactacgtggactctgtgaagggcagattcaccatcagccgggacaacgccaagaagtccctgtacctccagatgaacagcctgagagccgaggacaccgccgtgtactattgtgcctctggcgtgtacagcttcgactacagaggccagggcaccctggtcacagtctcttctggtaccggcggaggcggatctggcggcggaggtagcggtggcggaggatctgaattcgacgacatccagatgacccagagccccagcagcctgtctgccagcgtgggcgacagagtgaccatcacctgtagagccagccagagcatcagcagctacctgaactggtatcagcagaagcccggcaaggcccccaaactgctgatctacgacgccagcaacctggaaaccggcgtgcccagcagattttccggcagcggctctggcaccgacttcaccttcaccatcagctccctccagcccgaggacattgccacctactactgccagcagtacgacaacctgcccctgacctttggcggaggcaccaaggtggacatcaagagactcgaggacctgaagaacgtgttcccacctgaggtggccgtgttcgagcctagcgaggccgagatcagccacacccagaaagccaccctcgtgtgcctggctaccggcttctaccccgaccatgtggaactgtcttggtgggtcaacggcaaagaggtgcacagcggcgtgtgtaccgacccccagccactgaaagaacagcccgccctgaacgacagccggtactgcctgagcagcagactgagagtgtccgccaccttctggcagaacccccggaaccacttcagatgccaggtgcagttctacggcctgagcgagaacgacgagtggacccaggacagagccaagcccgtgacccagatcgtgtctgccgaagcctggggcagagccgattgcgacgtgaagctggtggaaaagagcttcgagacagacaccaacctgaacttccagaacctgagcgtgatcggcttcagaatcctgctgctgaaagtggccggctttaacctgctgatgaccctgcggctgtggtccagcagggccaagcgatctggatctggagcaacaaacttctcactactcaaacaagcaggtgacgtggaggagaatcccgggcctactagtatggactggatttggcgcatccttttccttgtcggcgctgctaccggcgcgcattccgggccccagctccagctgcaagagtctggacctggcctggtcaagcctagcgagacactgagcctgacctgtaccgtgtccggcgatagcatcagcagcggcgattactactggggctggatcagacagcctcctggcaaaggactggaatggatcggccacatctactacagcggcgtgacctactacaaccccagcctgaagtccagagtgaccatcagcgtggacaccagccggaaccagttctccctgaagctgtctagcgtgacagccgccgataccgccgtgtactactgcaccagagaggacagcagcaactggcggagtagaggccagggaacactggtcacagttagctctggatccggcggaggcggaagtggaggcggaggatctggcggcggaggctctttcgaacaggtgcaactggtggaatctggcggcggagtggtgcagcctggcagaagcctgagactgagctgtgccgccagcggcttcacctttagcagctacgccatgcactgggtgcgccaggcccctggaaaaggcctggaatgggtggccgtgatctcctacgacggctccaacaagtattacgccgacagcgtgaagggccggttcaccatctccagagacaacagcaagaacaccctgtacctccagatgaacagcctgcgggccgaggacaccgccgtgtactattgtgccagggctcacaacagcagctcttggagcttcgactactggggccagggcaccctcgtgaccgtgtcatctacgcgtatccagaaccctgatcctgccgtgtaccagctgcgggatagcaagagcagcgacaagagcgtgtgtctgttcaccgacttcgacagccagaccaacgtgtcccagagcaaggactccgacgtgtacatcaccgataagtgcgtgctggacatgcggagcatggacttcaagagcaactccgccgtggcctggtccaacaagtccgatttcgcctgcgccaacgccttcaacaacagcattatccccgaggacacattcttcccaagccccgagagcagctgcggctttaccagcgagagctaccagcagggcgtgctgagcgccaccatcctgtacgagatcctgctgggcaaggccaccctgtacgccgtgctggtgtctgccctggtgctgatggctatggtcaagcggaaggacagccgggga

SEQ ID NO: 4672 - DNA, 2709 bp, synthetic construct
  source 1..2709: mol_type = other DNA
atggccttaccagtgaccgccttgctcctgccgctggccttgctgctccacgccgccaggccggaagtgcagctggttgaatctggcggaggactggttcagcctggcggatctctgagactgtcttgtgccgccagcggcttcagcttcagcgacttttggatgagctgggtccgacaggcccctggcaaaggacttgaatgggtcgccacaatcagccaggccggcagcgagaaggactacgtggactctgtgaagggcagattcaccatcagccgggacaacgccaagaagtccctgtacctccagatgaacagcctgagagccgaggacaccgccgtgtactattgtgcctctggcgtgtacagcttcgactacagaggccagggcaccctggtcacagtctcttctggtaccggcggaggcggatctggcggcggaggtagcggtggcggaggatctgaattcgacgacgtcgtgatgacccagagccctctgagcctgcctgtgtccctgggcgatcaggccagcatctcctgcagatccagccagagactggtgcacagcaacggcaacacctacctgcactggtatctgcagaagcccggccagagccccaagctgctgatctaccgggtgtccaacagattccccggcgtgcccgatagattcagcggctctggcagcggcaccgacttcaccctgaagatcagccgggtggaagccgaggacctgggcatctatttctgcagccagagcacccacgtgccctacacctttggcggaggcaccaagctggaaatcaagcggctcgaggacctgaagaacgtgttcccacctgaggtggccgtgttcgagcctagcgaggccgagatcagccacacccagaaagccaccctcgtgtgcctggctaccggcttctaccccgaccatgtggaactgtcttggtgggtcaacggcaaagaggtgcacagcggcgtgtgtaccgacccccagccactgaaagaacagcccgccctgaacgacagccggtactgcctgagcagcagactgagagtgtccgccaccttctggcagaacccccggaaccacttcagatgccaggtgcagttctacggcctgagcgagaacgacgagtggacccaggacagagccaagcccgtgacccagatcgtgtctgccgaagcctggggcagagccgattgcgacgtgaagctggtggaaaagagcttcgagacagacaccaacctgaacttccagaacctgagcgtgatcggcttcagaatcctgctgctgaaagtggccggctttaacctgctgatgaccctgcggctgtggtccagcagggccaagcgatctggatctggagcaacaaacttctcactactcaaacaagcaggtgacgtggaggagaatcccgggcctactagtatggactggatttggcgcatccttttccttgtcggcgctgctaccggcgcgcattccgggccccagctccagctgcaagagtctggacctggcctggtcaagcctagcgagacactgagcctgacctgtaccgtgtccggcgatagcatcagcagcggcgattactactggggctggatcagacagcctcctggcaaaggactggaatggatcggccacatctactacagcggcgtgacctactacaaccccagcctgaagtccagagtgaccatcagcgtggacaccagccggaaccagttctccctgaagctgtctagcgtgacagccgccgataccgccgtgtactactgcaccagagaggacagcagcaactggcggagtagaggccagggaacactggtcacagttagctctggatccggcggaggcggaagtggaggcggaggatctggcggcggaggctctttcgaagaagtgcggctgcagcagtctggccccgacctgattaagcctggggccagcgtgaagatgagctgcaaggccagcggctacaccttcaccggctacgtgatgcactgggtcaagcagaggccaggccagggcctggaatggatcggcttcatcaacccctacaacgacgacatccagagcaacgagcggttccggggcaaggccaccctgaccagcgataagagcagcaccaccgcctacatggaactgagcagcctgacctccgaggacagcgccgtgtactactgtgctaggggagccggctacaacttcgacggggcctacagattcttcgacttttggggccagggcaccacactgaccgtgtcctctacgcgtatccagaaccctgatcctgccgtgtaccagctgcgggatagcaagagcagcgacaagagcgtgtgtctgttcaccgacttcgacagccagaccaacgtgtcccagagcaaggactccgacgtgtacatcaccgataagtgcgtgctggacatgcggagcatggacttcaagagcaactccgccgtggcctggtccaacaagtccgatttcgcctgcgccaacgccttcaacaacagcattatccccgaggacacattcttcccaagccccgagagcagctgcggctttaccagcgagagctaccagcagggcgtgctgagcgccaccatcctgtacgagatcctgctgggcaaggccaccctgtacgccgtgctggtgtctgccctggtgctgatggctatggtcaagcggaaggacagccgggga

SEQ ID NO: 4673 - DNA, 2682 bp, synthetic construct
  source 1..2682: mol_type = other DNA
atggccttaccagtgaccgccttgctcctgccgctggccttgctgctccacgccgccaggccggaagtgcagctggttgaatctggcggaggactggttcagcctggcggatctctgagactgtcttgtgccgccagcggcttcagcttcagcgacttttggatgagctgggtccgacaggcccctggcaaaggacttgaatgggtcgccacaatcagccaggccggcagcgagaaggactacgtggactctgtgaagggcagattcaccatcagccgggacaacgccaagaagtccctgtacctccagatgaacagcctgagagccgaggacaccgccgtgtactattgtgcctctggcgtgtacagcttcgactacagaggccagggcaccctggtcacagtctcttctggtaccggcggaggcggatctggcggcggaggtagcggtggcggaggatctgaattcgacagctacgagctgacccagcctcctagcgtgtccgtgtctcctggacagaccgccaccatctcttgcagcggcgatcaactgggcgggaagtacggccactggtatcagaagaagcccggccagagccccgtgctggtgctgtaccaggacagaaaacggcctgccggcatccccgagagattcagcggaagcagcagcggcaacaccatcaccctgaccatcagcggcacccaggccgtggatgaggccgactactactgccaggcttgggacaccaatctgggcggcgtgttcggcggaggcaccaaagtgacagtgctgggacagctcgaggacctgaagaacgtgttcccacctgaggtggccgtgttcgagcctagcgaggccgagatcagccacacccagaaagccaccctcgtgtgcctggctaccggcttctaccccgaccatgtggaactgtcttggtgggtcaacggcaaagaggtgcacagcggcgtgtgtaccgacccccagccactgaaagaacagcccgccctgaacgacagccggtactgcctgagcagcagactgagagtgtccgccaccttctggcagaacccccggaaccacttcagatgccaggtgcagttctacggcctgagcgagaacgacgagtggacccaggacagagccaagcccgtgacccagatcgtgtctgccgaagcctggggcagagccgattgcgacgtgaagctggtggaaaagagcttcgagacagacaccaacctgaacttccagaacctgagcgtgatcggcttcagaatcctgctgctgaaagtggccggctttaacctgctgatgaccctgcggctgtggtccagcagggccaagcgatctggatctggagcaacaaacttctcactactcaaacaagcaggtgacgtggaggagaatcccgggcctactagtatggactggatttggcgcatccttttccttgtcggcgctgctaccggcgcgcattccgggccccagctccagctgcaagagtctggacctggcctggtcaagcctagcgagacactgagcctgacctgtaccgtgtccggcgatagcatcagcagcggcgattactactggggctggatcagacagcctcctggcaaaggactggaatggatcggccacatctactacagcggcgtgacctactacaaccccagcctgaagtccagagtgaccatcagcgtggacaccagccggaaccagttctccctgaagctgtctagcgtgacagccgccgataccgccgtgtactactgcaccagagaggacagcagcaactggcggagtagaggccagggaacactggtcacagttagctctggatccggcggaggcggaagtggaggcggaggatctggcggcggaggctctttcgaacaggtgcaactggtggaaagcggagccgaagtgaagaaacctggggccagcgtgaaggtgtcctgcaaggccagcggctacacctttaccggctactacatgcactgggtgcgccaggctccaggccagggactggaatggatgggccggatcaaccccaatagcggcggcaccaactacgcccagaaattccagggcagagtgaccatgaccagagacaccagcatcagcaccgcctacatggaactgagccggctgagaagcgacgacaccgccgtgtactactgcgccagccctagaggcagaggcagcgccttcgatatttggggccagggcacactcgtgaccgtgtcctctacgcgtatccagaaccctgatcctgccgtgtaccagctgcgggatagcaagagcagcgacaagagcgtgtgtctgttcaccgacttcgacagccagaccaacgtgtcccagagcaaggactccgacgtgtacatcaccgataagtgcgtgctggacatgcggagcatggacttcaagagcaactccgccgtggcctggtccaacaagtccgatttcgcctgcgccaacgccttcaacaacagcattatccccgaggacacattcttcccaagccccgagagcagctgcggctttaccagcgagagctaccagcagggcgtgctgagcgccaccatcctgtacgagatcctgctgggcaaggccaccctgtacgccgtgctggtgtctgccctggtgctgatggctatggtcaagcggaaggacagccgggga

SEQ ID NO: 4674 - DNA, 2691 bp, synthetic construct
  source 1..2691: mol_type = other DNA
atggccttaccagtgaccgccttgctcctgccgctggccttgctgctccacgccgccaggccggaagtgcagctggttgaatctggcggaggactggttcagcctggcggatctctgagactgtcttgtgccgccagcggcttcagcttcagcgacttttggatgagctgggtccgacaggcccctggcaaaggacttgaatgggtcgccacaatcagccaggccggcagcgagaaggactacgtggactctgtgaagggcagattcaccatcagccgggacaacgccaagaagtccctgtacctccagatgaacagcctgagagccgaggacaccgccgtgtactattgtgcctctggcgtgtacagcttcgactacagaggccagggcaccctggtcacagtctcttctggtaccggcggaggcggatctggcggcggaggtagcggtggcggaggatctgaattcgacaacttcatgctgacccagccccacagcgtgtccgagagccctggcaagaccgtgaccatctcctgcaccagaagcagcggctctatcgccagcaaatacgtgcagtggtatcagcagaggcccggcagcagccctaccaccgtgatctacgaggacaaccagaggcctagcggcgtgcccgatagattcagcggcagcatcgacaccagcagcaacagcgccagcctgaccatcagcggcctgagaacagaggacgaggccgactactactgccacagctacgacagcaacaaccactccgtgttcggcggaggcaccaaagtgacagtgctgggacagctcgaggacctgaagaacgtgttcccacctgaggtggccgtgttcgagcctagcgaggccgagatcagccacacccagaaagccaccctcgtgtgcctggctaccggcttctaccccgaccatgtggaactgtcttggtgggtcaacggcaaagaggtgcacagcggcgtgtgtaccgacccccagccactgaaagaacagcccgccctgaacgacagccggtactgcctgagcagcagactgagagtgtccgccaccttctggcagaacccccggaaccacttcagatgccaggtgcagttctacggcctgagcgagaacgacgagtggacccaggacagagccaagcccgtgacccagatcgtgtctgccgaagcctggggcagagccgattgcgacgtgaagctggtggaaaagagcttcgagacagacaccaacctgaacttccagaacctgagcgtgatcggcttcagaatcctgctgctgaaagtggccggctttaacctgctgatgaccctgcggctgtggtccagcagggccaagcgatctggatctggagcaacaaacttctcactactcaaacaagcaggtgacgtggaggagaatcccgggcctactagtatggactggatttggcgcatccttttccttgtcggcgctgctaccggcgcgcattccgggccccagctccagctgcaagagtctggacctggcctggtcaagcctagcgagacactgagcctgacctgtaccgtgtccggcgatagcatcagcagcggcgattactactggggctggatcagacagcctcctggcaaaggactggaatggatcggccacatctactacagcggcgtgacctactacaaccccagcctgaagtccagagtgaccatcagcgtggacaccagccggaaccagttctccctgaagctgtctagcgtgacagccgccgataccgccgtgtactactgcaccagagaggacagcagcaactggcggagtagaggccagggaacactggtcacagttagctctggatccggcggaggcggaagtggaggcggaggatctggcggcggaggctctttcgaagaagtgcaactggtggaaagcgggggaggcgtggtgcagccaggcggatctctgagactgagctgtgccgccagcggcttcaccttcagcagctacgccatgagctgggtgcgccaggcccctggaaaaggcctggaatgggtgtccgccatctctggctctggcggcagcacctactacgccgatagcgtgaagggccggttcagcatcagccgggacaacagcaagaacaccctgtacctccagatgaacagcctgcgggccgaggacaccgccgtgtactactgtgccagaaccagaagctccggggccttcgacatctggggccagggaacactcgtgaccgtgtcctctacgcgtatccagaaccctgatcctgccgtgtaccagctgcgggatagcaagagcagcgacaagagcgtgtgtctgttcaccgacttcgacagccagaccaacgtgtcccagagcaaggactccgacgtgtacatcaccgataagtgcgtgctggacatgcggagcatggacttcaagagcaactccgccgtggcctggtccaacaagtccgatttcgcctgcgccaacgccttcaacaacagcattatccccgaggacacattcttcccaagccccgagagcagctgcggctttaccagcgagagctaccagcagggcgtgctgagcgccaccatcctgtacgagatcctgctgggcaaggccaccctgtacgccgtgctggtgtctgccctggtgctgatggctatggtcaagcggaaggacagccgggga

SEQ ID NO: 4675 - DNA, 2676 bp, synthetic construct
  source 1..2676: mol_type = other DNA
atggccttaccagtgaccgccttgctcctgccgctggccttgctgctccacgccgccaggccggaagtgcagctggttgaatctggcggaggactggttcagcctggcggatctctgagactgtcttgtgccgccagcggcttcagcttcagcgacttttggatgagctgggtccgacaggcccctggcaaaggacttgaatgggtcgccacaatcagccaggccggcagcgagaaggactacgtggactctgtgaagggcagattcaccatcagccgggacaacgccaagaagtccctgtacctccagatgaacagcctgagagccgaggacaccgccgtgtactattgtgcctctggcgtgtacagcttcgactacagaggccagggcaccctggtcacagtctcttctggtaccggcggaggcggatctggcggcggaggtagcggtggcggaggatctgaattcgacatccagatgaaccagagccccagcagcctgagcgccagcctgggcgataccatcaccatcacctgtcacgccagccagaacatcaacgtgtggctgagctggtatcagcagaagcccggcaacatccccaagctgctgatctacaaggccagcaacctgcacaccggcgtgcccagcagattttctggcagcggctctggcaccggcttcaccattaccatcagctccctccagcccgaggacattgccacctactactgccagcagggccagagctacccctggacatttggcggaggcaccaagctggaaatcaagagactcgaggacctgaagaacgtgttcccacctgaggtggccgtgttcgagcctagcgaggccgagatcagccacacccagaaagccaccctcgtgtgcctggctaccggcttctaccccgaccatgtggaactgtcttggtgggtcaacggcaaagaggtgcacagcggcgtgtgtaccgacccccagccactgaaagaacagcccgccctgaacgacagccggtactgcctgagcagcagactgagagtgtccgccaccttctggcagaacccccggaaccacttcagatgccaggtgcagttctacggcctgagcgagaacgacgagtggacccaggacagagccaagcccgtgacccagatcgtgtctgccgaagcctggggcagagccgattgcgacgtgaagctggtggaaaagagcttcgagacagacaccaacctgaacttccagaacctgagcgtgatcggcttcagaatcctgctgctgaaagtggccggctttaacctgctgatgaccctgcggctgtggtccagcagggccaagcgatctggatctggagcaacaaacttctcactactcaaacaagcaggtgacgtggaggagaatcccgggcctactagtatggactggatttggcgcatccttttccttgtcggcgctgctaccggcgcgcattccgggccccagctccagctgcaagagtctggacctggcctggtcaagcctagcgagacactgagcctgacctgtaccgtgtccggcgatagcatcagcagcggcgattactactggggctggatcagacagcctcctggcaaaggactggaatggatcggccacatctactacagcggcgtgacctactacaaccccagcctgaagtccagagtgaccatcagcgtggacaccagccggaaccagttctccctgaagctgtctagcgtgacagccgccgataccgccgtgtactactgcaccagagaggacagcagcaactggcggagtagaggccagggaacactggtcacagttagctctggatccggcggaggcggaagtggaggcggaggatctggcggcggaggctctttcgaagaagtgcaactccagcagagcggcccagagcttgtgaagcctggcgcttccgtgaagattagctgcaaagccagcggctacagcttcaccggctacttcatgaactgggtcaagcagagccacggcaagagcctggagtacatcggcagattcaacccctacaacggcgagacactgtacaaccagaagttcaagggcaaggccaccctgaccgtggacaagagcagcagcaccgtgcacatggaactgctgagcgtgaccagcgaggacagcgccgtgtactactgtggcagaagcggcaacgacgacgctatggactattggggccagggcaccagcgtgaccgtgtctagtgctacgcgtatccagaaccctgatcctgccgtgtaccagctgcgggatagcaagagcagcgacaagagcgtgtgtctgttcaccgacttcgacagccagaccaacgtgtcccagagcaaggactccgacgtgtacatcaccgataagtgcgtgctggacatgcggagcatggacttcaagagcaactccgccgtggcctggtccaacaagtccgatttcgcctgcgccaacgccttcaacaacagcattatccccgaggacacattcttcccaagccccgagagcagctgcggctttaccagcgagagctaccagcagggcgtgctgagcgccaccatcctgtacgagatcctgctgggcaaggccaccctgtacgccgtgctggtgtctgccctggtgctgatggctatggtcaagcggaaggacagccgggga

SEQ ID NO: 4676 - DNA, 2679 bp, synthetic construct
  source 1..2679: mol_type = other DNA
atggccttaccagtgaccgccttgctcctgccgctggccttgctgctccacgccgccaggccggaagtgcagctggttgaatctggcggaggactggttcagcctggcggatctctgagactgtcttgtgccgccagcggcttcagcttcagcgacttttggatgagctgggtccgacaggcccctggcaaaggacttgaatgggtcgccacaatcagccaggccggcagcgagaaggactacgtggactctgtgaagggcagattcaccatcagccgggacaacgccaagaagtccctgtacctccagatgaacagcctgagagccgaggacaccgccgtgtactattgtgcctctggcgtgtacagcttcgactacagaggccagggcaccctggtcacagtctcttctggtaccggcggaggcggatctggcggcggaggtagcggtggcggaggatctgaattcgagatcgtgctgacacagagccctgccaccctgtctctgagccctggcgaaagagccaccctgagctgtagagccagccagagcgtgcggagctacctggcctggtatcagcagaagcctggacaggcccccagactgctgatctacgacgccagcaatcgggccacaggcatccccgccagattttctggctctggcagcggcaccgacttcaccctgacaatcagcagcctggaacccgaggacttcgccgtgtactactgccagcagcggagcaactggccccctacctttggacagggcaccaaggtggaaatcaagctcgaggacctgaagaacgtgttcccacctgaggtggccgtgttcgagcctagcgaggccgagatcagccacacccagaaagccaccctcgtgtgcctggctaccggcttctaccccgaccatgtggaactgtcttggtgggtcaacggcaaagaggtgcacagcggcgtgtgtaccgacccccagccactgaaagaacagcccgccctgaacgacagccggtactgcctgagcagcagactgagagtgtccgccaccttctggcagaacccccggaaccacttcagatgccaggtgcagttctacggcctgagcgagaacgacgagtggacccaggacagagccaagcccgtgacccagatcgtgtctgccgaagcctggggcagagccgattgcgacgtgaagctggtggaaaagagcttcgagacagacaccaacctgaacttccagaacctgagcgtgatcggcttcagaatcctgctgctgaaagtggccggctttaacctgctgatgaccctgcggctgtggtccagcagggccaagcgatctggatctggagcaacaaacttctcactactcaaacaagcaggtgacgtggaggagaatcccgggcctactagtatggactggatttggcgcatccttttccttgtcggcgctgctaccggcgcgcattccgggccccagctccagctgcaagagtctggacctggcctggtcaagcctagcgagacactgagcctgacctgtaccgtgtccggcgatagcatcagcagcggcgattactactggggctggatcagacagcctcctggcaaaggactggaatggatcggccacatctactacagcggcgtgacctactacaaccccagcctgaagtccagagtgaccatcagcgtggacaccagccggaaccagttctccctgaagctgtctagcgtgacagccgccgataccgccgtgtactactgcaccagagaggacagcagcaactggcggagtagaggccagggaacactggtcacagttagctctggatccggcggaggcggaagtggaggcggaggatctggcggcggaggctctttcgaacaactccaggtgcaggaatctggccccggactcgtgaagcccagcgagacactgagcctgacctgtaccgtgtccggcggcagcatcagcaacagctacttctcctggggctggatcagacagccccctggcaagggcctggaatggatcggcagcttctactacggcgagaaaacctactacaaccccagcctgaagtccagagccaccatcagcatcgacaccagcaagagccagttctccctgaagctgagcagcgtgacagccgccgacaccgccgtgtattattgccccagaggccccaccatgatccggggcgtgatcgactcttggggccagggaacactcgtgaccgtgtcctctacgcgtatccagaaccctgatcctgccgtgtaccagctgcgggatagcaagagcagcgacaagagcgtgtgtctgttcaccgacttcgacagccagaccaacgtgtcccagagcaaggactccgacgtgtacatcaccgataagtgcgtgctggacatgcggagcatggacttcaagagcaactccgccgtggcctggtccaacaagtccgatttcgcctgcgccaacgccttcaacaacagcattatccccgaggacacattcttcccaagccccgagagcagctgcggctttaccagcgagagctaccagcagggcgtgctgagcgccaccatcctgtacgagatcctgctgggcaaggccaccctgtacgccgtgctggtgtctgccctggtgctgatggctatggtcaagcggaaggacagccgggga

SEQ ID NO: 4677 - DNA, 2706 bp, synthetic construct
  source 1..2706: mol_type = other DNA
atggccttaccagtgaccgccttgctcctgccgctggccttgctgctccacgccgccaggccggaagtgcagctggttgaatctggcggaggactggttcagcctggcggatctctgagactgtcttgtgccgccagcggcttcagcttcagcgacttttggatgagctgggtccgacaggcccctggcaaaggacttgaatgggtcgccacaatcagccaggccggcagcgagaaggactacgtggactctgtgaagggcagattcaccatcagccgggacaacgccaagaagtccctgtacctccagatgaacagcctgagagccgaggacaccgccgtgtactattgtgcctctggcgtgtacagcttcgactacagaggccagggcaccctggtcacagtctcttctggtaccggcggaggcggatctggcggcggaggtagcggtggcggaggatctgaattcgacatcgtgatgacccagacccccctgagcctgcctgtgacacctggcgagcctgccagcatctcctgcagaagcagcagaagcctgctggacagcgacgacggcaacacctacctggactggtatctgcagaaacccggccagagcccccaactgctgatctacaccctgagctacagagccagcggcgtgcccgatagattttccggctctggcagcggcaccgacttcaccctgaagatcagccgggtggaagccgaggacgtgggcgtgtactactgtatgcagcgggtggaatttcccatcaccttcggccagggcaccagactggaaatcaagagactcgaggacctgaagaacgtgttcccacctgaggtggccgtgttcgagcctagcgaggccgagatcagccacacccagaaagccaccctcgtgtgcctggctaccggcttctaccccgaccatgtggaactgtcttggtgggtcaacggcaaagaggtgcacagcggcgtgtgtaccgacccccagccactgaaagaacagcccgccctgaacgacagccggtactgcctgagcagcagactgagagtgtccgccaccttctggcagaacccccggaaccacttcagatgccaggtgcagttctacggcctgagcgagaacgacgagtggacccaggacagagccaagcccgtgacccagatcgtgtctgccgaagcctggggcagagccgattgcgacgtgaagctggtggaaaagagcttcgagacagacaccaacctgaacttccagaacctgagcgtgatcggcttcagaatcctgctgctgaaagtggccggctttaacctgctgatgaccctgcggctgtggtccagcagggccaagcgatctggatctggagcaacaaacttctcactactcaaacaagcaggtgacgtggaggagaatcccgggcctactagtatggactggatttggcgcatccttttccttgtcggcgctgctaccggcgcgcattccgggccccagctccagctgcaagagtctggacctggcctggtcaagcctagcgagacactgagcctgacctgtaccgtgtccggcgatagcatcagcagcggcgattactactggggctggatcagacagcctcctggcaaaggactggaatggatcggccacatctactacagcggcgtgacctactacaaccccagcctgaagtccagagtgaccatcagcgtggacaccagccggaaccagttctccctgaagctgtctagcgtgacagccgccgataccgccgtgtactactgcaccagagaggacagcagcaactggcggagtagaggccagggaacactggtcacagttagctctggatccggcggaggcggaagtggaggcggaggatctggcggcggaggctctttcgaacaggtgcaactggtggaatctggcgggggagtggtgcagcctggcagatccctgagactgagctgtgccgccagcggcttcatcttcagcagatacggaatgcactgggtgcgccaggcccctggcaagggactgaaatgggtggccgtgatttggtacgacggcagcaacaagctgtacgccgacagcgtgaagggccggttcaccatcagcagagacaacagcaagaacaccctgtacctgcagatgaacagcctgcgggccgaggacaccgccgtgtactattgcgccagagactactacgacaacagccggcaccactggggcttcgactattggggccagggaacccttgtgaccgtgtcctctacgcgtatccagaaccctgatcctgccgtgtaccagctgcgggatagcaagagcagcgacaagagcgtgtgtctgttcaccgacttcgacagccagaccaacgtgtcccagagcaaggactccgacgtgtacatcaccgataagtgcgtgctggacatgcggagcatggacttcaagagcaactccgccgtggcctggtccaacaagtccgatttcgcctgcgccaacgccttcaacaacagcattatccccgaggacacattcttcccaagccccgagagcagctgcggctttaccagcgagagctaccagcagggcgtgctgagcgccaccatcctgtacgagatcctgctgggcaaggccaccctgtacgccgtgctggtgtctgccctggtgctgatggctatggtcaagcggaaggacagccgggga

SEQ ID NO: 4678 - DNA, 2676 bp, synthetic construct
  source 1..2676: mol_type = other DNA
atggccttaccagtgaccgccttgctcctgccgctggccttgctgctccacgccgccaggccggaagtgcagctggttgaatctggcggaggactggttcagcctggcggatctctgagactgtcttgtgccgccagcggcttcagcttcagcgacttttggatgagctgggtccgacaggcccctggcaaaggacttgaatgggtcgccacaatcagccaggccggcagcgagaaggactacgtggactctgtgaagggcagattcaccatcagccgggacaacgccaagaagtccctgtacctccagatgaacagcctgagagccgaggacaccgccgtgtactattgtgcctctggcgtgtacagcttcgactacagaggccagggcaccctggtcacagtctcttctggtaccggcggaggcggatctggcggcggaggtagcggtggcggaggatctgaattcgagatccagatgacccagagccccagcagcatgtctgccagcctgggcgacaccatcaccatcacatgccaggccacccaggacatcttcaagaacctgaactggtatcagcagaagcccggcaagccccccagcctgctgatctactatgccaccgaactggccgagggcgtgcccagcagattttctggcagcggcagcggctccgactacagcctgaccatcagcaacctggaaagcgaggacttcgccgcctactactgcctccagttcttcgagttcccattcaccttcggctccggcaccaagctggaaatgaagctcgaggacctgaagaacgtgttcccacctgaggtggccgtgttcgagcctagcgaggccgagatcagccacacccagaaagccaccctcgtgtgcctggctaccggcttctaccccgaccatgtggaactgtcttggtgggtcaacggcaaagaggtgcacagcggcgtgtgtaccgacccccagccactgaaagaacagcccgccctgaacgacagccggtactgcctgagcagcagactgagagtgtccgccaccttctggcagaacccccggaaccacttcagatgccaggtgcagttctacggcctgagcgagaacgacgagtggacccaggacagagccaagcccgtgacccagatcgtgtctgccgaagcctggggcagagccgattgcgacgtgaagctggtggaaaagagcttcgagacagacaccaacctgaacttccagaacctgagcgtgatcggcttcagaatcctgctgctgaaagtggccggctttaacctgctgatgaccctgcggctgtggtccagcagggccaagcgatctggatctggagcaacaaacttctcactactcaaacaagcaggtgacgtggaggagaatcccgggcctactagtatggactggatttggcgcatccttttccttgtcggcgctgctaccggcgcgcattccgggccccagctccagctgcaagagtctggacctggcctggtcaagcctagcgagacactgagcctgacctgtaccgtgtccggcgatagcatcagcagcggcgattactactggggctggatcagacagcctcctggcaaaggactggaatggatcggccacatctactacagcggcgtgacctactacaaccccagcctgaagtccagagtgaccatcagcgtggacaccagccggaaccagttctccctgaagctgtctagcgtgacagccgccgataccgccgtgtactactgcaccagagaggacagcagcaactggcggagtagaggccagggaacactggtcacagttagctctggatccggcggaggcggaagtggaggcggaggatctggcggcggaggctctttcgaacaggtgcaactccagcagtctggcgctgagcttgtgcggcctggcacctctgtgaaggtgtcctgtaaagccagcggctacgtgttcaccaactactggatcgagtggatcaagcagcggccaggccagggcctggaatggatcggcgtgatgaatccaggcagcggcgagacaacctacaacgagaagttcaagggcaaggccaccctgaccgccgacaagagcagcagcacagcctacatgcaactgtcctccctgaccagcgtggacagcgccgtgtacttctgcgccagggaccacgaccgggactactacgctatggactactggggccagggcaccagcgtgaccgtgtcatctacgcgtatccagaaccctgatcctgccgtgtaccagctgcgggatagcaagagcagcgacaagagcgtgtgtctgttcaccgacttcgacagccagaccaacgtgtcccagagcaaggactccgacgtgtacatcaccgataagtgcgtgctggacatgcggagcatggacttcaagagcaactccgccgtggcctggtccaacaagtccgatttcgcctgcgccaacgccttcaacaacagcattatccccgaggacacattcttcccaagccccgagagcagctgcggctttaccagcgagagctaccagcagggcgtgctgagcgccaccatcctgtacgagatcctgctgggcaaggccaccctgtacgccgtgctggtgtctgccctggtgctgatggctatggtcaagcggaaggacagccgggga

SEQ ID NO: 4679 - DNA, 2667 bp, synthetic construct
  source 1..2667: mol_type = other DNA
atggccttaccagtgaccgccttgctcctgccgctggccttgctgctccacgccgccaggccggaagtgcagctggttgaatctggcggaggactggttcagcctggcggatctctgagactgtcttgtgccgccagcggcttcagcttcagcgacttttggatgagctgggtccgacaggcccctggcaaaggacttgaatgggtcgccacaatcagccaggccggcagcgagaaggactacgtggactctgtgaagggcagattcaccatcagccgggacaacgccaagaagtccctgtacctccagatgaacagcctgagagccgaggacaccgccgtgtactattgtgcctctggcgtgtacagcttcgactacagaggccagggcaccctggtcacagtctcttctggtaccggcggaggcggatctggcggcggaggtagcggtggcggaggatctgaattcgacatcctgctgacacagagccccgccatcctgtccgtgtctccaggcgagagagtgtcctttagctgccgggccagccagaacatcggcaccagcatccactggtatcagcagcggaccaacggcagccccagactgctgattaagtacgccagcgagtccgtgtccggcatccccagcagattttctggcagcggctccggcaccgacttcaccctgagcatcaacagcgtggaaagcgaggacattgccgactactactgccagcacaccaatagctggcccaccacctttggcggaggcaccaagctggaaatcaagagactcgaggacctgaagaacgtgttcccacctgaggtggccgtgttcgagcctagcgaggccgagatcagccacacccagaaagccaccctcgtgtgcctggctaccggcttctaccccgaccatgtggaactgtcttggtgggtcaacggcaaagaggtgcacagcggcgtgtgtaccgacccccagccactgaaagaacagcccgccctgaacgacagccggtactgcctgagcagcagactgagagtgtccgccaccttctggcagaacccccggaaccacttcagatgccaggtgcagttctacggcctgagcgagaacgacgagtggacccaggacagagccaagcccgtgacccagatcgtgtctgccgaagcctggggcagagccgattgcgacgtgaagctggtggaaaagagcttcgagacagacaccaacctgaacttccagaacctgagcgtgatcggcttcagaatcctgctgctgaaagtggccggctttaacctgctgatgaccctgcggctgtggtccagcagggccaagcgatctggatctggagcaacaaacttctcactactcaaacaagcaggtgacgtggaggagaatcccgggcctactagtatggactggatttggcgcatccttttccttgtcggcgctgctaccggcgcgcattccgggccccagctccagctgcaagagtctggacctggcctggtcaagcctagcgagacactgagcctgacctgtaccgtgtccggcgatagcatcagcagcggcgattactactggggctggatcagacagcctcctggcaaaggactggaatggatcggccacatctactacagcggcgtgacctactacaaccccagcctgaagtccagagtgaccatcagcgtggacaccagccggaaccagttctccctgaagctgtctagcgtgacagccgccgataccgccgtgtactactgcaccagagaggacagcagcaactggcggagtagaggccagggaacactggtcacagttagctctggatccggcggaggcggaagtggaggcggaggatctggcggcggaggctctttcgaacaggtgcaactccagcagtccgacgccgagcttgtgaagcctggcgcttccgtgaagattagctgcaaggccagcggctacaccttcaccgaccacgccattcactgggtcaagcagaagcccgagcagggcctggaatggatcggctacttcagccccggcaacggcgacatcaagtacaacgagaagttcaagggcaaggccaccctgaccgccgacaagagcagcagcacagcctacatgcaactgaacagcctgaccagcgaggactccgccgtgtacttctgcaagcggagctacggcaactacgactactggggccagggcaccacactgaccgtgtctagtacgcgtatccagaaccctgatcctgccgtgtaccagctgcgggatagcaagagcagcgacaagagcgtgtgtctgttcaccgacttcgacagccagaccaacgtgtcccagagcaaggactccgacgtgtacatcaccgataagtgcgtgctggacatgcggagcatggacttcaagagcaactccgccgtggcctggtccaacaagtccgatttcgcctgcgccaacgccttcaacaacagcattatccccgaggacacattcttcccaagccccgagagcagctgcggctttaccagcgagagctaccagcagggcgtgctgagcgccaccatcctgtacgagatcctgctgggcaaggccaccctgtacgccgtgctggtgtctgccctggtgctgatggctatggtcaagcggaaggacagccgggga

SEQ ID NO: 4680 - DNA, 2682 bp, synthetic construct
  source 1..2682: mol_type = other DNA
atggccttaccagtgaccgccttgctcctgccgctggccttgctgctccacgccgccaggccggaagtgcagctggttgaatctggcggaggactggttcagcctggcggatctctgagactgtcttgtgccgccagcggcttcagcttcagcgacttttggatgagctgggtccgacaggcccctggcaaaggacttgaatgggtcgccacaatcagccaggccggcagcgagaaggactacgtggactctgtgaagggcagattcaccatcagccgggacaacgccaagaagtccctgtacctccagatgaacagcctgagagccgaggacaccgccgtgtactattgtgcctctggcgtgtacagcttcgactacagaggccagggcaccctggtcacagtctcttctggtaccggcggaggcggatctggcggcggaggtagcggtggcggaggatctgaattcgacatcgtgatgacccagagccccgatagcctggccgtgtctctgggagagagagccaccatcaactgcaagagcagccagagcctgctgaacagcggcgaccagaagaactacctgacctggtatcagcagaagcccggccagccccccaagctgctgatctactgggccagcaccagagaaagcggcgtgcccgatagattcagcggcagcggaagtggcaccgacttcaccctgaccatcagttctcttcaggccgaggacgtggccgtgtactactgccagaacgactacagctaccccctgaccttcggccagggcaccaaggtggaaatcaagctcgaggacctgaagaacgtgttcccacctgaggtggccgtgttcgagcctagcgaggccgagatcagccacacccagaaagccaccctcgtgtgcctggctaccggcttctaccccgaccatgtggaactgtcttggtgggtcaacggcaaagaggtgcacagcggcgtgtgtaccgacccccagccactgaaagaacagcccgccctgaacgacagccggtactgcctgagcagcagactgagagtgtccgccaccttctggcagaacccccggaaccacttcagatgccaggtgcagttctacggcctgagcgagaacgacgagtggacccaggacagagccaagcccgtgacccagatcgtgtctgccgaagcctggggcagagccgattgcgacgtgaagctggtggaaaagagcttcgagacagacaccaacctgaacttccagaacctgagcgtgatcggcttcagaatcctgctgctgaaagtggccggctttaacctgctgatgaccctgcggctgtggtccagcagggccaagcgatctggatctggagcaacaaacttctcactactcaaacaagcaggtgacgtggaggagaatcccgggcctactagtatggactggatttggcgcatccttttccttgtcggcgctgctaccggcgcgcattccgggccccagctccagctgcaagagtctggacctggcctggtcaagcctagcgagacactgagcctgacctgtaccgtgtccggcgatagcatcagcagcggcgattactactggggctggatcagacagcctcctggcaaaggactggaatggatcggccacatctactacagcggcgtgacctactacaaccccagcctgaagtccagagtgaccatcagcgtggacaccagccggaaccagttctccctgaagctgtctagcgtgacagccgccgataccgccgtgtactactgcaccagagaggacagcagcaactggcggagtagaggccagggaacactggtcacagttagctctggatccggcggaggcggaagtggaggcggaggatctggcggcggaggctctttcgaacaggtgcagctggtgcagtctggggccgaagtgaagaaaaccggcagcagcgtgaaggtgtcctgcaaggccagcggctacacctttaccgaccacgccattcacgtgtggcggcaggctccaggacaggccctggaatggatgggccacttcagccccggcaacaccgacatcaagtacaacgacaagttcaagggcagagtgaccctgaccgtggaccgcagcatgagcaccgcctacatggaactgagcagcctgcggagcgaggacaccgccatgtactattgcaagaccagcaccttctttttcgactactggggccagggaacaatggtcaccgtgtccagcacgcgtatccagaaccctgatcctgccgtgtaccagctgcgggatagcaagagcagcgacaagagcgtgtgtctgttcaccgacttcgacagccagaccaacgtgtcccagagcaaggactccgacgtgtacatcaccgataagtgcgtgctggacatgcggagcatggacttcaagagcaactccgccgtggcctggtccaacaagtccgatttcgcctgcgccaacgccttcaacaacagcattatccccgaggacacattcttcccaagccccgagagcagctgcggctttaccagcgagagctaccagcagggcgtgctgagcgccaccatcctgtacgagatcctgctgggcaaggccaccctgtacgccgtgctggtgtctgccctggtgctgatggctatggtcaagcggaaggacagccgggga

SEQ ID NO: 4681 - DNA, 2679 bp, synthetic construct
  source 1..2679: mol_type = other DNA
atggccttaccagtgaccgccttgctcctgccgctggccttgctgctccacgccgccaggccggaagtgcagctggttgaatctggcggaggactggttcagcctggcggatctctgagactgtcttgtgccgccagcggcttcagcttcagcgacttttggatgagctgggtccgacaggcccctggcaaaggacttgaatgggtcgccacaatcagccaggccggcagcgagaaggactacgtggactctgtgaagggcagattcaccatcagccgggacaacgccaagaagtccctgtacctccagatgaacagcctgagagccgaggacaccgccgtgtactattgtgcctctggcgtgtacagcttcgactacagaggccagggcaccctggtcacagtctcttctggtaccggcggaggcggatctggcggcggaggtagcggtggcggaggatctgaattcgacatccagatgacccagagccccagcagcctgtctgccagcgtgggcgacagagtgaccatcacatgcaaggccagccaggacgtgtccattgccgtggcctggtatcagcagaagcccggcaaggcccccaaggtgctgatctacagcgccagctacagatacaccggcgtgcccgacagattcagcggctctggcagcggcaccgacttcaccttcaccatcagctccctccagcccgaggatattgccgtgtactactgccagcagcactacatcacccccctgacctttggcggaggcaccaaggtggaaatcaagctcgaggacctgaagaacgtgttcccacctgaggtggccgtgttcgagcctagcgaggccgagatcagccacacccagaaagccaccctcgtgtgcctggctaccggcttctaccccgaccatgtggaactgtcttggtgggtcaacggcaaagaggtgcacagcggcgtgtgtaccgacccccagccactgaaagaacagcccgccctgaacgacagccggtactgcctgagcagcagactgagagtgtccgccaccttctggcagaacccccggaaccacttcagatgccaggtgcagttctacggcctgagcgagaacgacgagtggacccaggacagagccaagcccgtgacccagatcgtgtctgccgaagcctggggcagagccgattgcgacgtgaagctggtggaaaagagcttcgagacagacaccaacctgaacttccagaacctgagcgtgatcggcttcagaatcctgctgctgaaagtggccggctttaacctgctgatgaccctgcggctgtggtccagcagggccaagcgatctggatctggagcaacaaacttctcactactcaaacaagcaggtgacgtggaggagaatcccgggcctactagtatggactggatttggcgcatccttttccttgtcggcgctgctaccggcgcgcattccgggccccagctccagctgcaagagtctggacctggcctggtcaagcctagcgagacactgagcctgacctgtaccgtgtccggcgatagcatcagcagcggcgattactactggggctggatcagacagcctcctggcaaaggactggaatggatcggccacatctactacagcggcgtgacctactacaaccccagcctgaagtccagagtgaccatcagcgtggacaccagccggaaccagttctccctgaagctgtctagcgtgacagccgccgataccgccgtgtactactgcaccagagaggacagcagcaactggcggagtagaggccagggaacactggtcacagttagctctggatccggcggaggcggaagtggaggcggaggatctggcggcggaggctctttcgaacagatccaactggtgcagagcggccacgaagtgaagaaacctggggccagcgtgaaggtgtcctgcaaagccagcggctacacctttaccaactacggcatgaactgggtgcgccaggcccctggacagggcctggaatggatgggctggatcaacaccaagaccggcgagcccacctacgccgaagagttcaagggcagattcgtgttcagcctggaaaccagcgcctccaccgcctacctccagatcagctctctgaaggccgaggacaccgccatgtacttttgcggcagaggcggctacggcagcagctactggtacttcgatgtgtggggccagggcaccaccgtgaccgtgtcatctacgcgtatccagaaccctgatcctgccgtgtaccagctgcgggatagcaagagcagcgacaagagcgtgtgtctgttcaccgacttcgacagccagaccaacgtgtcccagagcaaggactccgacgtgtacatcaccgataagtgcgtgctggacatgcggagcatggacttcaagagcaactccgccgtggcctggtccaacaagtccgatttcgcctgcgccaacgccttcaacaacagcattatccccgaggacacattcttcccaagccccgagagcagctgcggctttaccagcgagagctaccagcagggcgtgctgagcgccaccatcctgtacgagatcctgctgggcaaggccaccctgtacgccgtgctggtgtctgccctggtgctgatggctatggtcaagcggaaggacagccgggga

SEQ ID NO: 4682 - DNA, 2685 bp, synthetic construct
  source 1..2685: mol_type = other DNA
atggccttaccagtgaccgccttgctcctgccgctggccttgctgctccacgccgccaggccggaagtgcagctggttgaatctggcggaggactggttcagcctggcggatctctgagactgtcttgtgccgccagcggcttcagcttcagcgacttttggatgagctgggtccgacaggcccctggcaaaggacttgaatgggtcgccacaatcagccaggccggcagcgagaaggactacgtggactctgtgaagggcagattcaccatcagccgggacaacgccaagaagtccctgtacctccagatgaacagcctgagagccgaggacaccgccgtgtactattgtgcctctggcgtgtacagcttcgactacagaggccagggcaccctggtcacagtctcttctggtaccggcggaggcggatctggcggcggaggtagcggtggcggaggatctgaattcgacatcgtgatgacccagagccccgatagcctggccgtgtctctgggagagagagccaccatcaactgccgggccagcaagagcgtgtccaccagcggctacagctacatgcactggtatcagcagaagcccggccagccccccaagctgctgatctacctggcctccaacctggaaagcggcgtgcccgatagattcagcggcagcggctctggcaccgacttcaccctgaccatcagttctcttcaggccgaggacgtggccgtgtactactgccagcacagcagagagctgccctacaccttcggccagggcaccaagctggaaatcaagctcgaggacctgaagaacgtgttcccacctgaggtggccgtgttcgagcctagcgaggccgagatcagccacacccagaaagccaccctcgtgtgcctggctaccggcttctaccccgaccatgtggaactgtcttggtgggtcaacggcaaagaggtgcacagcggcgtgtgtaccgacccccagccactgaaagaacagcccgccctgaacgacagccggtactgcctgagcagcagactgagagtgtccgccaccttctggcagaacccccggaaccacttcagatgccaggtgcagttctacggcctgagcgagaacgacgagtggacccaggacagagccaagcccgtgacccagatcgtgtctgccgaagcctggggcagagccgattgcgacgtgaagctggtggaaaagagcttcgagacagacaccaacctgaacttccagaacctgagcgtgatcggcttcagaatcctgctgctgaaagtggccggctttaacctgctgatgaccctgcggctgtggtccagcagggccaagcgatctggatctggagcaacaaacttctcactactcaaacaagcaggtgacgtggaggagaatcccgggcctactagtatggactggatttggcgcatccttttccttgtcggcgctgctaccggcgcgcattccgggccccagctccagctgcaagagtctggacctggcctggtcaagcctagcgagacactgagcctgacctgtaccgtgtccggcgatagcatcagcagcggcgattactactggggctggatcagacagcctcctggcaaaggactggaatggatcggccacatctactacagcggcgtgacctactacaaccccagcctgaagtccagagtgaccatcagcgtggacaccagccggaaccagttctccctgaagctgtctagcgtgacagccgccgataccgccgtgtactactgcaccagagaggacagcagcaactggcggagtagaggccagggaacactggtcacagttagctctggatccggcggaggcggaagtggaggcggaggatctggcggcggaggctctttcgaacaggtgcaactccaggaatctggccctggccttgtgaagcccagcgagacactgagcctgacctgtaccgtgtccggcggcagcatcagctcttacggcgtgcactggattcggcagcctccaggcaagggcctggaatggatcggcgtgatctggacctccggcgtgaccgactacaacagcgccctgatgggcagagtgaccatctccgtggacaccagcaagaaccagttcagcctgaagctgagcagcgtgacagccgccgataccgccgtgtattattgcgccagagatggcgactacgaccgctacacaatggactactggggccagggaacccttgtgaccgtgtcctctacgcgtatccagaaccctgatcctgccgtgtaccagctgcgggatagcaagagcagcgacaagagcgtgtgtctgttcaccgacttcgacagccagaccaacgtgtcccagagcaaggactccgacgtgtacatcaccgataagtgcgtgctggacatgcggagcatggacttcaagagcaactccgccgtggcctggtccaacaagtccgatttcgcctgcgccaacgccttcaacaacagcattatccccgaggacacattcttcccaagccccgagagcagctgcggctttaccagcgagagctaccagcagggcgtgctgagcgccaccatcctgtacgagatcctgctgggcaaggccaccctgtacgccgtgctggtgtctgccctggtgctgatggctatggtcaagcggaaggacagccgggga

SEQ ID NO: 4683 - DNA, 2685 bp, synthetic construct
  source 1..2685: mol_type = other DNA
atggccttaccagtgaccgccttgctcctgccgctggccttgctgctccacgccgccaggccggaagtgcagctggttgaatctggcggaggactggttcagcctggcggatctctgagactgtcttgtgccgccagcggcttcagcttcagcgacttttggatgagctgggtccgacaggcccctggcaaaggacttgaatgggtcgccacaatcagccaggccggcagcgagaaggactacgtggactctgtgaagggcagattcaccatcagccgggacaacgccaagaagtccctgtacctccagatgaacagcctgagagccgaggacaccgccgtgtactattgtgcctctggcgtgtacagcttcgactacagaggccagggcaccctggtcacagtctcttctggtaccggcggaggcggatctggcggcggaggtagcggtggcggaggatctgaattcgacatccagatgacccagagccccagcagcctgtctgccagcgtgggcgacagagtgaccatcacctgtagagccagccagagcatcggcaccagcctgcactggtatcagcagaagcctggcaaggcccccaagctgctgattaagttcgccagcagactgcagagcggcgtgcccagcagattttctggcagcggctccggcaccgacttcaccctgacaatcagctccctgcagcccgaggacttcgccacctactactgccagcagagccccggcttccctccaacctttggacagggcaccaagctggaaatcaagcggctcgaggacctgaagaacgtgttcccacctgaggtggccgtgttcgagcctagcgaggccgagatcagccacacccagaaagccaccctcgtgtgcctggctaccggcttctaccccgaccatgtggaactgtcttggtgggtcaacggcaaagaggtgcacagcggcgtgtgtaccgacccccagccactgaaagaacagcccgccctgaacgacagccggtactgcctgagcagcagactgagagtgtccgccaccttctggcagaacccccggaaccacttcagatgccaggtgcagttctacggcctgagcgagaacgacgagtggacccaggacagagccaagcccgtgacccagatcgtgtctgccgaagcctggggcagagccgattgcgacgtgaagctggtggaaaagagcttcgagacagacaccaacctgaacttccagaacctgagcgtgatcggcttcagaatcctgctgctgaaagtggccggctttaacctgctgatgaccctgcggctgtggtccagcagggccaagcgatctggatctggagcaacaaacttctcactactcaaacaagcaggtgacgtggaggagaatcccgggcctactagtatggactggatttggcgcatccttttccttgtcggcgctgctaccggcgcgcattccgggccccagctccagctgcaagagtctggacctggcctggtcaagcctagcgagacactgagcctgacctgtaccgtgtccggcgatagcatcagcagcggcgattactactggggctggatcagacagcctcctggcaaaggactggaatggatcggccacatctactacagcggcgtgacctactacaaccccagcctgaagtccagagtgaccatcagcgtggacaccagccggaaccagttctccctgaagctgtctagcgtgacagccgccgataccgccgtgtactactgcaccagagaggacagcagcaactggcggagtagaggccagggaacactggtcacagttagctctggatccggcggaggcggaagtggaggcggaggatctggcggcggaggctctttcgaacaggtgcaactggtggaatctggcggcggacttgtgaagccaggcggcagcctgagactgagctgtgccgccagcggcttcagcatcaccaccagcggctactactggacctggatcagacagttccccggcaagggcctggaatggatgggctacatcggctacaacagcaagacctactacaaccccgccctgaagtcccggatcaccatcagcagagacaacgccaagaacagcctgtacctgcagatgaactccctgagagccgaggataccgccgtgtactactgcgccagatccctgtacggcggctacaaggacgccttcgatagctggggccagggaacccttgtgaccgtgtctagcacgcgtatccagaaccctgatcctgccgtgtaccagctgcgggatagcaagagcagcgacaagagcgtgtgtctgttcaccgacttcgacagccagaccaacgtgtcccagagcaaggactccgacgtgtacatcaccgataagtgcgtgctggacatgcggagcatggacttcaagagcaactccgccgtggcctggtccaacaagtccgatttcgcctgcgccaacgccttcaacaacagcattatccccgaggacacattcttcccaagccccgagagcagctgcggctttaccagcgagagctaccagcagggcgtgctgagcgccaccatcctgtacgagatcctgctgggcaaggccaccctgtacgccgtgctggtgtctgccctggtgctgatggctatggtcaagcggaaggacagccgggga

SEQ ID NO: 4684 - DNA, 2700 bp, synthetic construct
  source 1..2700: mol_type = other DNA
atggccttaccagtgaccgccttgctcctgccgctggccttgctgctccacgccgccaggccggaagtgcagctggttgaatctggcggaggactggttcagcctggcggatctctgagactgtcttgtgccgccagcggcttcagcttcagcgacttttggatgagctgggtccgacaggcccctggcaaaggacttgaatgggtcgccacaatcagccaggccggcagcgagaaggactacgtggactctgtgaagggcagattcaccatcagccgggacaacgccaagaagtccctgtacctccagatgaacagcctgagagccgaggacaccgccgtgtactattgtgcctctggcgtgtacagcttcgactacagaggccagggcaccctggtcacagtctcttctggtaccggcggaggcggatctggcggcggaggtagcggtggcggaggatctgaattcgacgagatcgtgctgacccagagccctctgagcctgcctgtgacacctggcgagcctgccagcatctcctgtagaagcagccagagcctgctgcacagcatcggctacaactacctggactggtatctccagaagcccggccagagcccccaactgctgatctacctgggcagcaacagagccagcggcgtgcccgatagattttccggcagcggctccggcaccgacttcaccctgaagatcagccgggtggaagccgaggacgtgggcgtgtactactgtatgcaggccctccagacccccctgacctttggcggaggcaccaaggtggaaatcaagcggctcgaggacctgaagaacgtgttcccacctgaggtggccgtgttcgagcctagcgaggccgagatcagccacacccagaaagccaccctcgtgtgcctggctaccggcttctaccccgaccatgtggaactgtcttggtgggtcaacggcaaagaggtgcacagcggcgtgtgtaccgacccccagccactgaaagaacagcccgccctgaacgacagccggtactgcctgagcagcagactgagagtgtccgccaccttctggcagaacccccggaaccacttcagatgccaggtgcagttctacggcctgagcgagaacgacgagtggacccaggacagagccaagcccgtgacccagatcgtgtctgccgaagcctggggcagagccgattgcgacgtgaagctggtggaaaagagcttcgagacagacaccaacctgaacttccagaacctgagcgtgatcggcttcagaatcctgctgctgaaagtggccggctttaacctgctgatgaccctgcggctgtggtccagcagggccaagcgatctggatctggagcaacaaacttctcactactcaaacaagcaggtgacgtggaggagaatcccgggcctactagtatggactggatttggcgcatccttttccttgtcggcgctgctaccggcgcgcattccgggccccagctccagctgcaagagtctggacctggcctggtcaagcctagcgagacactgagcctgacctgtaccgtgtccggcgatagcatcagcagcggcgattactactggggctggatcagacagcctcctggcaaaggactggaatggatcggccacatctactacagcggcgtgacctactacaaccccagcctgaagtccagagtgaccatcagcgtggacaccagccggaaccagttctccctgaagctgtctagcgtgacagccgccgataccgccgtgtactactgcaccagagaggacagcagcaactggcggagtagaggccagggaacactggtcacagttagctctggatccggcggaggcggaagtggaggcggaggatctggcggcggaggctctttcgaagaagtgcaactggtggaaagcggaggcggcgtggtgcagcctggaagaagcctgagactgagctgtgccgccagcggcttcaccttccggtcctacggaatgcactgggtgcgccaggcccctggcaaaggactggaatgggtggccgtgatctcctacgacggctccaacaagtactacaccgacagcgtgaacggcagattcaccatcagcagagacaacagcaagaacaccctgtacctccagatgaacagcctgcgggccgaggacaccgccgtgtactattgtgctagaggcggaggctactacgagacaagcggccctgattactggggccagggcacactcgtgaccgtgtctagtacgcgtatccagaaccctgatcctgccgtgtaccagctgcgggatagcaagagcagcgacaagagcgtgtgtctgttcaccgacttcgacagccagaccaacgtgtcccagagcaaggactccgacgtgtacatcaccgataagtgcgtgctggacatgcggagcatggacttcaagagcaactccgccgtggcctggtccaacaagtccgatttcgcctgcgccaacgccttcaacaacagcattatccccgaggacacattcttcccaagccccgagagcagctgcggctttaccagcgagagctaccagcagggcgtgctgagcgccaccatcctgtacgagatcctgctgggcaaggccaccctgtacgccgtgctggtgtctgccctggtgctgatggctatggtcaagcggaaggacagccgggga

SEQ ID NO: 4685 - DNA, 2694 bp, synthetic construct
  source 1..2694: mol_type = other DNA
atggccttaccagtgaccgccttgctcctgccgctggccttgctgctccacgccgccaggccggaagtgcagctggttgaatctggcggaggactggttcagcctggcggatctctgagactgtcttgtgccgccagcggcttcagcttcagcgacttttggatgagctgggtccgacaggcccctggcaaaggacttgaatgggtcgccacaatcagccaggccggcagcgagaaggactacgtggactctgtgaagggcagattcaccatcagccgggacaacgccaagaagtccctgtacctccagatgaacagcctgagagccgaggacaccgccgtgtactattgtgcctctggcgtgtacagcttcgactacagaggccagggcaccctggtcacagtctcttctggtaccggcggaggcggatctggcggcggaggtagcggtggcggaggatctgaattcgacgacgtcgtgatgacccagagccctctgagcctgcctgtgacacctggcgagcctgccagcatctcctgtagaagcagccagagcctgctgcacagcatcggctacaactacctgcactggtttctccagaagcccggccagagcccccaactgctgatctacctgggcagcaacagagccagcggcgtgcccgatagattttccggcagcggctccggcaccgacttcaccctgaagatcagccgggtggaagccgaggacgtgggcgtgtactactgtatgcaggccctccagacccctcccacctttggacagggcaccagactggaaatcaagcggctcgaggacctgaagaacgtgttcccacctgaggtggccgtgttcgagcctagcgaggccgagatcagccacacccagaaagccaccctcgtgtgcctggctaccggcttctaccccgaccatgtggaactgtcttggtgggtcaacggcaaagaggtgcacagcggcgtgtgtaccgacccccagccactgaaagaacagcccgccctgaacgacagccggtactgcctgagcagcagactgagagtgtccgccaccttctggcagaacccccggaaccacttcagatgccaggtgcagttctacggcctgagcgagaacgacgagtggacccaggacagagccaagcccgtgacccagatcgtgtctgccgaagcctggggcagagccgattgcgacgtgaagctggtggaaaagagcttcgagacagacaccaacctgaacttccagaacctgagcgtgatcggcttcagaatcctgctgctgaaagtggccggctttaacctgctgatgaccctgcggctgtggtccagcagggccaagcgatctggatctggagcaacaaacttctcactactcaaacaagcaggtgacgtggaggagaatcccgggcctactagtatggactggatttggcgcatccttttccttgtcggcgctgctaccggcgcgcattccgggccccagctccagctgcaagagtctggacctggcctggtcaagcctagcgagacactgagcctgacctgtaccgtgtccggcgatagcatcagcagcggcgattactactggggctggatcagacagcctcctggcaaaggactggaatggatcggccacatctactacagcggcgtgacctactacaaccccagcctgaagtccagagtgaccatcagcgtggacaccagccggaaccagttctccctgaagctgtctagcgtgacagccgccgataccgccgtgtactactgcaccagagaggacagcagcaactggcggagtagaggccagggaacactggtcacagttagctctggatccggcggaggcggaagtggaggcggaggatctggcggcggaggctctttcgaacaactccaactccaggaaagcggccctggcctcgtgaagcctagcggcacactgagcctgacatgtgccgtgtctggcggcagcatcagcagcagcaactggtggtcttgggtgcgccagcctcctggcaagggcctggaatggatcggcgaaatctaccacagcggcagcaccaactacaaccccagcctgaagtccagagtgaccatcagcgtggacaagagcaagaaccagttctccctgaagctgagcagcgtgacagccgccgataccgccgtgtactattgcgtgggcagcccctacggcgactacgtgctggattattggggccagggcaccctcgtgaccgtgtctagtacgcgtatccagaaccctgatcctgccgtgtaccagctgcgggatagcaagagcagcgacaagagcgtgtgtctgttcaccgacttcgacagccagaccaacgtgtcccagagcaaggactccgacgtgtacatcaccgataagtgcgtgctggacatgcggagcatggacttcaagagcaactccgccgtggcctggtccaacaagtccgatttcgcctgcgccaacgccttcaacaacagcattatccccgaggacacattcttcccaagccccgagagcagctgcggctttaccagcgagagctaccagcagggcgtgctgagcgccaccatcctgtacgagatcctgctgggcaaggccaccctgtacgccgtgctggtgtctgccctggtgctgatggctatggtcaagcggaaggacagccgggga

SEQ ID NO: 4686 - DNA, 2688 bp, synthetic construct
  source 1..2688: mol_type = other DNA
atggccttaccagtgaccgccttgctcctgccgctggccttgctgctccacgccgccaggccggaagtgcagctggttgaatctggcggaggactggttcagcctggcggatctctgagactgtcttgtgccgccagcggcttcagcttcagcgacttttggatgagctgggtccgacaggcccctggcaaaggacttgaatgggtcgccacaatcagccaggccggcagcgagaaggactacgtggactctgtgaagggcagattcaccatcagccgggacaacgccaagaagtccctgtacctccagatgaacagcctgagagccgaggacaccgccgtgtactattgtgcctctggcgtgtacagcttcgactacagaggccagggcaccctggtcacagtctcttctggtaccggcggaggcggatctggcggcggaggtagcggtggcggaggatctgaattcgacgagatcgtgctgacacagagccctggcaccctgagcctgtctctgggagagagagccacactgagctgtcgggccagccagtctatcagcagcagcttcctggcctggtatcagcagaagcccggccaggcccctaagctgctgatctacgccgccagcacaagagccaccggcatccccgatagattcagcggctctggcagcggcaccgacttcaccctgaccatcagcagactggaacccgaggacttcgccgtgtactactgccagcagtacggcagaagcctgagcttcggcggaggcaccaaggtggaagtgaagctcgaggacctgaagaacgtgttcccacctgaggtggccgtgttcgagcctagcgaggccgagatcagccacacccagaaagccaccctcgtgtgcctggctaccggcttctaccccgaccatgtggaactgtcttggtgggtcaacggcaaagaggtgcacagcggcgtgtgtaccgacccccagccactgaaagaacagcccgccctgaacgacagccggtactgcctgagcagcagactgagagtgtccgccaccttctggcagaacccccggaaccacttcagatgccaggtgcagttctacggcctgagcgagaacgacgagtggacccaggacagagccaagcccgtgacccagatcgtgtctgccgaagcctggggcagagccgattgcgacgtgaagctggtggaaaagagcttcgagacagacaccaacctgaacttccagaacctgagcgtgatcggcttcagaatcctgctgctgaaagtggccggctttaacctgctgatgaccctgcggctgtggtccagcagggccaagcgatctggatctggagcaacaaacttctcactactcaaacaagcaggtgacgtggaggagaatcccgggcctactagtatggactggatttggcgcatccttttccttgtcggcgctgctaccggcgcgcattccgggccccagctccagctgcaagagtctggacctggcctggtcaagcctagcgagacactgagcctgacctgtaccgtgtccggcgatagcatcagcagcggcgattactactggggctggatcagacagcctcctggcaaaggactggaatggatcggccacatctactacagcggcgtgacctactacaaccccagcctgaagtccagagtgaccatcagcgtggacaccagccggaaccagttctccctgaagctgtctagcgtgacagccgccgataccgccgtgtactactgcaccagagaggacagcagcaactggcggagtagaggccagggaacactggtcacagttagctctggatccggcggaggcggaagtggaggcggaggatctggcggcggaggctctttcgaacaggtgcaactccagcagtctggccccggactcgtgaagcctagccagacactgagcctgacctgcgccatcagcggcgatagcgtgtccggcaatagcgccacctggaactggatcagacagagcccatctcggggcctggaatggctgggccggacctactaccgcagcaagtggaaccacgactacgccgagagcgtgaagtcccggatcaccatcaaccccgacaccagcaagaaccagttctccttgcaactgaacagcgtgacccccgaggacacagccgtgtattattgcgccagaggcgacagcagctcttggtacgccttcgactattggggccagggcaccctcgtgaccgtgtctagtacgcgtatccagaaccctgatcctgccgtgtaccagctgcgggatagcaagagcagcgacaagagcgtgtgtctgttcaccgacttcgacagccagaccaacgtgtcccagagcaaggactccgacgtgtacatcaccgataagtgcgtgctggacatgcggagcatggacttcaagagcaactccgccgtggcctggtccaacaagtccgatttcgcctgcgccaacgccttcaacaacagcattatccccgaggacacattcttcccaagccccgagagcagctgcggctttaccagcgagagctaccagcagggcgtgctgagcgccaccatcctgtacgagatcctgctgggcaaggccaccctgtacgccgtgctggtgtctgccctggtgctgatggctatggtcaagcggaaggacagccgggga

SEQ ID NO: 4687 - DNA, 2685 bp, synthetic construct
  source 1..2685: mol_type = other DNA
atggccttaccagtgaccgccttgctcctgccgctggccttgctgctccacgccgccaggccggaagtgcagctggttgaatctggcggaggactggttcagcctggcggatctctgagactgtcttgtgccgccagcggcttcagcttcagcgacttttggatgagctgggtccgacaggcccctggcaaaggacttgaatgggtcgccacaatcagccaggccggcagcgagaaggactacgtggactctgtgaagggcagattcaccatcagccgggacaacgccaagaagtccctgtacctccagatgaacagcctgagagccgaggacaccgccgtgtactattgtgcctctggcgtgtacagcttcgactacagaggccagggcaccctggtcacagtctcttctggtaccggcggaggcggatctggcggcggaggtagcggtggcggaggatctgaattcgaccagagcgtcgtgacacagcctcctagcgtgtcagtggcccctggcaagaccgccagaatcacctgtggccggaacaacatcggcagcaagagcgtgcactggtatcagcagaagcccggccaggctcctgtgctggtggtgtacgacgacagcgacagacccagcggcatccccgagagattcagcggcagcaactccggcaataccgccaccctgaccatcagcagagtggaagccggcgacgaggccgactactactgccaagtgtgggacagcagcagcgatcacgtggtgtttggcggaggcaccaagctgacagtgctgggtctcgaggacctgaagaacgtgttcccacctgaggtggccgtgttcgagcctagcgaggccgagatcagccacacccagaaagccaccctcgtgtgcctggctaccggcttctaccccgaccatgtggaactgtcttggtgggtcaacggcaaagaggtgcacagcggcgtgtgtaccgacccccagccactgaaagaacagcccgccctgaacgacagccggtactgcctgagcagcagactgagagtgtccgccaccttctggcagaacccccggaaccacttcagatgccaggtgcagttctacggcctgagcgagaacgacgagtggacccaggacagagccaagcccgtgacccagatcgtgtctgccgaagcctggggcagagccgattgcgacgtgaagctggtggaaaagagcttcgagacagacaccaacctgaacttccagaacctgagcgtgatcggcttcagaatcctgctgctgaaagtggccggctttaacctgctgatgaccctgcggctgtggtccagcagggccaagcgatctggatctggagcaacaaacttctcactactcaaacaagcaggtgacgtggaggagaatcccgggcctactagtatggactggatttggcgcatccttttccttgtcggcgctgctaccggcgcgcattccgggccccagctccagctgcaagagtctggacctggcctggtcaagcctagcgagacactgagcctgacctgtaccgtgtccggcgatagcatcagcagcggcgattactactggggctggatcagacagcctcctggcaaaggactggaatggatcggccacatctactacagcggcgtgacctactacaaccccagcctgaagtccagagtgaccatcagcgtggacaccagccggaaccagttctccctgaagctgtctagcgtgacagccgccgataccgccgtgtactactgcaccagagaggacagcagcaactggcggagtagaggccagggaacactggtcacagttagctctggatccggcggaggcggaagtggaggcggaggatctggcggcggaggctctttcgaagtgcaactggtgcagtctggcggaggggtcatgcggcctggcggatctctgagactgtcttgtgccgccagcggcttcaccttcgacgactacggcatgagctgggtgcgccaggcccctggaaaaggcctggaatgggtgtccggcatcaactggaatggcggcagcaccggctacgccgattctgtgcggggcagattcaccatcagccgggacaacgccaagaacagcctgtacctgcagatgaactccctgcgggccgaggacaccgccctgtactattgcgccagagagcggggctacggctaccacgaccctcacgattattggggccagggcacccttgttaccgtgtcctctacgcgtatccagaaccctgatcctgccgtgtaccagctgcgggatagcaagagcagcgacaagagcgtgtgtctgttcaccgacttcgacagccagaccaacgtgtcccagagcaaggactccgacgtgtacatcaccgataagtgcgtgctggacatgcggagcatggacttcaagagcaactccgccgtggcctggtccaacaagtccgatttcgcctgcgccaacgccttcaacaacagcattatccccgaggacacattcttcccaagccccgagagcagctgcggctttaccagcgagagctaccagcagggcgtgctgagcgccaccatcctgtacgagatcctgctgggcaaggccaccctgtacgccgtgctggtgtctgccctggtgctgatggctatggtcaagcggaaggacagccgggga

SEQ ID NO: 4688 - DNA, 2724 bp, synthetic construct
  source 1..2724: mol_type = other DNA
atggccttaccagtgaccgccttgctcctgccgctggccttgctgctccacgccgccaggccggaagtgcagctggttgaatctggcggaggactggttcagcctggcggatctctgagactgtcttgtgccgccagcggcttcagcttcagcgacttttggatgagctgggtccgacaggcccctggcaaaggacttgaatgggtcgccacaatcagccaggccggcagcgagaaggactacgtggactctgtgaagggcagattcaccatcagccgggacaacgccaagaagtccctgtacctccagatgaacagcctgagagccgaggacaccgccgtgtactattgtgcctctggcgtgtacagcttcgactacagaggccagggcaccctggtcacagtctcttctggtaccggcggaggcggatctggcggcggaggtagcggtggcggaggatctgaattcgaacagaaactcatcagtgaagaagacctggaattccaggctgtcgtgacacagcctcctagcgcctctggcacaccaggccagagagtgaccatctcctgtagcggcagcagcagcaacatcggcagcaacaccgtgaactggtatcagcaggtgcccggcaccgctcccaagctgctgatctacagcaacaaccagcggcccagcggcgtgcccgatagattttctggcagcaagagcggcaccagcgccagcctggctatctctggactccagtccgaggacgaggccgactactattgcgccgcctgggacgatagcctgaacggctgggtgttcggcggaggcaccaagctgacagtgctgctcgaggacctgaagaacgtgttcccacctgaggtggccgtgttcgagcctagcgaggccgagatcagccacacccagaaagccaccctcgtgtgcctggctaccggcttctaccccgaccatgtggaactgtcttggtgggtcaacggcaaagaggtgcacagcggcgtgtgtaccgacccccagccactgaaagaacagcccgccctgaacgacagccggtactgcctgagcagcagactgagagtgtccgccaccttctggcagaacccccggaaccacttcagatgccaggtgcagttctacggcctgagcgagaacgacgagtggacccaggacagagccaagcccgtgacccagatcgtgtctgccgaagcctggggcagagccgattgcgacgtgaagctggtggaaaagagcttcgagacagacaccaacctgaacttccagaacctgagcgtgatcggcttcagaatcctgctgctgaaagtggccggctttaacctgctgatgaccctgcggctgtggtccagcagggccaagcgatctggatctggagcaacaaacttctcactactcaaacaagcaggtgacgtggaggagaatcccgggcctactagtatggactggatttggcgcatccttttccttgtcggcgctgctaccggcgcgcattccgggccccagctccagctgcaagagtctggacctggcctggtcaagcctagcgagacactgagcctgacctgtaccgtgtccggcgatagcatcagcagcggcgattactactggggctggatcagacagcctcctggcaaaggactggaatggatcggccacatctactacagcggcgtgacctactacaaccccagcctgaagtccagagtgaccatcagcgtggacaccagccggaaccagttctccctgaagctgtctagcgtgacagccgccgataccgccgtgtactactgcaccagagaggacagcagcaactggcggagtagaggccagggaacactggtcacagttagctctggatccggcggaggcggaagtggaggcggaggatctggcggcggaggctctttcgaacagatgcaactggtgcagagcggagccgaagtgaaagagcctggcgagagcctgcggatctcctgcaagggcagcggctacagcttcaccaatttctggatctcttgggtgcgccagatgcccggcaagggcctggaatggatgggcagagtggaccccggctactcctacagcacctacagccctagcttccagggccacgtgaccatcagcgccgacaagagcaccagcaccgcctacctccagtggaacagcctgaaggccagcgacaccgccatgtactactgcgccagagtgcagtacagcggctattacgattggttcgacccctggggccagggcacactcgtgacagtgtcaagcacgcgtatccagaaccctgatcctgccgtgtaccagctgcgggatagcaagagcagcgacaagagcgtgtgtctgttcaccgacttcgacagccagaccaacgtgtcccagagcaaggactccgacgtgtacatcaccgataagtgcgtgctggacatgcggagcatggacttcaagagcaactccgccgtggcctggtccaacaagtccgatttcgcctgcgccaacgccttcaacaacagcattatccccgaggacacattcttcccaagccccgagagcagctgcggctttaccagcgagagctaccagcagggcgtgctgagcgccaccatcctgtacgagatcctgctgggcaaggccaccctgtacgccgtgctggtgtctgccctggtgctgatggctatggtcaagcggaaggacagccgggga

SEQ ID NO: 4689 - DNA, 2706 bp, synthetic construct
  source 1..2706: mol_type = other DNA
atggccttaccagtgaccgccttgctcctgccgctggccttgctgctccacgccgccaggccggaagtgcagctggttgaatctggcggaggactggttcagcctggcggatctctgagactgtcttgtgccgccagcggcttcagcttcagcgacttttggatgagctgggtccgacaggcccctggcaaaggacttgaatgggtcgccacaatcagccaggccggcagcgagaaggactacgtggactctgtgaagggcagattcaccatcagccgggacaacgccaagaagtccctgtacctccagatgaacagcctgagagccgaggacaccgccgtgtactattgtgcctctggcgtgtacagcttcgactacagaggccagggcaccctggtcacagtctcttctggtaccggcggaggcggatctggcggcggaggtagcggtggcggaggatctgaattcgaacagaaactcatcagtgaagaagacctggaattcgacatccagatgacccagagccccagcacactgagcgccagcgtgggcgacagagtgaccatcacctgtcgggccagccagaacatcaacaagtggctggcctggtatcagcagaggcccggaaaagccccccagctgctgatctacaaggccagcagcctggaaagcggcgtgcccagcagattttctggcagcggctctggcaccgagtacaccctgaccatcagctccctccagcccgacgacttcgccacctactactgccagcagtacaacagctacgccaccttcggccagggcaccaaggtggaaatcaagagactcgaggacctgaagaacgtgttcccacctgaggtggccgtgttcgagcctagcgaggccgagatcagccacacccagaaagccaccctcgtgtgcctggctaccggcttctaccccgaccatgtggaactgtcttggtgggtcaacggcaaagaggtgcacagcggcgtgtgtaccgacccccagccactgaaagaacagcccgccctgaacgacagccggtactgcctgagcagcagactgagagtgtccgccaccttctggcagaacccccggaaccacttcagatgccaggtgcagttctacggcctgagcgagaacgacgagtggacccaggacagagccaagcccgtgacccagatcgtgtctgccgaagcctggggcagagccgattgcgacgtgaagctggtggaaaagagcttcgagacagacaccaacctgaacttccagaacctgagcgtgatcggcttcagaatcctgctgctgaaagtggccggctttaacctgctgatgaccctgcggctgtggtccagcagggccaagcgatctggatctggagcaacaaacttctcactactcaaacaagcaggtgacgtggaggagaatcccgggcctactagtatggactggatttggcgcatccttttccttgtcggcgctgctaccggcgcgcattccgggccccagctccagctgcaagagtctggacctggcctggtcaagcctagcgagacactgagcctgacctgtaccgtgtccggcgatagcatcagcagcggcgattactactggggctggatcagacagcctcctggcaaaggactggaatggatcggccacatctactacagcggcgtgacctactacaaccccagcctgaagtccagagtgaccatcagcgtggacaccagccggaaccagttctccctgaagctgtctagcgtgacagccgccgataccgccgtgtactactgcaccagagaggacagcagcaactggcggagtagaggccagggaacactggtcacagttagctctggatccggcggaggcggaagtggaggcggaggatctggcggcggaggctctttcgaacaggtgcagctggtgcagtctggggccgaagtgaagaagcctggcgagagcctgaagatcagctgcaagggctccggctacaacttctctaacaagtggatcggctgggtgcgccagctgcctggcagaggactggaatggatcgccatcatctaccccggctacagcgacatcacctacagccccagcttccagggccgcgtgacaatcagcgccgacaccagcatcaacaccgcctacctgcactggcacagcctgaaggccagcgacaccgccatgtactactgcgtgcggcatacagccctggctggcttcgattattggggcctgggcaccctcgtgaccgtgtctagtacgcgtatccagaaccctgatcctgccgtgtaccagctgcgggatagcaagagcagcgacaagagcgtgtgtctgttcaccgacttcgacagccagaccaacgtgtcccagagcaaggactccgacgtgtacatcaccgataagtgcgtgctggacatgcggagcatggacttcaagagcaactccgccgtggcctggtccaacaagtccgatttcgcctgcgccaacgccttcaacaacagcattatccccgaggacacattcttcccaagccccgagagcagctgcggctttaccagcgagagctaccagcagggcgtgctgagcgccaccatcctgtacgagatcctgctgggcaaggccaccctgtacgccgtgctggtgtctgccctggtgctgatggctatggtcaagcggaaggacagccgggga

SEQ ID NO: 4690 - DNA, 2679 bp, synthetic construct
  source 1..2679: mol_type = other DNA
atggccttaccagtgaccgccttgctcctgccgctggccttgctgctccacgccgccaggccggaagtgcagctggttgaatctggcggaggactggttcagcctggcggatctctgagactgtcttgtgccgccagcggcttcagcttcagcgacttttggatgagctgggtccgacaggcccctggcaaaggacttgaatgggtcgccacaatcagccaggccggcagcgagaaggactacgtggactctgtgaagggcagattcaccatcagccgggacaacgccaagaagtccctgtacctccagatgaacagcctgagagccgaggacaccgccgtgtactattgtgcctctggcgtgtacagcttcgactacagaggccagggcaccctggtcacagtctcttctggtaccggcggaggcggatctggcggcggaggtagcggtggcggaggatctgaattcatcgtgctgacacagagccctgcttctctggccgtgtctctgggacagagagccaccatcagctgtagagccagcgagagcgtggacaactacggcaacaccttcatgcactggtatcagcagaagcccggccagcctcctaagctgctgatctacagagccagcaacctggaaagcggcatccccgccagattttctggcagcggcagcagaaccgacttcaccctgaccatcaatcccgtggaagccgacgacgtggcaacctactactgccagcagagcaacgaggaccctcctacatttggagccggcaccaagctggaactgaaactcgaggacctgaagaacgtgttcccacctgaggtggccgtgttcgagcctagcgaggccgagatcagccacacccagaaagccaccctcgtgtgcctggctaccggcttctaccccgaccatgtggaactgtcttggtgggtcaacggcaaagaggtgcacagcggcgtgtgtaccgacccccagccactgaaagaacagcccgccctgaacgacagccggtactgcctgagcagcagactgagagtgtccgccaccttctggcagaacccccggaaccacttcagatgccaggtgcagttctacggcctgagcgagaacgacgagtggacccaggacagagccaagcccgtgacccagatcgtgtctgccgaagcctggggcagagccgattgcgacgtgaagctggtggaaaagagcttcgagacagacaccaacctgaacttccagaacctgagcgtgatcggcttcagaatcctgctgctgaaagtggccggctttaacctgctgatgaccctgcggctgtggtccagcagggccaagcgatctggatctggagcaacaaacttctcactactcaaacaagcaggtgacgtggaggagaatcccgggcctactagtatggactggatttggcgcatccttttccttgtcggcgctgctaccggcgcgcattccgggccccagctccagctgcaagagtctggacctggcctggtcaagcctagcgagacactgagcctgacctgtaccgtgtccggcgatagcatcagcagcggcgattactactggggctggatcagacagcctcctggcaaaggactggaatggatcggccacatctactacagcggcgtgacctactacaaccccagcctgaagtccagagtgaccatcagcgtggacaccagccggaaccagttctccctgaagctgtctagcgtgacagccgccgataccgccgtgtactactgcaccagagaggacagcagcaactggcggagtagaggccagggaacactggtcacagttagctctggatccggcggaggcggaagtggaggcggaggatctggcggcggaggctctttcgaacagattcagctggtgcagtctggccccgagctgaagaaacctggcgagacagtgaagatcagctgcaaggccagcggctacatcttcaccaattacggcatgaactgggtcaagcaggcccctggcaagagcttcaagtggatgggctggatcaacacctacaccggcgagagcacatacagcgccgacttcaagggcagattcgccttcagcctggaaaccagcgccagcacagcctacctgcacatcaacgacctgaagaacgaggacaccgccacctacttttgcgccagaagcggcggctacgaccctatggattattggggccagggcaccagcgtgaccgtttcttctacgcgtatccagaaccctgatcctgccgtgtaccagctgcgggatagcaagagcagcgacaagagcgtgtgtctgttcaccgacttcgacagccagaccaacgtgtcccagagcaaggactccgacgtgtacatcaccgataagtgcgtgctggacatgcggagcatggacttcaagagcaactccgccgtggcctggtccaacaagtccgatttcgcctgcgccaacgccttcaacaacagcattatccccgaggacacattcttcccaagccccgagagcagctgcggctttaccagcgagagctaccagcagggcgtgctgagcgccaccatcctgtacgagatcctgctgggcaaggccaccctgtacgccgtgctggtgtctgccctggtgctgatggctatggtcaagcggaaggacagccgggga

SEQ ID NO: 4691 - DNA, 2676 bp, synthetic construct
  source 1..2676: mol_type = other DNA
atggccttaccagtgaccgccttgctcctgccgctggccttgctgctccacgccgccaggccggaagtgcagctggttgaatctggcggaggactggttcagcctggcggatctctgagactgtcttgtgccgccagcggcttcagcttcagcgacttttggatgagctgggtccgacaggcccctggcaaaggacttgaatgggtcgccacaatcagccaggccggcagcgagaaggactacgtggactctgtgaagggcagattcaccatcagccgggacaacgccaagaagtccctgtacctccagatgaacagcctgagagccgaggacaccgccgtgtactattgtgcctctggcgtgtacagcttcgactacagaggccagggcaccctggtcacagtctcttctggtaccggcggaggcggatctggcggcggaggtagcggtggcggaggatctgaattcgagatcgtgctgacacagagccctggcaccctgagcctgtctccaggcgaaagagccacactgagctgtcgggccagccagagcgtgtccaatacctacctggcctggtatcaccagaggcccggacaggctccccggctgctgatctatggcgcttctagcagagccaccggcatccccgatagattcagcggctctggcagcggcaccgacttcgccctgacaatcagctccctggaacccgaggacttcgccgtgtactactgccagcagtacagcaactcctggaccttcggccagggcaccaaggtggaaatcaagagactcgaggacctgaagaacgtgttcccacctgaggtggccgtgttcgagcctagcgaggccgagatcagccacacccagaaagccaccctcgtgtgcctggctaccggcttctaccccgaccatgtggaactgtcttggtgggtcaacggcaaagaggtgcacagcggcgtgtgtaccgacccccagccactgaaagaacagcccgccctgaacgacagccggtactgcctgagcagcagactgagagtgtccgccaccttctggcagaacccccggaaccacttcagatgccaggtgcagttctacggcctgagcgagaacgacgagtggacccaggacagagccaagcccgtgacccagatcgtgtctgccgaagcctggggcagagccgattgcgacgtgaagctggtggaaaagagcttcgagacagacaccaacctgaacttccagaacctgagcgtgatcggcttcagaatcctgctgctgaaagtggccggctttaacctgctgatgaccctgcggctgtggtccagcagggccaagcgatctggatctggagcaacaaacttctcactactcaaacaagcaggtgacgtggaggagaatcccgggcctactagtatggactggatttggcgcatccttttccttgtcggcgctgctaccggcgcgcattccgggccccagctccagctgcaagagtctggacctggcctggtcaagcctagcgagacactgagcctgacctgtaccgtgtccggcgatagcatcagcagcggcgattactactggggctggatcagacagcctcctggcaaaggactggaatggatcggccacatctactacagcggcgtgacctactacaaccccagcctgaagtccagagtgaccatcagcgtggacaccagccggaaccagttctccctgaagctgtctagcgtgacagccgccgataccgccgtgtactactgcaccagagaggacagcagcaactggcggagtagaggccagggaacactggtcacagttagctctggatccggcggaggcggaagtggaggcggaggatctggcggcggaggctctttcgaacaggtgcaactggtggaatctggcgggggagtggtgcagcctggcagaagcctgagactgtcttgtgccgccagcggcttcaccttcagcagctacgacatgcactgggtgcgccaggcccctggcaaaggactggaatgggtggccgtgatctcctacgacggcaccaacgagtattacgccgacagcgtgaagggccggttcaccatctccagagacaccagcaagaacaccctgtacctccagatgaacagcctgcgggccgaggacacagccgtgtattattgcgccagagagcggtacttcgactggtccttcgactactggggccagggaaccctggtgtccgtgtctagtacgcgtatccagaaccctgatcctgccgtgtaccagctgcgggatagcaagagcagcgacaagagcgtgtgtctgttcaccgacttcgacagccagaccaacgtgtcccagagcaaggactccgacgtgtacatcaccgataagtgcgtgctggacatgcggagcatggacttcaagagcaactccgccgtggcctggtccaacaagtccgatttcgcctgcgccaacgccttcaacaacagcattatccccgaggacacattcttcccaagccccgagagcagctgcggctttaccagcgagagctaccagcagggcgtgctgagcgccaccatcctgtacgagatcctgctgggcaaggccaccctgtacgccgtgctggtgtctgccctggtgctgatggctatggtcaagcggaaggacagccgggga

SEQ ID NO: 4692 - DNA, 2673 bp, synthetic construct
  source 1..2673: mol_type = other DNA
atggccttaccagtgaccgccttgctcctgccgctggccttgctgctccacgccgccaggccggaagtgcagctggttgaatctggcggaggactggttcagcctggcggatctctgagactgtcttgtgccgccagcggcttcagcttcagcgacttttggatgagctgggtccgacaggcccctggcaaaggacttgaatgggtcgccacaatcagccaggccggcagcgagaaggactacgtggactctgtgaagggcagattcaccatcagccgggacaacgccaagaagtccctgtacctccagatgaacagcctgagagccgaggacaccgccgtgtactattgtgcctctggcgtgtacagcttcgactacagaggccagggcaccctggtcacagtctcttctggtaccggcggaggcggatctggcggcggaggtagcggtggcggaggatctgaattcgagctgacacaggaccctgctgtgtctgttgccctgggccagacagtgcggattacctgtcaaggcgacagcctgagaagcaactacgccaactggtatcagcagaagcccggacaggctcccgtgctggttatctacggccagaacaacagacccagcggcatccccgatagattcagcggctctagctctggcaataccgccagcctgacaatcactggcgctcaggctgccgatgaggccgactactactgcgatagcagagtgtccaccggcaatcacgtggtgtttggcggcggaacaaagctgacagtgctcggacaactcgaggacctgaagaacgtgttcccacctgaggtggccgtgttcgagcctagcgaggccgagatcagccacacccagaaagccaccctcgtgtgcctggctaccggcttctaccccgaccatgtggaactgtcttggtgggtcaacggcaaagaggtgcacagcggcgtgtgtaccgacccccagccactgaaagaacagcccgccctgaacgacagccggtactgcctgagcagcagactgagagtgtccgccaccttctggcagaacccccggaaccacttcagatgccaggtgcagttctacggcctgagcgagaacgacgagtggacccaggacagagccaagcccgtgacccagatcgtgtctgccgaagcctggggcagagccgattgcgacgtgaagctggtggaaaagagcttcgagacagacaccaacctgaacttccagaacctgagcgtgatcggcttcagaatcctgctgctgaaagtggccggctttaacctgctgatgaccctgcggctgtggtccagcagggccaagcgatctggatctggagcaacaaacttctcactactcaaacaagcaggtgacgtggaggagaatcccgggcctactagtatggactggatttggcgcatccttttccttgtcggcgctgctaccggcgcgcattccgggccccagctccagctgcaagagtctggacctggcctggtcaagcctagcgagacactgagcctgacctgtaccgtgtccggcgatagcatcagcagcggcgattactactggggctggatcagacagcctcctggcaaaggactggaatggatcggccacatctactacagcggcgtgacctactacaaccccagcctgaagtccagagtgaccatcagcgtggacaccagccggaaccagttctccctgaagctgtctagcgtgacagccgccgataccgccgtgtactactgcaccagagaggacagcagcaactggcggagtagaggccagggaacactggtcacagttagctctggatccggcggaggcggaagtggaggcggaggatctggcggcggaggctctttcgaagaagttcagctggtgcagagcggagccgaagtgaagaaacctggggcctctgtgaaggtgtcctgcaaggcttccggctacacctttaccagctacgccatgcactgggtccgacaggcacctggacaacggcttgaatggatgggctggatcaacgccggcaacggcaacaccaagtacagccagaaattccagggccgcgtgaccatcaccagagatacaagcgccagcaccgcctacatggaactgtctagcctgagatccgaggacaccgccgtgtactactgtgccagagacatcagctacggcagcttcgactattggggccagggcacactggtcaccgttagctctacgcgtatccagaaccctgatcctgccgtgtaccagctgcgggatagcaagagcagcgacaagagcgtgtgtctgttcaccgacttcgacagccagaccaacgtgtcccagagcaaggactccgacgtgtacatcaccgataagtgcgtgctggacatgcggagcatggacttcaagagcaactccgccgtggcctggtccaacaagtccgatttcgcctgcgccaacgccttcaacaacagcattatccccgaggacacattcttcccaagccccgagagcagctgcggctttaccagcgagagctaccagcagggcgtgctgagcgccaccatcctgtacgagatcctgctgggcaaggccaccctgtacgccgtgctggtgtctgccctggtgctgatggctatggtcaagcggaaggacagccgggga

SEQ ID NO: 4693 - DNA, 2679 bp, synthetic construct
  source 1..2679: mol_type = other DNA
atggccttaccagtgaccgccttgctcctgccgctggccttgctgctccacgccgccaggccggaagtgcagctggttgaatctggcggaggactggttcagcctggcggatctctgagactgtcttgtgccgccagcggcttcagcttcagcgacttttggatgagctgggtccgacaggcccctggcaaaggacttgaatgggtcgccacaatcagccaggccggcagcgagaaggactacgtggactctgtgaagggcagattcaccatcagccgggacaacgccaagaagtccctgtacctccagatgaacagcctgagagccgaggacaccgccgtgtactattgtgcctctggcgtgtacagcttcgactacagaggccagggcaccctggtcacagtctcttctggtaccggcggaggcggatctggcggcggaggtagcggtggcggaggatctgaattcgacatcgtgctgacacagacaccagccacactgagcgtgacacctggcgattctgtgtccctgagctgtagagccagccagagcatcagcaacaacctgcactggtatcagcagaagtcccacgagagccccagactgctgattaagaacgccagccagtctatcagcggcatccccagcaagtttagcggctctggcagcggcaccgacttcaccctgagaatcaacagcgtggaaaccgaggacttcgggatgtacttctgccagcagagcaatagctggccctacacatttggctccggcaccaagctggaaatcaaactcgaggacctgaagaacgtgttcccacctgaggtggccgtgttcgagcctagcgaggccgagatcagccacacccagaaagccaccctcgtgtgcctggctaccggcttctaccccgaccatgtggaactgtcttggtgggtcaacggcaaagaggtgcacagcggcgtgtgtaccgacccccagccactgaaagaacagcccgccctgaacgacagccggtactgcctgagcagcagactgagagtgtccgccaccttctggcagaacccccggaaccacttcagatgccaggtgcagttctacggcctgagcgagaacgacgagtggacccaggacagagccaagcccgtgacccagatcgtgtctgccgaagcctggggcagagccgattgcgacgtgaagctggtggaaaagagcttcgagacagacaccaacctgaacttccagaacctgagcgtgatcggcttcagaatcctgctgctgaaagtggccggctttaacctgctgatgaccctgcggctgtggtccagcagggccaagcgatctggatctggagcaacaaacttctcactactcaaacaagcaggtgacgtggaggagaatcccgggcctactagtatggactggatttggcgcatccttttccttgtcggcgctgctaccggcgcgcattccgggccccagctccagctgcaagagtctggacctggcctggtcaagcctagcgagacactgagcctgacctgtaccgtgtccggcgatagcatcagcagcggcgattactactggggctggatcagacagcctcctggcaaaggactggaatggatcggccacatctactacagcggcgtgacctactacaaccccagcctgaagtccagagtgaccatcagcgtggacaccagccggaaccagttctccctgaagctgtctagcgtgacagccgccgataccgccgtgtactactgcaccagagaggacagcagcaactggcggagtagaggccagggaacactggtcacagttagctctggatccggcggaggcggaagtggaggcggaggatctggcggcggaggctctttcgaacaagtgaagctgcaacagagcggacccgagctggttaagccaggcgcttccgtgaagattagctgcaaggccagcggctacagcttcaccggctactacatgcactgggtcaagcagagccacggcaacatcctggactggatcggctacatctacccctacaacggcgtgtccagctacaaccagaagttcaagggcaaagccactctgaccgtggacaagagcagcagcaccgcctacatggaactgagaagcctgaccagcgaggacagcgccgtgtactattgtgccagagagcggggcctgtaccagctcagagcaatggattattggggccagggcaccagcgtgaccgtttcttctacgcgtatccagaaccctgatcctgccgtgtaccagctgcgggatagcaagagcagcgacaagagcgtgtgtctgttcaccgacttcgacagccagaccaacgtgtcccagagcaaggactccgacgtgtacatcaccgataagtgcgtgctggacatgcggagcatggacttcaagagcaactccgccgtggcctggtccaacaagtccgatttcgcctgcgccaacgccttcaacaacagcattatccccgaggacacattcttcccaagccccgagagcagctgcggctttaccagcgagagctaccagcagggcgtgctgagcgccaccatcctgtacgagatcctgctgggcaaggccaccctgtacgccgtgctggtgtctgccctggtgctgatggctatggtcaagcggaaggacagccgggga

SEQ ID NO: 4694 - DNA, 2652 bp, synthetic construct
  source 1..2652: mol_type = other DNA
atggccttaccagtgaccgccttgctcctgccgctggccttgctgctccacgccgccaggccggaagtgcagctggttgaatctggcggaggactggttcagcctggcggatctctgagactgtcttgtgccgccagcggcttcagcttcagcgacttttggatgagctgggtccgacaggcccctggcaaaggacttgaatgggtcgccacaatcagccaggccggcagcgagaaggactacgtggactctgtgaagggcagattcaccatcagccgggacaacgccaagaagtccctgtacctccagatgaacagcctgagagccgaggacaccgccgtgtactattgtgcctctggcgtgtacagcttcgactacagaggccagggcaccctggtcacagtctcttctggtaccggcggaggcggatctggcggcggaggtagcggtggcggaggatctgaattcgacatcgtgatgacacagacccctgccatcatgagcgcctctccaggccagaaagtgaccatcacatgtagcgccagcagcagcgtgaactacatgcactggtatcagcagaagctgggcagcagccccaagctgtggatctacgataccagcaaactggcccctggcgtgccagccagattttctggttctggcagcggcaccagctacagcctgacaatcagcagcatggaagccgaggatgccgccagctacttctgccatcagtggtctagctacccctacacctttggctccggcaccaagctggaaatcaaactcgaggacctgaagaacgtgttcccacctgaggtggccgtgttcgagcctagcgaggccgagatcagccacacccagaaagccaccctcgtgtgcctggctaccggcttctaccccgaccatgtggaactgtcttggtgggtcaacggcaaagaggtgcacagcggcgtgtgtaccgacccccagccactgaaagaacagcccgccctgaacgacagccggtactgcctgagcagcagactgagagtgtccgccaccttctggcagaacccccggaaccacttcagatgccaggtgcagttctacggcctgagcgagaacgacgagtggacccaggacagagccaagcccgtgacccagatcgtgtctgccgaagcctggggcagagccgattgcgacgtgaagctggtggaaaagagcttcgagacagacaccaacctgaacttccagaacctgagcgtgatcggcttcagaatcctgctgctgaaagtggccggctttaacctgctgatgaccctgcggctgtggtccagcagggccaagcgatctggatctggagcaacaaacttctcactactcaaacaagcaggtgacgtggaggagaatcccgggcctactagtatggactggatttggcgcatccttttccttgtcggcgctgctaccggcgcgcattccgggccccagctccagctgcaagagtctggacctggcctggtcaagcctagcgagacactgagcctgacctgtaccgtgtccggcgatagcatcagcagcggcgattactactggggctggatcagacagcctcctggcaaaggactggaatggatcggccacatctactacagcggcgtgacctactacaaccccagcctgaagtccagagtgaccatcagcgtggacaccagccggaaccagttctccctgaagctgtctagcgtgacagccgccgataccgccgtgtactactgcaccagagaggacagcagcaactggcggagtagaggccagggaacactggtcacagttagctctggatccggcggaggcggaagtggaggcggaggatctggcggcggaggctctttcgaagaagttcagctccaagagtctggccccgacctggtcaagcctagccaaagcctgagcctgacctgtaccgtgaccggctacagcatcacaagcggctatggatggcactggatcagacagttccccggcaacaaactggaatggatgggctacatccactacagcggcagcaccacctacaatcccagcctgaagtcccggatcagcatcagcagagacaccagcaagaaccagttcttcctgcaactgaacagcgtgaccaccgaggacaccgccacctactattgtgctcggagcctgagatattggggccagggcacaaccctgaccgtgtcatctacgcgtatccagaaccctgatcctgccgtgtaccagctgcgggatagcaagagcagcgacaagagcgtgtgtctgttcaccgacttcgacagccagaccaacgtgtcccagagcaaggactccgacgtgtacatcaccgataagtgcgtgctggacatgcggagcatggacttcaagagcaactccgccgtggcctggtccaacaagtccgatttcgcctgcgccaacgccttcaacaacagcattatccccgaggacacattcttcccaagccccgagagcagctgcggctttaccagcgagagctaccagcagggcgtgctgagcgccaccatcctgtacgagatcctgctgggcaaggccaccctgtacgccgtgctggtgtctgccctggtgctgatggctatggtcaagcggaaggacagccgggga

SEQ ID NO: 4695 - DNA, 2661 bp, synthetic construct
  source 1..2661: mol_type = other DNA
atggccttaccagtgaccgccttgctcctgccgctggccttgctgctccacgccgccaggccggaagtgcagctggttgaatctggcggaggactggttcagcctggcggatctctgagactgtcttgtgccgccagcggcttcagcttcagcgacttttggatgagctgggtccgacaggcccctggcaaaggacttgaatgggtcgccacaatcagccaggccggcagcgagaaggactacgtggactctgtgaagggcagattcaccatcagccgggacaacgccaagaagtccctgtacctccagatgaacagcctgagagccgaggacaccgccgtgtactattgtgcctctggcgtgtacagcttcgactacagaggccagggcaccctggtcacagtctcttctggtaccggcggaggcggatctggcggcggaggtagcggtggcggaggatctgaattcgacatccagatgacacagagccctagcagcctgtctgccagcgtgggagacagagtgaccatcacctgtagcgccaccagcagcatcagctacatgcactggtatcagcagaagcccggcaaggcccctaaaggctggatctacgataccagcaaactggcccacggcgtgcccagcagattttctggttctggcagcggcaccgacttcaccctgacaatatctagcctccagcctgaggacttcgccacctactactgccaccagagaagaagctaccccttcaccttcggccagggcaccaaggtggaaatcaaactcgaggacctgaagaacgtgttcccacctgaggtggccgtgttcgagcctagcgaggccgagatcagccacacccagaaagccaccctcgtgtgcctggctaccggcttctaccccgaccatgtggaactgtcttggtgggtcaacggcaaagaggtgcacagcggcgtgtgtaccgacccccagccactgaaagaacagcccgccctgaacgacagccggtactgcctgagcagcagactgagagtgtccgccaccttctggcagaacccccggaaccacttcagatgccaggtgcagttctacggcctgagcgagaacgacgagtggacccaggacagagccaagcccgtgacccagatcgtgtctgccgaagcctggggcagagccgattgcgacgtgaagctggtggaaaagagcttcgagacagacaccaacctgaacttccagaacctgagcgtgatcggcttcagaatcctgctgctgaaagtggccggctttaacctgctgatgaccctgcggctgtggtccagcagggccaagcgatctggatctggagcaacaaacttctcactactcaaacaagcaggtgacgtggaggagaatcccgggcctactagtatggactggatttggcgcatccttttccttgtcggcgctgctaccggcgcgcattccgggccccagctccagctgcaagagtctggacctggcctggtcaagcctagcgagacactgagcctgacctgtaccgtgtccggcgatagcatcagcagcggcgattactactggggctggatcagacagcctcctggcaaaggactggaatggatcggccacatctactacagcggcgtgacctactacaaccccagcctgaagtccagagtgaccatcagcgtggacaccagccggaaccagttctccctgaagctgtctagcgtgacagccgccgataccgccgtgtactactgcaccagagaggacagcagcaactggcggagtagaggccagggaacactggtcacagttagctctggatccggcggaggcggaagtggaggcggaggatctggcggcggaggctctttcgaagaagtgcaactggttcagagcggagccgaagtgaagaaacctggggcctctgtgaaggtgtcctgcaaggcttccggctacacctttaccaatttctggattcactgggtccgacaggctccaggccaaggactggaatggatcggagagatcgaccccagcgacagctacaccaactacaaccagaaattcaaaggccgggtcaccatcaccagagacaccagcacaagcaccgcctacctggaactgagcagcctgagaagcgaggacaccgccgtgtactactgcgccagggaaatcaccaccgtggattattggggccagggaaccctggtcaccgtgtcatctacgcgtatccagaaccctgatcctgccgtgtaccagctgcgggatagcaagagcagcgacaagagcgtgtgtctgttcaccgacttcgacagccagaccaacgtgtcccagagcaaggactccgacgtgtacatcaccgataagtgcgtgctggacatgcggagcatggacttcaagagcaactccgccgtggcctggtccaacaagtccgatttcgcctgcgccaacgccttcaacaacagcattatccccgaggacacattcttcccaagccccgagagcagctgcggctttaccagcgagagctaccagcagggcgtgctgagcgccaccatcctgtacgagatcctgctgggcaaggccaccctgtacgccgtgctggtgtctgccctggtgctgatggctatggtcaagcggaaggacagccgggga

SEQ ID NO: 4696 - DNA, 2682 bp, synthetic construct
  source 1..2682: mol_type = other DNA
atggccttaccagtgaccgccttgctcctgccgctggccttgctgctccacgccgccaggccggaagtgcagctggttgaatctggcggaggactggttcagcctggcggatctctgagactgtcttgtgccgccagcggcttcagcttcagcgacttttggatgagctgggtccgacaggcccctggcaaaggacttgaatgggtcgccacaatcagccaggccggcagcgagaaggactacgtggactctgtgaagggcagattcaccatcagccgggacaacgccaagaagtccctgtacctccagatgaacagcctgagagccgaggacaccgccgtgtactattgtgcctctggcgtgtacagcttcgactacagaggccagggcaccctggtcacagtctcttctggtaccggcggaggcggatctggcggcggaggtagcggtggcggaggatctgaattcgacatccagatgacacagagccctagcagcctgtctgccagcgtgggagacagagtgaccatcacatgcaaggccagccagggcttcaacaaatacgtggcctggtatcagcagaagcccggcaaggctcctaagctgctgatctactacaccagcacactccagcctggcgtgcccagcagattttctggctctggcagcggcagagactacaccctgacaatatccagcctccagccagaggacttcgccacctactactgtctccagtacggcaacctgctgtacgcctttggacagggcaccaaggtggaaatcaagagactcgaggacctgaagaacgtgttcccacctgaggtggccgtgttcgagcctagcgaggccgagatcagccacacccagaaagccaccctcgtgtgcctggctaccggcttctaccccgaccatgtggaactgtcttggtgggtcaacggcaaagaggtgcacagcggcgtgtgtaccgacccccagccactgaaagaacagcccgccctgaacgacagccggtactgcctgagcagcagactgagagtgtccgccaccttctggcagaacccccggaaccacttcagatgccaggtgcagttctacggcctgagcgagaacgacgagtggacccaggacagagccaagcccgtgacccagatcgtgtctgccgaagcctggggcagagccgattgcgacgtgaagctggtggaaaagagcttcgagacagacaccaacctgaacttccagaacctgagcgtgatcggcttcagaatcctgctgctgaaagtggccggctttaacctgctgatgaccctgcggctgtggtccagcagggccaagcgatctggatctggagcaacaaacttctcactactcaaacaagcaggtgacgtggaggagaatcccgggcctactagtatggactggatttggcgcatccttttccttgtcggcgctgctaccggcgcgcattccgggccccagctccagctgcaagagtctggacctggcctggtcaagcctagcgagacactgagcctgacctgtaccgtgtccggcgatagcatcagcagcggcgattactactggggctggatcagacagcctcctggcaaaggactggaatggatcggccacatctactacagcggcgtgacctactacaaccccagcctgaagtccagagtgaccatcagcgtggacaccagccggaaccagttctccctgaagctgtctagcgtgacagccgccgataccgccgtgtactactgcaccagagaggacagcagcaactggcggagtagaggccagggaacactggtcacagttagctctggatccggcggaggcggaagtggaggcggaggatctggcggcggaggctctttcgaagaagttcagcttgtgcagagcggagccgaagtgaagaaacctggggcctctgtgaaggtgtcctgcaaagccagcggctacacctttaccagctactggatcggctgggtccgacaggctcctggacaaggactggaatggatcggcgacatctatcccggcggaggctacaccaactacaacgagaagttcaagggccgcgtgacaatcaccagagacacctctacaagcaccgcctacctggaactgagcagcctgagaagcgaggacaccgccgtgtactactgcgccagactggatggcagcagctacagaggcgctatggattcttggggccagggcacactggtcaccgtttcttctacgcgtatccagaaccctgatcctgccgtgtaccagctgcgggatagcaagagcagcgacaagagcgtgtgtctgttcaccgacttcgacagccagaccaacgtgtcccagagcaaggactccgacgtgtacatcaccgataagtgcgtgctggacatgcggagcatggacttcaagagcaactccgccgtggcctggtccaacaagtccgatttcgcctgcgccaacgccttcaacaacagcattatccccgaggacacattcttcccaagccccgagagcagctgcggctttaccagcgagagctaccagcagggcgtgctgagcgccaccatcctgtacgagatcctgctgggcaaggccaccctgtacgccgtgctggtgtctgccctggtgctgatggctatggtcaagcggaaggacagccgggga

SEQ ID NO: 4697 - DNA, 2670 bp, synthetic construct
  source 1..2670: mol_type = other DNA
atggccttaccagtgaccgccttgctcctgccgctggccttgctgctccacgccgccaggccggaagtgcagctggttgaatctggcggaggactggttcagcctggcggatctctgagactgtcttgtgccgccagcggcttcagcttcagcgacttttggatgagctgggtccgacaggcccctggcaaaggacttgaatgggtcgccacaatcagccaggccggcagcgagaaggactacgtggactctgtgaagggcagattcaccatcagccgggacaacgccaagaagtccctgtacctccagatgaacagcctgagagccgaggacaccgccgtgtactattgtgcctctggcgtgtacagcttcgactacagaggccagggcaccctggtcacagtctcttctggtaccggcggaggcggatctggcggcggaggtagcggtggcggaggatctgaattcgacatccagatgacacagagccctagcagcctgtctgccagcgtgggagacagagtgaccatcacctgtagagccagccaggacatccggtactacctgaactggtatcagcagaagcccggcaaggcccctaagctgctgatctatgtggcctccagcctccagagcggagtgccttctagattttctggcagcggctccggcaccgagtttaccctgacagtgtctagcttgcagcccgaggacttcgccacctactactgcctgcaagtgtacagcacccctcggacctttggacagggcaccaaggtggaaatcaaactcgaggacctgaagaacgtgttcccacctgaggtggccgtgttcgagcctagcgaggccgagatcagccacacccagaaagccaccctcgtgtgcctggctaccggcttctaccccgaccatgtggaactgtcttggtgggtcaacggcaaagaggtgcacagcggcgtgtgtaccgacccccagccactgaaagaacagcccgccctgaacgacagccggtactgcctgagcagcagactgagagtgtccgccaccttctggcagaacccccggaaccacttcagatgccaggtgcagttctacggcctgagcgagaacgacgagtggacccaggacagagccaagcccgtgacccagatcgtgtctgccgaagcctggggcagagccgattgcgacgtgaagctggtggaaaagagcttcgagacagacaccaacctgaacttccagaacctgagcgtgatcggcttcagaatcctgctgctgaaagtggccggctttaacctgctgatgaccctgcggctgtggtccagcagggccaagcgatctggatctggagcaacaaacttctcactactcaaacaagcaggtgacgtggaggagaatcccgggcctactagtatggactggatttggcgcatccttttccttgtcggcgctgctaccggcgcgcattccgggccccagctccagctgcaagagtctggacctggcctggtcaagcctagcgagacactgagcctgacctgtaccgtgtccggcgatagcatcagcagcggcgattactactggggctggatcagacagcctcctggcaaaggactggaatggatcggccacatctactacagcggcgtgacctactacaaccccagcctgaagtccagagtgaccatcagcgtggacaccagccggaaccagttctccctgaagctgtctagcgtgacagccgccgataccgccgtgtactactgcaccagagaggacagcagcaactggcggagtagaggccagggaacactggtcacagttagctctggatccggcggaggcggaagtggaggcggaggatctggcggcggaggctctttcgaagaagtgcagcttgttgaatctggcggcggactggctaagcctggcggatctctgagactgtcttgtgccgccagcggcttccggttcaccttcaacaactactacatggactgggtccgacaggcccctggacaaggacttgaatgggtgtccagaatcagcagcagcggcgaccctacttggtacgccgattctgtgaagggcagattcaccatcagcagagagaacgccaagaacaccctgttcctccagatgaactccctgagagccgaggacaccgccgtgtactattgtgcctctctgaccaccggcagcgattcttggggacagggcgtgctggttaccgtgtcatctacgcgtatccagaaccctgatcctgccgtgtaccagctgcgggatagcaagagcagcgacaagagcgtgtgtctgttcaccgacttcgacagccagaccaacgtgtcccagagcaaggactccgacgtgtacatcaccgataagtgcgtgctggacatgcggagcatggacttcaagagcaactccgccgtggcctggtccaacaagtccgatttcgcctgcgccaacgccttcaacaacagcattatccccgaggacacattcttcccaagccccgagagcagctgcggctttaccagcgagagctaccagcagggcgtgctgagcgccaccatcctgtacgagatcctgctgggcaaggccaccctgtacgccgtgctggtgtctgccctggtgctgatggctatggtcaagcggaaggacagccgggga

SEQ ID NO: 4698 - DNA, 2673 bp, synthetic construct
  source 1..2673: mol_type = other DNA
atggccttaccagtgaccgccttgctcctgccgctggccttgctgctccacgccgccaggccggaagtgcagctggttgaatctggcggaggactggttcagcctggcggatctctgagactgtcttgtgccgccagcggcttcagcttcagcgacttttggatgagctgggtccgacaggcccctggcaaaggacttgaatgggtcgccacaatcagccaggccggcagcgagaaggactacgtggactctgtgaagggcagattcaccatcagccgggacaacgccaagaagtccctgtacctccagatgaacagcctgagagccgaggacaccgccgtgtactattgtgcctctggcgtgtacagcttcgactacagaggccagggcaccctggtcacagtctcttctggtaccggcggaggcggatctggcggcggaggtagcggtggcggaggatctgaattcgagatcgtgatgacacagagccccgccacactgagtgtgtctccaggcgaaagagccacactgtcctgtagagccagccagagcgtgtccagaaacctggcctggtatcagcagaagcctggacaggctccccggctgttgatctacggcgcttctacaagagccaccggcattcccgccagattttctggctctggcagcggcaccgagttcaccctgacaatcggaagcctccagagcgaggacttcgccgtgtactactgccagcagtacaagacctggcctcggacctttggacagggcaccaacgtggaaatcaaactcgaggacctgaagaacgtgttcccacctgaggtggccgtgttcgagcctagcgaggccgagatcagccacacccagaaagccaccctcgtgtgcctggctaccggcttctaccccgaccatgtggaactgtcttggtgggtcaacggcaaagaggtgcacagcggcgtgtgtaccgacccccagccactgaaagaacagcccgccctgaacgacagccggtactgcctgagcagcagactgagagtgtccgccaccttctggcagaacccccggaaccacttcagatgccaggtgcagttctacggcctgagcgagaacgacgagtggacccaggacagagccaagcccgtgacccagatcgtgtctgccgaagcctggggcagagccgattgcgacgtgaagctggtggaaaagagcttcgagacagacaccaacctgaacttccagaacctgagcgtgatcggcttcagaatcctgctgctgaaagtggccggctttaacctgctgatgaccctgcggctgtggtccagcagggccaagcgatctggatctggagcaacaaacttctcactactcaaacaagcaggtgacgtggaggagaatcccgggcctactagtatggactggatttggcgcatccttttccttgtcggcgctgctaccggcgcgcattccgggccccagctccagctgcaagagtctggacctggcctggtcaagcctagcgagacactgagcctgacctgtaccgtgtccggcgatagcatcagcagcggcgattactactggggctggatcagacagcctcctggcaaaggactggaatggatcggccacatctactacagcggcgtgacctactacaaccccagcctgaagtccagagtgaccatcagcgtggacaccagccggaaccagttctccctgaagctgtctagcgtgacagccgccgataccgccgtgtactactgcaccagagaggacagcagcaactggcggagtagaggccagggaacactggtcacagttagctctggatccggcggaggcggaagtggaggcggaggatctggcggcggaggctctttcgaacaagttcagctgcaacaatggggagccggcctgctgaagcctagcgaaacactgtctctgacctgcgccgtgttcggcggctctttcagcggctactactggtcctggatcagacagcctcctggcaaaggactggaatggatcggcgagatcaaccaccggggcaacaccaacgacaaccccagcctgaaaagcagagtgaccatcagcgtggacaccagcaagaaccagttcgccctgaagctgagcagcgtgacagccgctgataccgccgtgtattattgcgccagagagcggggctacacctacggcaatttcgatcactggggccagggcaccctggtcacagtttcttctacgcgtatccagaaccctgatcctgccgtgtaccagctgcgggatagcaagagcagcgacaagagcgtgtgtctgttcaccgacttcgacagccagaccaacgtgtcccagagcaaggactccgacgtgtacatcaccgataagtgcgtgctggacatgcggagcatggacttcaagagcaactccgccgtggcctggtccaacaagtccgatttcgcctgcgccaacgccttcaacaacagcattatccccgaggacacattcttcccaagccccgagagcagctgcggctttaccagcgagagctaccagcagggcgtgctgagcgccaccatcctgtacgagatcctgctgggcaaggccaccctgtacgccgtgctggtgtctgccctggtgctgatggctatggtcaagcggaaggacagccgggga

SEQ ID NO: 4699 - DNA, 2676 bp, synthetic construct
  source 1..2676: mol_type = other DNA
atggccttaccagtgaccgccttgctcctgccgctggccttgctgctccacgccgccaggccggaagtgcagctggttgaatctggcggaggactggttcagcctggcggatctctgagactgtcttgtgccgccagcggcttcagcttcagcgacttttggatgagctgggtccgacaggcccctggcaaaggacttgaatgggtcgccacaatcagccaggccggcagcgagaaggactacgtggactctgtgaagggcagattcaccatcagccgggacaacgccaagaagtccctgtacctccagatgaacagcctgagagccgaggacaccgccgtgtactattgtgcctctggcgtgtacagcttcgactacagaggccagggcaccctggtcacagtctcttctggtaccggcggaggcggatctggcggcggaggtagcggtggcggaggatctgaattcgagatcgtgatgacccctagcagcgccacactgagtgtgtctccaggcgaaagagccacactgtcctgtagagccagccagagcgtgtccagaaacctggcctggtatcagcagaagcctggacaggctccccggctgttgatctacggcgcttctacaagagccaccggcattcccgccagattttctggctctggcagcggcaccgagttcaccctgacaatctctagcctccagagcgaggacttcgccgtgtactactgccaccagtacagcaactggatgtgcagcttcggccagggcaccaagctggaaatcaaactcgaggacctgaagaacgtgttcccacctgaggtggccgtgttcgagcctagcgaggccgagatcagccacacccagaaagccaccctcgtgtgcctggctaccggcttctaccccgaccatgtggaactgtcttggtgggtcaacggcaaagaggtgcacagcggcgtgtgtaccgacccccagccactgaaagaacagcccgccctgaacgacagccggtactgcctgagcagcagactgagagtgtccgccaccttctggcagaacccccggaaccacttcagatgccaggtgcagttctacggcctgagcgagaacgacgagtggacccaggacagagccaagcccgtgacccagatcgtgtctgccgaagcctggggcagagccgattgcgacgtgaagctggtggaaaagagcttcgagacagacaccaacctgaacttccagaacctgagcgtgatcggcttcagaatcctgctgctgaaagtggccggctttaacctgctgatgaccctgcggctgtggtccagcagggccaagcgatctggatctggagcaacaaacttctcactactcaaacaagcaggtgacgtggaggagaatcccgggcctactagtatggactggatttggcgcatccttttccttgtcggcgctgctaccggcgcgcattccgggccccagctccagctgcaagagtctggacctggcctggtcaagcctagcgagacactgagcctgacctgtaccgtgtccggcgatagcatcagcagcggcgattactactggggctggatcagacagcctcctggcaaaggactggaatggatcggccacatctactacagcggcgtgacctactacaaccccagcctgaagtccagagtgaccatcagcgtggacaccagccggaaccagttctccctgaagctgtctagcgtgacagccgccgataccgccgtgtactactgcaccagagaggacagcagcaactggcggagtagaggccagggaacactggtcacagttagctctggatccggcggaggcggaagtggaggcggaggatctggcggcggaggctctttcgaagaagttcagctccttgagtcaggtggcggcctggttcaacctggcggatctctgagactgagctgtgccgccagcggcttcacctttagcagatacgccatgaactgggtccgacaggcccctggcaaaggactggaatgggtgtccggcatctctggaagcggcggcagaacctactacgccgattctgtgaagggcagattcaccatcagccgggacaacagcaagaacaccctgtacctccagatgaacagcctgagagccgaggacacagccgtgtattattgcgccaaggaccgggacttttggagcggcccttttgactattggggccagggaaccctggtcaccgttagctctacgcgtatccagaaccctgatcctgccgtgtaccagctgcgggatagcaagagcagcgacaagagcgtgtgtctgttcaccgacttcgacagccagaccaacgtgtcccagagcaaggactccgacgtgtacatcaccgataagtgcgtgctggacatgcggagcatggacttcaagagcaactccgccgtggcctggtccaacaagtccgatttcgcctgcgccaacgccttcaacaacagcattatccccgaggacacattcttcccaagccccgagagcagctgcggctttaccagcgagagctaccagcagggcgtgctgagcgccaccatcctgtacgagatcctgctgggcaaggccaccctgtacgccgtgctggtgtctgccctggtgctgatggctatggtcaagcggaaggacagccgggga

SEQ ID NO: 4700 - DNA, 2691 bp, synthetic construct
  source 1..2691: mol_type = other DNA
atggccttaccagtgaccgccttgctcctgccgctggccttgctgctccacgccgccaggccggaagtgcagctggttgaatctggcggaggactggttcagcctggcggatctctgagactgtcttgtgccgccagcggcttcagcttcagcgacttttggatgagctgggtccgacaggcccctggcaaaggacttgaatgggtcgccacaatcagccaggccggcagcgagaaggactacgtggactctgtgaagggcagattcaccatcagccgggacaacgccaagaagtccctgtacctccagatgaacagcctgagagccgaggacaccgccgtgtactattgtgcctctggcgtgtacagcttcgactacagaggccagggcaccctggtcacagtctcttctggtaccggcggaggcggatctggcggcggaggtagcggtggcggaggatctgaattcgacatccagatgacccagagccccagcagcctgtctgccagcgtgggcgacagagtgaccatcacatgcaaggccagcaagaacatcagaagctacctggcctggtatcagcagaagcccggcaaggcccccaagctgctgatctacagcggcagcacactgcacagcggcgtgcccagcagattttccggctctggcagcggcaccgacttcaccctgaccatctctagcctccagcccgaggacttcgccacctactactgccagcagcaccacgagtaccccctgacattcggccagggcaccaaggtggaaatcaagagactcgaggacctgaagaacgtgttcccacctgaggtggccgtgttcgagcctagcgaggccgagatcagccacacccagaaagccaccctcgtgtgcctggctaccggcttctaccccgaccatgtggaactgtcttggtgggtcaacggcaaagaggtgcacagcggcgtgtgtaccgacccccagccactgaaagaacagcccgccctgaacgacagccggtactgcctgagcagcagactgagagtgtccgccaccttctggcagaacccccggaaccacttcagatgccaggtgcagttctacggcctgagcgagaacgacgagtggacccaggacagagccaagcccgtgacccagatcgtgtctgccgaagcctggggcagagccgattgcgacgtgaagctggtggaaaagagcttcgagacagacaccaacctgaacttccagaacctgagcgtgatcggcttcagaatcctgctgctgaaagtggccggctttaacctgctgatgaccctgcggctgtggtccagcagggccaagcgatctggatctggagcaacaaacttctcactactcaaacaagcaggtgacgtggaggagaatcccgggcctactagtatggactggatttggcgcatccttttccttgtcggcgctgctaccggcgcgcattccgggccccagctccagctgcaagagtctggacctggcctggtcaagcctagcgagacactgagcctgacctgtaccgtgtccggcgatagcatcagcagcggcgattactactggggctggatcagacagcctcctggcaaaggactggaatggatcggccacatctactacagcggcgtgacctactacaaccccagcctgaagtccagagtgaccatcagcgtggacaccagccggaaccagttctccctgaagctgtctagcgtgacagccgccgataccgccgtgtactactgcaccagagaggacagcagcaactggcggagtagaggccagggaacactggtcacagttagctctggatccggcggaggcggaagtggaggcggaggatctggcggcggaggctctttcgaacaggtgcaactccaggaatctggccccggactcgtgaagcccagcgagacactgagcctgacctgtaccgtgtccggctacaccatcaccagcggctacgactggtcctggatcagacagcctcctggcaagggcctggaatggatcggctacatcaactacggcggctccaccaactacaagcccagcctgggaagccgcgtgacaatcagcgtggacacctccaagaaccagttcagcctgaagctgagcagcgtgacagccgccgataccgccgtgtactactgcgcccggtacaacgagtacaagagctacatctacgattggtacttcgacttctggggccagggaaccctcgtgaccgtgtctagtacgcgtatccagaaccctgatcctgccgtgtaccagctgcgggatagcaagagcagcgacaagagcgtgtgtctgttcaccgacttcgacagccagaccaacgtgtcccagagcaaggactccgacgtgtacatcaccgataagtgcgtgctggacatgcggagcatggacttcaagagcaactccgccgtggcctggtccaacaagtccgatttcgcctgcgccaacgccttcaacaacagcattatccccgaggacacattcttcccaagccccgagagcagctgcggctttaccagcgagagctaccagcagggcgtgctgagcgccaccatcctgtacgagatcctgctgggcaaggccaccctgtacgccgtgctggtgtctgccctggtgctgatggctatggtcaagcggaaggacagccgggga

SEQ ID NO: 4701 - DNA, 2697 bp, synthetic construct
  source 1..2697: mol_type = other DNA
atggccttaccagtgaccgccttgctcctgccgctggccttgctgctccacgccgccaggccggaagtgcagctggttgaatctggcggaggactggttcagcctggcggatctctgagactgtcttgtgccgccagcggcttcagcttcagcgacttttggatgagctgggtccgacaggcccctggcaaaggacttgaatgggtcgccacaatcagccaggccggcagcgagaaggactacgtggactctgtgaagggcagattcaccatcagccgggacaacgccaagaagtccctgtacctccagatgaacagcctgagagccgaggacaccgccgtgtactattgtgcctctggcgtgtacagcttcgactacagaggccagggcaccctggtcacagtctcttctggtaccggcggaggcggatctggcggcggaggtagcggtggcggaggatctgaattccagtctgtggtcacacagcctccatccgtgtctgctgcccctggacagaaagtgaccatctcctgtagcggcagcagcagcaacatcggcaacaactacgtgtcctggtatcagcagctccccggcacagctcccaaactgctgatctacgacaacaacaagcggcccagcggcatccccgatagattttctggcagcaagagcggcaccagcgccacactgggaattaccggacttcagacaggcgacgaggccgactactactgtggcacatgggatggcagcctgtacaccatgcttttcggcggaggcaccaagctgacagtgcttctcgaggacctgaagaacgtgttcccacctgaggtggccgtgttcgagcctagcgaggccgagatcagccacacccagaaagccaccctcgtgtgcctggctaccggcttctaccccgaccatgtggaactgtcttggtgggtcaacggcaaagaggtgcacagcggcgtgtgtaccgacccccagccactgaaagaacagcccgccctgaacgacagccggtactgcctgagcagcagactgagagtgtccgccaccttctggcagaacccccggaaccacttcagatgccaggtgcagttctacggcctgagcgagaacgacgagtggacccaggacagagccaagcccgtgacccagatcgtgtctgccgaagcctggggcagagccgattgcgacgtgaagctggtggaaaagagcttcgagacagacaccaacctgaacttccagaacctgagcgtgatcggcttcagaatcctgctgctgaaagtggccggctttaacctgctgatgaccctgcggctgtggtccagcagggccaagcgatctggatctggagcaacaaacttctcactactcaaacaagcaggtgacgtggaggagaatcccgggcctactagtatggactggatttggcgcatccttttccttgtcggcgctgctaccggcgcgcattccgggccccagctccagctgcaagagtctggacctggcctggtcaagcctagcgagacactgagcctgacctgtaccgtgtccggcgatagcatcagcagcggcgattactactggggctggatcagacagcctcctggcaaaggactggaatggatcggccacatctactacagcggcgtgacctactacaaccccagcctgaagtccagagtgaccatcagcgtggacaccagccggaaccagttctccctgaagctgtctagcgtgacagccgccgataccgccgtgtactactgcaccagagaggacagcagcaactggcggagtagaggccagggaacactggtcacagttagctctggatccggcggaggcggaagtggaggcggaggatctggcggcggaggctctttcgaagaagtgcaactggtggaatctggcggcggactggttaagcctggcggatctctgagactgtcttgtgccgccagcggcttcaccttcagcaatgcctggatgagctgggttcgacaggcccctggaaaaggactggaatgggtcggattcatccggtccaaagcctacggcggcaccacagaatatgccgcctctgtgaagggcagattcaccatcagccgggacgacagcaagtctatcgcctacctccagatgaacaacctgaaaaccgaggacaccgccgtgtactactgcgccagagatggcctgtacagcagctcttggtacgacagcgattactggggccagggcacactggtcacagtgtcatctacgcgtatccagaaccctgatcctgccgtgtaccagctgcgggatagcaagagcagcgacaagagcgtgtgtctgttcaccgacttcgacagccagaccaacgtgtcccagagcaaggactccgacgtgtacatcaccgataagtgcgtgctggacatgcggagcatggacttcaagagcaactccgccgtggcctggtccaacaagtccgatttcgcctgcgccaacgccttcaacaacagcattatccccgaggacacattcttcccaagccccgagagcagctgcggctttaccagcgagagctaccagcagggcgtgctgagcgccaccatcctgtacgagatcctgctgggcaaggccaccctgtacgccgtgctggtgtctgccctggtgctgatggctatggtcaagcggaaggacagccgggga

SEQ ID NO: 4702 - DNA, 2712 bp, synthetic construct
  source 1..2712: mol_type = other DNA
atggccttaccagtgaccgccttgctcctgccgctggccttgctgctccacgccgccaggccggaagtgcagctggttgaatctggcggaggactggttcagcctggcggatctctgagactgtcttgtgccgccagcggcttcagcttcagcgacttttggatgagctgggtccgacaggcccctggcaaaggacttgaatgggtcgccacaatcagccaggccggcagcgagaaggactacgtggactctgtgaagggcagattcaccatcagccgggacaacgccaagaagtccctgtacctccagatgaacagcctgagagccgaggacaccgccgtgtactattgtgcctctggcgtgtacagcttcgactacagaggccagggcaccctggtcacagtctcttctggtaccggcggaggcggatctggcggcggaggtagcggtggcggaggatctgaattccagtctgtgctgacacagcctcctagtgtgtctggcgctcctggacagagagtgaccatctcttgtaccggcagcagcagcaatatcggagccggctatgacgtgcactggtatcagcagctccctggcacagcccctaaactgctgatcttcggcaacagcaacagacccagcggcgtgcccgatagattcagcggctttaagagcggcacaagcgccagcctggctatcactggactgcaagccgaggacgaggccgactacttctgccagagctacgatagcagcctgagcggcagcggagtgtttggcacaggcaccaaagtgacagtgcttggcctcgaggacctgaagaacgtgttcccacctgaggtggccgtgttcgagcctagcgaggccgagatcagccacacccagaaagccaccctcgtgtgcctggctaccggcttctaccccgaccatgtggaactgtcttggtgggtcaacggcaaagaggtgcacagcggcgtgtgtaccgacccccagccactgaaagaacagcccgccctgaacgacagccggtactgcctgagcagcagactgagagtgtccgccaccttctggcagaacccccggaaccacttcagatgccaggtgcagttctacggcctgagcgagaacgacgagtggacccaggacagagccaagcccgtgacccagatcgtgtctgccgaagcctggggcagagccgattgcgacgtgaagctggtggaaaagagcttcgagacagacaccaacctgaacttccagaacctgagcgtgatcggcttcagaatcctgctgctgaaagtggccggctttaacctgctgatgaccctgcggctgtggtccagcagggccaagcgatctggatctggagcaacaaacttctcactactcaaacaagcaggtgacgtggaggagaatcccgggcctactagtatggactggatttggcgcatccttttccttgtcggcgctgctaccggcgcgcattccgggccccagctccagctgcaagagtctggacctggcctggtcaagcctagcgagacactgagcctgacctgtaccgtgtccggcgatagcatcagcagcggcgattactactggggctggatcagacagcctcctggcaaaggactggaatggatcggccacatctactacagcggcgtgacctactacaaccccagcctgaagtccagagtgaccatcagcgtggacaccagccggaaccagttctccctgaagctgtctagcgtgacagccgccgataccgccgtgtactactgcaccagagaggacagcagcaactggcggagtagaggccagggaacactggtcacagttagctctggatccggcggaggcggaagtggaggcggaggatctggcggcggaggctctttcgaacaaatgcaactggttcaaagcggcggtggcctggtgcaacctggaagaagtctgagactgagctgtgccgccagcggcttcaccttcgatgattacgccatgcactgggtccgacaggcccctggaaaaggactggaatgggtgtccggcatctcctggaatagcggctctatcggctacgccgacagcgtgaagggcagattcaccatcagccgggacaacgccaagaacagcctgtacctccagatgaactccctgagagccgaggatacagccctgtactactgcgccaaggacatccacagcggcagctactacggcctgctgtactacgctatggacgtgtggggccagggcacaaccgtgacagtttcttctacgcgtatccagaaccctgatcctgccgtgtaccagctgcgggatagcaagagcagcgacaagagcgtgtgtctgttcaccgacttcgacagccagaccaacgtgtcccagagcaaggactccgacgtgtacatcaccgataagtgcgtgctggacatgcggagcatggacttcaagagcaactccgccgtggcctggtccaacaagtccgatttcgcctgcgccaacgccttcaacaacagcattatccccgaggacacattcttcccaagccccgagagcagctgcggctttaccagcgagagctaccagcagggcgtgctgagcgccaccatcctgtacgagatcctgctgggcaaggccaccctgtacgccgtgctggtgtctgccctggtgctgatggctatggtcaagcggaaggacagccgggga

SEQ ID NO: 4703 - DNA, 2712 bp, synthetic construct
  source 1..2712: mol_type = other DNA
atggccttaccagtgaccgccttgctcctgccgctggccttgctgctccacgccgccaggccggaagtgcagctggttgaatctggcggaggactggttcagcctggcggatctctgagactgtcttgtgccgccagcggcttcagcttcagcgacttttggatgagctgggtccgacaggcccctggcaaaggacttgaatgggtcgccacaatcagccaggccggcagcgagaaggactacgtggactctgtgaagggcagattcaccatcagccgggacaacgccaagaagtccctgtacctccagatgaacagcctgagagccgaggacaccgccgtgtactattgtgcctctggcgtgtacagcttcgactacagaggccagggcaccctggtcacagtctcttctggtaccggcggaggcggatctggcggcggaggtagcggtggcggaggatctgaattcctgcctgttctgacacagcctccatctgcctctggcacacctggacagagagtgaccatcagctgtagcggcagaagcagcaacatcggcagcaacagcgtgaactggtacagacagcttcctggcgctgcccctaagctgctgatctacagcaacaaccagcggcctcctggcgtgccagtcagattttctggcagcaagagcggcacaagcgccagcctggctatttctggactccagtctgaggacgaggccacctactactgtgccacctgggacgacaacctgaacgtgcactacgtgttcggcaccggcaccaaagtgacagtgcttggaagtagactcgaggacctgaagaacgtgttcccacctgaggtggccgtgttcgagcctagcgaggccgagatcagccacacccagaaagccaccctcgtgtgcctggctaccggcttctaccccgaccatgtggaactgtcttggtgggtcaacggcaaagaggtgcacagcggcgtgtgtaccgacccccagccactgaaagaacagcccgccctgaacgacagccggtactgcctgagcagcagactgagagtgtccgccaccttctggcagaacccccggaaccacttcagatgccaggtgcagttctacggcctgagcgagaacgacgagtggacccaggacagagccaagcccgtgacccagatcgtgtctgccgaagcctggggcagagccgattgcgacgtgaagctggtggaaaagagcttcgagacagacaccaacctgaacttccagaacctgagcgtgatcggcttcagaatcctgctgctgaaagtggccggctttaacctgctgatgaccctgcggctgtggtccagcagggccaagcgatctggatctggagcaacaaacttctcactactcaaacaagcaggtgacgtggaggagaatcccgggcctactagtatggactggatttggcgcatccttttccttgtcggcgctgctaccggcgcgcattccgggccccagctccagctgcaagagtctggacctggcctggtcaagcctagcgagacactgagcctgacctgtaccgtgtccggcgatagcatcagcagcggcgattactactggggctggatcagacagcctcctggcaaaggactggaatggatcggccacatctactacagcggcgtgacctactacaaccccagcctgaagtccagagtgaccatcagcgtggacaccagccggaaccagttctccctgaagctgtctagcgtgacagccgccgataccgccgtgtactactgcaccagagaggacagcagcaactggcggagtagaggccagggaacactggtcacagttagctctggatccggcggaggcggaagtggaggcggaggatctggcggcggaggctctttcgaacttgaaatggctcaggtgcagctggtgcagagcggagccgaagtgaagaaacctggcagcagcgtgaaggtgtcctgcaaagcttctggcggcaccttcagcagctacgccatctcttgggttcgacaggcccctggacaaggactggaatggatgggcagaatcatccccatcctgggaatcgccaactacgcccagaaattccagggcagagtgacaatcaccgccgacaagagcaccagcaccgcctacatggaactgagcagcctgagaagcgaggacaccgccgtgtactattgtgcaagaggcggctactacagccacgacatgtggagcgaagattggggccagggcacactggtcacagtgtcatctacgcgtatccagaaccctgatcctgccgtgtaccagctgcgggatagcaagagcagcgacaagagcgtgtgtctgttcaccgacttcgacagccagaccaacgtgtcccagagcaaggactccgacgtgtacatcaccgataagtgcgtgctggacatgcggagcatggacttcaagagcaactccgccgtggcctggtccaacaagtccgatttcgcctgcgccaacgccttcaacaacagcattatccccgaggacacattcttcccaagccccgagagcagctgcggctttaccagcgagagctaccagcagggcgtgctgagcgccaccatcctgtacgagatcctgctgggcaaggccaccctgtacgccgtgctggtgtctgccctggtgctgatggctatggtcaagcggaaggacagccgggga

SEQ ID NO: 4704 - DNA, 2694 bp, synthetic construct
  source 1..2694: mol_type = other DNA
atggccttaccagtgaccgccttgctcctgccgctggccttgctgctccacgccgccaggccggaagtgcagctggttgaatctggcggaggactggttcagcctggcggatctctgagactgtcttgtgccgccagcggcttcagcttcagcgacttttggatgagctgggtccgacaggcccctggcaaaggacttgaatgggtcgccacaatcagccaggccggcagcgagaaggactacgtggactctgtgaagggcagattcaccatcagccgggacaacgccaagaagtccctgtacctccagatgaacagcctgagagccgaggacaccgccgtgtactattgtgcctctggcgtgtacagcttcgactacagaggccagggcaccctggtcacagtctcttctggtaccggcggaggcggatctggcggcggaggtagcggtggcggaggatctgaattcgacttcgtgatgacacagagccctgatagcctggccgtgtctctcggcgagcgagtgaccatgagctgcaagtctagccagagcctgctgaacagcggcaaccagaagaactacctgacctggtatcagcagaagcccggccagcctcctaagctgctgatctactgggccagcaccagagaaagcggcgtgcccgatagattttctggctctggcagcggcaccgacttcaccctgacaatttctagcctgcaagccgaggacgtggccgtgtactactgccagaacgactacagctacccctacaccttcggccagggcaccaagctggaaatcaaactcgaggacctgaagaacgtgttcccacctgaggtggccgtgttcgagcctagcgaggccgagatcagccacacccagaaagccaccctcgtgtgcctggctaccggcttctaccccgaccatgtggaactgtcttggtgggtcaacggcaaagaggtgcacagcggcgtgtgtaccgacccccagccactgaaagaacagcccgccctgaacgacagccggtactgcctgagcagcagactgagagtgtccgccaccttctggcagaacccccggaaccacttcagatgccaggtgcagttctacggcctgagcgagaacgacgagtggacccaggacagagccaagcccgtgacccagatcgtgtctgccgaagcctggggcagagccgattgcgacgtgaagctggtggaaaagagcttcgagacagacaccaacctgaacttccagaacctgagcgtgatcggcttcagaatcctgctgctgaaagtggccggctttaacctgctgatgaccctgcggctgtggtccagcagggccaagcgatctggatctggagcaacaaacttctcactactcaaacaagcaggtgacgtggaggagaatcccgggcctactagtatggactggatttggcgcatccttttccttgtcggcgctgctaccggcgcgcattccgggccccagctccagctgcaagagtctggacctggcctggtcaagcctagcgagacactgagcctgacctgtaccgtgtccggcgatagcatcagcagcggcgattactactggggctggatcagacagcctcctggcaaaggactggaatggatcggccacatctactacagcggcgtgacctactacaaccccagcctgaagtccagagtgaccatcagcgtggacaccagccggaaccagttctccctgaagctgtctagcgtgacagccgccgataccgccgtgtactactgcaccagagaggacagcagcaactggcggagtagaggccagggaacactggtcacagttagctctggatccggcggaggcggaagtggaggcggaggatctggcggcggaggctctttcgaagaagtgcaactggttcagagcggagccgagctgaagaaacctggggccagcgtgaaggtgtcctgtaaagccagcggctacacctttaccgactactacatgaaatgggtccgacaggccccaggccagggactcgaatggatcggcgatattatccccagcaacggggccaccttctacaaccagaaattcaagggccgcgtgaccatcaccgtggacaagagcacaagcaccgcctacatggaactgagcagcctgagaagcgaggacaccgccgtgtattattgcgccagaagccatctgctgcgggccagttggttcgcctattggggacagggaaccctggtcaccgttagctctacgcgtatccagaaccctgatcctgccgtgtaccagctgcgggatagcaagagcagcgacaagagcgtgtgtctgttcaccgacttcgacagccagaccaacgtgtcccagagcaaggactccgacgtgtacatcaccgataagtgcgtgctggacatgcggagcatggacttcaagagcaactccgccgtggcctggtccaacaagtccgatttcgcctgcgccaacgccttcaacaacagcattatccccgaggacacattcttcccaagccccgagagcagctgcggctttaccagcgagagctaccagcagggcgtgctgagcgccaccatcctgtacgagatcctgctgggcaaggccaccctgtacgccgtgctggtgtctgccctggtgctgatggctatggtcaagcggaaggacagccgggga

SEQ ID NO: 4705 - DNA, 2694 bp, synthetic construct
  source 1..2694: mol_type = other DNA
atggccttaccagtgaccgccttgctcctgccgctggccttgctgctccacgccgccaggccggaagtgcagctggttgaatctggcggaggactggttcagcctggcggatctctgagactgtcttgtgccgccagcggcttcagcttcagcgacttttggatgagctgggtccgacaggcccctggcaaaggacttgaatgggtcgccacaatcagccaggccggcagcgagaaggactacgtggactctgtgaagggcagattcaccatcagccgggacaacgccaagaagtccctgtacctccagatgaacagcctgagagccgaggacaccgccgtgtactattgtgcctctggcgtgtacagcttcgactacagaggccagggcaccctggtcacagtctcttctggtaccggcggaggcggatctggcggcggaggtagcggtggcggaggatctgaattcgacttcgtgatgacacagagccctgatagcctggccgtgtctctcggcgagcgagtgaccatgagctgcaagtctagccagagcctgctgaacagcggcaaccagaagaactacctgacctggtatcagcagaagcccggccagcctcctaagctgctgatctactgggccagcaccagagaaagcggcgtgcccgatagattttctggctctggcagcggcaccgacttcaccctgacaatttctagcctgcaagccgaggacgtggccgtgtactactgccagaacgactacagctacccctacaccttcggccagggcaccaagctggaaatcaaactcgaggacctgaagaacgtgttcccacctgaggtggccgtgttcgagcctagcgaggccgagatcagccacacccagaaagccaccctcgtgtgcctggctaccggcttctaccccgaccatgtggaactgtcttggtgggtcaacggcaaagaggtgcacagcggcgtgtgtaccgacccccagccactgaaagaacagcccgccctgaacgacagccggtactgcctgagcagcagactgagagtgtccgccaccttctggcagaacccccggaaccacttcagatgccaggtgcagttctacggcctgagcgagaacgacgagtggacccaggacagagccaagcccgtgacccagatcgtgtctgccgaagcctggggcagagccgattgcgacgtgaagctggtggaaaagagcttcgagacagacaccaacctgaacttccagaacctgagcgtgatcggcttcagaatcctgctgctgaaagtggccggctttaacctgctgatgaccctgcggctgtggtccagcagggccaagcgatctggatctggagcaacaaacttctcactactcaaacaagcaggtgacgtggaggagaatcccgggcctactagtatggactggatttggcgcatccttttccttgtcggcgctgctaccggcgcgcattccgggccccagctccagctgcaagagtctggacctggcctggtcaagcctagcgagacactgagcctgacctgtaccgtgtccggcgatagcatcagcagcggcgattactactggggctggatcagacagcctcctggcaaaggactggaatggatcggccacatctactacagcggcgtgacctactacaaccccagcctgaagtccagagtgaccatcagcgtggacaccagccggaaccagttctccctgaagctgtctagcgtgacagccgccgataccgccgtgtactactgcaccagagaggacagcagcaactggcggagtagaggccagggaacactggtcacagttagctctggatccggcggaggcggaagtggaggcggaggatctggcggcggaggctctttcgaacaagtgcaactggttcagagcggagccgagctgaagaaacctggggccagcgtgaaggtgtcctgtaaagccagcggctacacctttaccgactactacatgaaatgggtccgacaggccccaggccagggactcgaatggatcggcgatattatccccagcaacggggccaccttctacaaccagaaattcaagggccgcgtgaccatcaccgtggacaagagcacaagcaccgcctacatggaactgagcagcctgagaagcgaggacaccgccgtgtattattgcgccagaagccatctgctgcgggccagttggttcgcctattggggacagggaaccctggtcaccgttagctctacgcgtatccagaaccctgatcctgccgtgtaccagctgcgggatagcaagagcagcgacaagagcgtgtgtctgttcaccgacttcgacagccagaccaacgtgtcccagagcaaggactccgacgtgtacatcaccgataagtgcgtgctggacatgcggagcatggacttcaagagcaactccgccgtggcctggtccaacaagtccgatttcgcctgcgccaacgccttcaacaacagcattatccccgaggacacattcttcccaagccccgagagcagctgcggctttaccagcgagagctaccagcagggcgtgctgagcgccaccatcctgtacgagatcctgctgggcaaggccaccctgtacgccgtgctggtgtctgccctggtgctgatggctatggtcaagcggaaggacagccgggga

SEQ ID NO: 4706 - DNA, 2664 bp, synthetic construct
  source 1..2664: mol_type = other DNA
atggccttaccagtgaccgccttgctcctgccgctggccttgctgctccacgccgccaggccggaagtgcagctggttgaatctggcggaggactggttcagcctggcggatctctgagactgtcttgtgccgccagcggcttcagcttcagcgacttttggatgagctgggtccgacaggcccctggcaaaggacttgaatgggtcgccacaatcagccaggccggcagcgagaaggactacgtggactctgtgaagggcagattcaccatcagccgggacaacgccaagaagtccctgtacctccagatgaacagcctgagagccgaggacaccgccgtgtactattgtgcctctggcgtgtacagcttcgactacagaggccagggcaccctggtcacagtctcttctggtaccggcggaggcggatctggcggcggaggtagcggtggcggaggatctgaattcgacgtgcagatcacacagagccctagctacctggctgcctctcctggcgagacaatcaccatcaactgtcgggccagcaagagcatcagcaaggacctggcctggtatcaagagaagcccggcaagaccaacaagctgctgatctacagcggcagcacactccagtctggcatccccagcagattttccggctctggcagcggcaccgatttcaccctgaccataagcagcctggaacctgaggacttcgccatgtactactgccagcagcacaacaagtacccctacacctttggcggaggcaccaagctggaaatcaagagactcgaggacctgaagaacgtgttcccacctgaggtggccgtgttcgagcctagcgaggccgagatcagccacacccagaaagccaccctcgtgtgcctggctaccggcttctaccccgaccatgtggaactgtcttggtgggtcaacggcaaagaggtgcacagcggcgtgtgtaccgacccccagccactgaaagaacagcccgccctgaacgacagccggtactgcctgagcagcagactgagagtgtccgccaccttctggcagaacccccggaaccacttcagatgccaggtgcagttctacggcctgagcgagaacgacgagtggacccaggacagagccaagcccgtgacccagatcgtgtctgccgaagcctggggcagagccgattgcgacgtgaagctggtggaaaagagcttcgagacagacaccaacctgaacttccagaacctgagcgtgatcggcttcagaatcctgctgctgaaagtggccggctttaacctgctgatgaccctgcggctgtggtccagcagggccaagcgatctggatctggagcaacaaacttctcactactcaaacaagcaggtgacgtggaggagaatcccgggcctactagtatggactggatttggcgcatccttttccttgtcggcgctgctaccggcgcgcattccgggccccagctccagctgcaagagtctggacctggcctggtcaagcctagcgagacactgagcctgacctgtaccgtgtccggcgatagcatcagcagcggcgattactactggggctggatcagacagcctcctggcaaaggactggaatggatcggccacatctactacagcggcgtgacctactacaaccccagcctgaagtccagagtgaccatcagcgtggacaccagccggaaccagttctccctgaagctgtctagcgtgacagccgccgataccgccgtgtactactgcaccagagaggacagcagcaactggcggagtagaggccagggaacactggtcacagttagctctggatccggcggaggcggaagtggaggcggaggatctggcggcggaggctctttcgaacaagttcaactgcaacagcctggggccgagcttgttagacctggcgcttctgtgaagctgagctgcaaggccagcggctacaccttcaccagctactggatgaactgggtcaagcagcggcctgaccagggcctcgaatggatcggcagaatcgacccctacgacagcgagacacactacaaccagaagttcaaggacaaggccatcctgaccgtggacaagagcagctccaccgcctacatgcaactgagcagcctgacctctgaggatagcgccgtgtactattgcgccagaggcaactgggacgactattggggccagggcacaaccctgacagtgtctagtacgcgtatccagaaccctgatcctgccgtgtaccagctgcgggatagcaagagcagcgacaagagcgtgtgtctgttcaccgacttcgacagccagaccaacgtgtcccagagcaaggactccgacgtgtacatcaccgataagtgcgtgctggacatgcggagcatggacttcaagagcaactccgccgtggcctggtccaacaagtccgatttcgcctgcgccaacgccttcaacaacagcattatccccgaggacacattcttcccaagccccgagagcagctgcggctttaccagcgagagctaccagcagggcgtgctgagcgccaccatcctgtacgagatcctgctgggcaaggccaccctgtacgccgtgctggtgtctgccctggtgctgatggctatggtcaagcggaaggacagccgggga

SEQ ID NO: 4707 - DNA, 2670 bp, synthetic construct
  source 1..2670: mol_type = other DNA
atggccttaccagtgaccgccttgctcctgccgctggccttgctgctccacgccgccaggccggaagtgcagctggttgaatctggcggaggactggttcagcctggcggatctctgagactgtcttgtgccgccagcggcttcagcttcagcgacttttggatgagctgggtccgacaggcccctggcaaaggacttgaatgggtcgccacaatcagccaggccggcagcgagaaggactacgtggactctgtgaagggcagattcaccatcagccgggacaacgccaagaagtccctgtacctccagatgaacagcctgagagccgaggacaccgccgtgtactattgtgcctctggcgtgtacagcttcgactacagaggccagggcaccctggtcacagtctcttctggtaccggcggaggcggatctggcggcggaggtagcggtggcggaggatctgaattcgagatcgtgctgacacagagccctaccagcatgacagcctctccaggcgagcaagtgaccatcacctgtagagccagcagcagcatcaactacatgcactggtatcagcagaagcctggcgcaagccccagaccttggatctacgagacaagcaagctggcctccggcgtgcccgatagattttctggatctgccagcggcaccagctacagcctgaccatcaacaacatggaagccgaggacgccgccacctactactgccagcagtggaattacccctcctggacctttggcggaggcaccaagctggaacttaaactcgaggacctgaagaacgtgttcccacctgaggtggccgtgttcgagcctagcgaggccgagatcagccacacccagaaagccaccctcgtgtgcctggctaccggcttctaccccgaccatgtggaactgtcttggtgggtcaacggcaaagaggtgcacagcggcgtgtgtaccgacccccagccactgaaagaacagcccgccctgaacgacagccggtactgcctgagcagcagactgagagtgtccgccaccttctggcagaacccccggaaccacttcagatgccaggtgcagttctacggcctgagcgagaacgacgagtggacccaggacagagccaagcccgtgacccagatcgtgtctgccgaagcctggggcagagccgattgcgacgtgaagctggtggaaaagagcttcgagacagacaccaacctgaacttccagaacctgagcgtgatcggcttcagaatcctgctgctgaaagtggccggctttaacctgctgatgaccctgcggctgtggtccagcagggccaagcgatctggatctggagcaacaaacttctcactactcaaacaagcaggtgacgtggaggagaatcccgggcctactagtatggactggatttggcgcatccttttccttgtcggcgctgctaccggcgcgcattccgggccccagctccagctgcaagagtctggacctggcctggtcaagcctagcgagacactgagcctgacctgtaccgtgtccggcgatagcatcagcagcggcgattactactggggctggatcagacagcctcctggcaaaggactggaatggatcggccacatctactacagcggcgtgacctactacaaccccagcctgaagtccagagtgaccatcagcgtggacaccagccggaaccagttctccctgaagctgtctagcgtgacagccgccgataccgccgtgtactactgcaccagagaggacagcagcaactggcggagtagaggccagggaacactggtcacagttagctctggatccggcggaggcggaagtggaggcggaggatctggcggcggaggctctttcgaagaagtgcagctcgttgagtctggtggcggactggttcagcctggaagaagcctgaagctgagctgtgccgccagcggcttcaccttcagcgactacaatatggcctgggtccgacaggcccctaagaaaggactggaatgggtcgccaccatcctgtacgatggcggcagaacctactaccggggcagcgtgaagggcagattcaccatcagcagagacaacgccaagagcaccctgtacctgcggatggactctctgagaagcgaggataccgccacatattactgtgccacacacagccggggcaccgactactttgattattggggccagggcgtgatggttaccgtgtctagtacgcgtatccagaaccctgatcctgccgtgtaccagctgcgggatagcaagagcagcgacaagagcgtgtgtctgttcaccgacttcgacagccagaccaacgtgtcccagagcaaggactccgacgtgtacatcaccgataagtgcgtgctggacatgcggagcatggacttcaagagcaactccgccgtggcctggtccaacaagtccgatttcgcctgcgccaacgccttcaacaacagcattatccccgaggacacattcttcccaagccccgagagcagctgcggctttaccagcgagagctaccagcagggcgtgctgagcgccaccatcctgtacgagatcctgctgggcaaggccaccctgtacgccgtgctggtgtctgccctggtgctgatggctatggtcaagcggaaggacagccgggga

SEQ ID NO: 4708 - DNA, 2697 bp, synthetic construct
  source 1..2697: mol_type = other DNA
atggccttaccagtgaccgccttgctcctgccgctggccttgctgctccacgccgccaggccggaagtgcagctggttgaatctggcggaggactggttcagcctggcggatctctgagactgtcttgtgccgccagcggcttcagcttcagcgacttttggatgagctgggtccgacaggcccctggcaaaggacttgaatgggtcgccacaatcagccaggccggcagcgagaaggactacgtggactctgtgaagggcagattcaccatcagccgggacaacgccaagaagtccctgtacctccagatgaacagcctgagagccgaggacaccgccgtgtactattgtgcctctggcgtgtacagcttcgactacagaggccagggcaccctggtcacagtctcttctggtaccggcggaggcggatctggcggcggaggtagcggtggcggaggatctgaattcgacatcgtgatgacacagagcccttctagcctggccgtgtctgagggcgagacagtgaccatcaactgcaagagcagccagagcttcctgtctagcggcgacggcaagaattacgtggcctggtatcagtacaagcccggacagagccccaagctgctgatctactgggccagcacaagacagagcggcgtgcccgatagattcatcggctctggcagcggcaccgacttcaccctgacaatctctacagtgcaggccgaggacctggctatctactactgccagcagtattacgacacccctctgacctttggctccggcaccaagctggaaatcaaactcgaggacctgaagaacgtgttcccacctgaggtggccgtgttcgagcctagcgaggccgagatcagccacacccagaaagccaccctcgtgtgcctggctaccggcttctaccccgaccatgtggaactgtcttggtgggtcaacggcaaagaggtgcacagcggcgtgtgtaccgacccccagccactgaaagaacagcccgccctgaacgacagccggtactgcctgagcagcagactgagagtgtccgccaccttctggcagaacccccggaaccacttcagatgccaggtgcagttctacggcctgagcgagaacgacgagtggacccaggacagagccaagcccgtgacccagatcgtgtctgccgaagcctggggcagagccgattgcgacgtgaagctggtggaaaagagcttcgagacagacaccaacctgaacttccagaacctgagcgtgatcggcttcagaatcctgctgctgaaagtggccggctttaacctgctgatgaccctgcggctgtggtccagcagggccaagcgatctggatctggagcaacaaacttctcactactcaaacaagcaggtgacgtggaggagaatcccgggcctactagtatggactggatttggcgcatccttttccttgtcggcgctgctaccggcgcgcattccgggccccagctccagctgcaagagtctggacctggcctggtcaagcctagcgagacactgagcctgacctgtaccgtgtccggcgatagcatcagcagcggcgattactactggggctggatcagacagcctcctggcaaaggactggaatggatcggccacatctactacagcggcgtgacctactacaaccccagcctgaagtccagagtgaccatcagcgtggacaccagccggaaccagttctccctgaagctgtctagcgtgacagccgccgataccgccgtgtactactgcaccagagaggacagcagcaactggcggagtagaggccagggaacactggtcacagttagctctggatccggcggaggcggaagtggaggcggaggatctggcggcggaggctctttcgaagaagtgaagctgcaagagtctggccccagcctggtgcagagtagccaaacactgagcctgacctgtaccgtgtccggctttagcctgaccagctaccacatccactgggtccgacagacccctggcaaaggactggaatggatgggcgtgatgtggagcgacggcgacaccagctataacagcgccctgaagtcccggctgagcatcagcagagatacaagccagagccaggtgttcctgaagatgaacagcctccagaccgaggacaccgccacctactattgtgccagaggctactacagcagctacctgtacctttggttcgcctattggggccagggcaccctggttacagtcagctctacgcgtatccagaaccctgatcctgccgtgtaccagctgcgggatagcaagagcagcgacaagagcgtgtgtctgttcaccgacttcgacagccagaccaacgtgtcccagagcaaggactccgacgtgtacatcaccgataagtgcgtgctggacatgcggagcatggacttcaagagcaactccgccgtggcctggtccaacaagtccgatttcgcctgcgccaacgccttcaacaacagcattatccccgaggacacattcttcccaagccccgagagcagctgcggctttaccagcgagagctaccagcagggcgtgctgagcgccaccatcctgtacgagatcctgctgggcaaggccaccctgtacgccgtgctggtgtctgccctggtgctgatggctatggtcaagcggaaggacagccgggga

SEQ ID NO: 4709 - DNA, 2709 bp, synthetic construct
  source 1..2709: mol_type = other DNA
atggccttaccagtgaccgccttgctcctgccgctggccttgctgctccacgccgccaggccggaagtgcagctggttgaatctggcggaggactggttcagcctggcggatctctgagactgtcttgtgccgccagcggcttcagcttcagcgacttttggatgagctgggtccgacaggcccctggcaaaggacttgaatgggtcgccacaatcagccaggccggcagcgagaaggactacgtggactctgtgaagggcagattcaccatcagccgggacaacgccaagaagtccctgtacctccagatgaacagcctgagagccgaggacaccgccgtgtactattgtgcctctggcgtgtacagcttcgactacagaggccagggcaccctggtcacagtctcttctggtaccggcggaggcggatctggcggcggaggtagcggtggcggaggatctgaattcgacgtgctgatgacccagacacctgtgtctctgccagtgtctctcggaggccaggtgtccatctcctgtagaagcagccagagcctggtgcactccgacggcgatacctacctgcactggtatctccagaagcctggacagagccctcagctcctgatctaccgggtgtccaacagattcagcggcgtgcccgatagattttccggcagcggctctggcaccgacttcaccctgaagatcagcagagtggaacccgaggacctgggcctgtactactgtctccagaccacacacttcccaccttggacctttggcggaggcaccaagctggaaatgaaactcgaggacctgaagaacgtgttcccacctgaggtggccgtgttcgagcctagcgaggccgagatcagccacacccagaaagccaccctcgtgtgcctggctaccggcttctaccccgaccatgtggaactgtcttggtgggtcaacggcaaagaggtgcacagcggcgtgtgtaccgacccccagccactgaaagaacagcccgccctgaacgacagccggtactgcctgagcagcagactgagagtgtccgccaccttctggcagaacccccggaaccacttcagatgccaggtgcagttctacggcctgagcgagaacgacgagtggacccaggacagagccaagcccgtgacccagatcgtgtctgccgaagcctggggcagagccgattgcgacgtgaagctggtggaaaagagcttcgagacagacaccaacctgaacttccagaacctgagcgtgatcggcttcagaatcctgctgctgaaagtggccggctttaacctgctgatgaccctgcggctgtggtccagcagggccaagcgatctggatctggagcaacaaacttctcactactcaaacaagcaggtgacgtggaggagaatcccgggcctactagtatggactggatttggcgcatccttttccttgtcggcgctgctaccggcgcgcattccgggccccagctccagctgcaagagtctggacctggcctggtcaagcctagcgagacactgagcctgacctgtaccgtgtccggcgatagcatcagcagcggcgattactactggggctggatcagacagcctcctggcaaaggactggaatggatcggccacatctactacagcggcgtgacctactacaaccccagcctgaagtccagagtgaccatcagcgtggacaccagccggaaccagttctccctgaagctgtctagcgtgacagccgccgataccgccgtgtactactgcaccagagaggacagcagcaactggcggagtagaggccagggaacactggtcacagttagctctggatccggcggaggcggaagtggaggcggaggatctggcggcggaggctctttcgaacaggttcagctccagcagtctggacccgagcttagaaggccaggatctagcgtcagactgagctgcaaggccagcggctaccggatcaaggacttcctgatccactggattaagaacagacccgagcacggcctggaatggatcggatggattgaccctgaggacggcgagactaagtacgcccagaagttccagaccaaggccacactgaccgccgacacctctagcaacaccgcctacatgcaactgagcagcctgaccagcgaggacaccgccacctacttttgtgctagatggggcgacgtgtactacggcctgatgagaggccatgtgatggatgcctggggccagggaacaagcgtgacagtctcttctacgcgtatccagaaccctgatcctgccgtgtaccagctgcgggatagcaagagcagcgacaagagcgtgtgtctgttcaccgacttcgacagccagaccaacgtgtcccagagcaaggactccgacgtgtacatcaccgataagtgcgtgctggacatgcggagcatggacttcaagagcaactccgccgtggcctggtccaacaagtccgatttcgcctgcgccaacgccttcaacaacagcattatccccgaggacacattcttcccaagccccgagagcagctgcggctttaccagcgagagctaccagcagggcgtgctgagcgccaccatcctgtacgagatcctgctgggcaaggccaccctgtacgccgtgctggtgtctgccctggtgctgatggctatggtcaagcggaaggacagccgggga

SEQ ID NO: 4710 - DNA, 2694 bp, synthetic construct
  source 1..2694: mol_type = other DNA
atggccttaccagtgaccgccttgctcctgccgctggccttgctgctccacgccgccaggccggaagtgcagctggttgaatctggcggaggactggttcagcctggcggatctctgagactgtcttgtgccgccagcggcttcagcttcagcgacttttggatgagctgggtccgacaggcccctggcaaaggacttgaatgggtcgccacaatcagccaggccggcagcgagaaggactacgtggactctgtgaagggcagattcaccatcagccgggacaacgccaagaagtccctgtacctccagatgaacagcctgagagccgaggacaccgccgtgtactattgtgcctctggcgtgtacagcttcgactacagaggccagggcaccctggtcacagtctcttctggtaccggcggaggcggatctggcggcggaggtagcggtggcggaggatctgaattcgacatcgtgatgacacagagccccgccacactgtcactgtctccaggcgaaagagccacactgagctgtcggagcagcaagagcctccagaacgtgaacggcaacacctacctgtactggttccagcagaagcccggccagtctcctcagctcctgatctacagaatgagcaacctgaacagcggcgtgcccgacagattttctggcagcggaagcggcaccgagttcaccctgaccataagcagcctggaacctgaggacttcgccgtgtactactgtatgcagcacctggaataccccatcaccttcggagccggcaccaagctggaaatcaaactcgaggacctgaagaacgtgttcccacctgaggtggccgtgttcgagcctagcgaggccgagatcagccacacccagaaagccaccctcgtgtgcctggctaccggcttctaccccgaccatgtggaactgtcttggtgggtcaacggcaaagaggtgcacagcggcgtgtgtaccgacccccagccactgaaagaacagcccgccctgaacgacagccggtactgcctgagcagcagactgagagtgtccgccaccttctggcagaacccccggaaccacttcagatgccaggtgcagttctacggcctgagcgagaacgacgagtggacccaggacagagccaagcccgtgacccagatcgtgtctgccgaagcctggggcagagccgattgcgacgtgaagctggtggaaaagagcttcgagacagacaccaacctgaacttccagaacctgagcgtgatcggcttcagaatcctgctgctgaaagtggccggctttaacctgctgatgaccctgcggctgtggtccagcagggccaagcgatctggatctggagcaacaaacttctcactactcaaacaagcaggtgacgtggaggagaatcccgggcctactagtatggactggatttggcgcatccttttccttgtcggcgctgctaccggcgcgcattccgggccccagctccagctgcaagagtctggacctggcctggtcaagcctagcgagacactgagcctgacctgtaccgtgtccggcgatagcatcagcagcggcgattactactggggctggatcagacagcctcctggcaaaggactggaatggatcggccacatctactacagcggcgtgacctactacaaccccagcctgaagtccagagtgaccatcagcgtggacaccagccggaaccagttctccctgaagctgtctagcgtgacagccgccgataccgccgtgtactactgcaccagagaggacagcagcaactggcggagtagaggccagggaacactggtcacagttagctctggatccggcggaggcggaagtggaggcggaggatctggcggcggaggctctttcgaagaagtgcaactggttgaatctggcggcggactggttaagcctggcggatctctgaagctgagctgtgccgccagcggctacacctttaccagctacgtgatgcactgggtccgacaggcccctggcaaaggacttgagtggatcggctacatcaacccctacaacgatggcaccaagtacaacgagaagttccagggcagagtgaccatcagctccgacaagagcatcagcaccgcctacatggaactgagcagcctgagaagcgaggataccgccatgtactattgcgccagaggcacctactactacggcaccagagtgttcgactactggggccagggaaccctggtcacagtctcttctacgcgtatccagaaccctgatcctgccgtgtaccagctgcgggatagcaagagcagcgacaagagcgtgtgtctgttcaccgacttcgacagccagaccaacgtgtcccagagcaaggactccgacgtgtacatcaccgataagtgcgtgctggacatgcggagcatggacttcaagagcaactccgccgtggcctggtccaacaagtccgatttcgcctgcgccaacgccttcaacaacagcattatccccgaggacacattcttcccaagccccgagagcagctgcggctttaccagcgagagctaccagcagggcgtgctgagcgccaccatcctgtacgagatcctgctgggcaaggccaccctgtacgccgtgctggtgtctgccctggtgctgatggctatggtcaagcggaaggacagccgggga

SEQ ID NO: 4711 - DNA, 2682 bp, synthetic construct
  source 1..2682: mol_type = other DNA
atggccttaccagtgaccgccttgctcctgccgctggccttgctgctccacgccgccaggccggaagtgcagctggttgaatctggcggaggactggttcagcctggcggatctctgagactgtcttgtgccgccagcggcttcagcttcagcgacttttggatgagctgggtccgacaggcccctggcaaaggacttgaatgggtcgccacaatcagccaggccggcagcgagaaggactacgtggactctgtgaagggcagattcaccatcagccgggacaacgccaagaagtccctgtacctccagatgaacagcctgagagccgaggacaccgccgtgtactattgtgcctctggcgtgtacagcttcgactacagaggccagggcaccctggtcacagtctcttctggtaccggcggaggcggatctggcggcggaggtagcggtggcggaggatctgaattcgacatccagatgacacagagccctagcagcctgtctgccagcgtgggagacagagtgaccatcacatgcaaggccagcgaccacatcaacaactggctggcctggtatcagcagaagcctggacaggcccctaagctgctgatctacggcgctaccacactggaaacaggcgtgcccagcagattttctggcagcggctctggcaccgactacaccctgacaatatccagcctccagcctgaggacttcgccacctactactgtcagcagagctggaacaccccttggacattcggccagggcaccaagctggaaatcaagagactcgaggacctgaagaacgtgttcccacctgaggtggccgtgttcgagcctagcgaggccgagatcagccacacccagaaagccaccctcgtgtgcctggctaccggcttctaccccgaccatgtggaactgtcttggtgggtcaacggcaaagaggtgcacagcggcgtgtgtaccgacccccagccactgaaagaacagcccgccctgaacgacagccggtactgcctgagcagcagactgagagtgtccgccaccttctggcagaacccccggaaccacttcagatgccaggtgcagttctacggcctgagcgagaacgacgagtggacccaggacagagccaagcccgtgacccagatcgtgtctgccgaagcctggggcagagccgattgcgacgtgaagctggtggaaaagagcttcgagacagacaccaacctgaacttccagaacctgagcgtgatcggcttcagaatcctgctgctgaaagtggccggctttaacctgctgatgaccctgcggctgtggtccagcagggccaagcgatctggatctggagcaacaaacttctcactactcaaacaagcaggtgacgtggaggagaatcccgggcctactagtatggactggatttggcgcatccttttccttgtcggcgctgctaccggcgcgcattccgggccccagctccagctgcaagagtctggacctggcctggtcaagcctagcgagacactgagcctgacctgtaccgtgtccggcgatagcatcagcagcggcgattactactggggctggatcagacagcctcctggcaaaggactggaatggatcggccacatctactacagcggcgtgacctactacaaccccagcctgaagtccagagtgaccatcagcgtggacaccagccggaaccagttctccctgaagctgtctagcgtgacagccgccgataccgccgtgtactactgcaccagagaggacagcagcaactggcggagtagaggccagggaacactggtcacagttagctctggatccggcggaggcggaagtggaggcggaggatctggcggcggaggctctttcgaacaagttcagcttcaacagcctggcgctgagctggtcaaacctggcgcttctgtgaagatgagctgcaaagccagcggctacgccttcagcagctactggatcaactggatgaagcagaaacccggccagggactcgaatggatcggccaaatctatcccggcgacggcgacaccaactacaacggcaagttcaagggcagagccacactgaccgccgatacctctagcagcacagcctacatgcagctgagcagcctgaccagcgaagatagcgccgtgtacttctgtgcccggtccatcacaacagtcgtgggctgcgctatggactattggggccagggaacaagcgtgaccgtgtctagtacgcgtatccagaaccctgatcctgccgtgtaccagctgcgggatagcaagagcagcgacaagagcgtgtgtctgttcaccgacttcgacagccagaccaacgtgtcccagagcaaggactccgacgtgtacatcaccgataagtgcgtgctggacatgcggagcatggacttcaagagcaactccgccgtggcctggtccaacaagtccgatttcgcctgcgccaacgccttcaacaacagcattatccccgaggacacattcttcccaagccccgagagcagctgcggctttaccagcgagagctaccagcagggcgtgctgagcgccaccatcctgtacgagatcctgctgggcaaggccaccctgtacgccgtgctggtgtctgccctggtgctgatggctatggtcaagcggaaggacagccgggga

SEQ ID NO: 4712 - DNA, 2688 bp, synthetic construct
  source 1..2688: mol_type = other DNA
atggccttaccagtgaccgccttgctcctgccgctggccttgctgctccacgccgccaggccggaagtgcagctggttgaatctggcggaggactggttcagcctggcggatctctgagactgtcttgtgccgccagcggcttcagcttcagcgacttttggatgagctgggtccgacaggcccctggcaaaggacttgaatgggtcgccacaatcagccaggccggcagcgagaaggactacgtggactctgtgaagggcagattcaccatcagccgggacaacgccaagaagtccctgtacctccagatgaacagcctgagagccgaggacaccgccgtgtactattgtgcctctggcgtgtacagcttcgactacagaggccagggcaccctggtcacagtctcttctggtaccggcggaggcggatctggcggcggaggtagcggtggcggaggatctgaattccagatcgtgctgtctcagtctcctgccatcctgagcgcttccccaggcgagaaagtgaccatgacctgtagagccagcagcagcgtgtcctacatgcactggtatcagcagaagcccggcagcagccctaagccttggatctacgccaccagcaatctggcctctggcgtgccagccagattttctggctctggcagcggcaccagctacagcttcacaatcagcagagtggaagccgaggacgccgccacctactattgtcagcagtggaccttcaatcctcctaccttcggcggaggcacccggctggaaatcaaaagaacagtggctgctctcgaggacctgaagaacgtgttcccacctgaggtggccgtgttcgagcctagcgaggccgagatcagccacacccagaaagccaccctcgtgtgcctggctaccggcttctaccccgaccatgtggaactgtcttggtgggtcaacggcaaagaggtgcacagcggcgtgtgtaccgacccccagccactgaaagaacagcccgccctgaacgacagccggtactgcctgagcagcagactgagagtgtccgccaccttctggcagaacccccggaaccacttcagatgccaggtgcagttctacggcctgagcgagaacgacgagtggacccaggacagagccaagcccgtgacccagatcgtgtctgccgaagcctggggcagagccgattgcgacgtgaagctggtggaaaagagcttcgagacagacaccaacctgaacttccagaacctgagcgtgatcggcttcagaatcctgctgctgaaagtggccggctttaacctgctgatgaccctgcggctgtggtccagcagggccaagcgatctggatctggagcaacaaacttctcactactcaaacaagcaggtgacgtggaggagaatcccgggcctactagtatggactggatttggcgcatccttttccttgtcggcgctgctaccggcgcgcattccgggccccagctccagctgcaagagtctggacctggcctggtcaagcctagcgagacactgagcctgacctgtaccgtgtccggcgatagcatcagcagcggcgattactactggggctggatcagacagcctcctggcaaaggactggaatggatcggccacatctactacagcggcgtgacctactacaaccccagcctgaagtccagagtgaccatcagcgtggacaccagccggaaccagttctccctgaagctgtctagcgtgacagccgccgataccgccgtgtactactgcaccagagaggacagcagcaactggcggagtagaggccagggaacactggtcacagttagctctggatccggcggaggcggaagtggaggcggaggatctggcggcggaggctctttcgaacaggcttatctgcaacagagcggagccgaactcgtcagacctggcgcttctgtgaagatgagctgcaaggccagcggctacaccttcaccagctataatatgcactgggtcaagcagacccctcggcagggactcgaatggatcggcggaatctatcccggcaacggcgacacctcctacaaccagaagttcaagggcaaagccacactgaccgtgggcaagagcagcagcaccgcctatatgcagctcagcagcctgaccagcgaggacagcgccgtgtacttctgcgccagatacgactacaactacgctatggactactggggccagggcaccagcgtgacagttagctctgccagcacgcgtatccagaaccctgatcctgccgtgtaccagctgcgggatagcaagagcagcgacaagagcgtgtgtctgttcaccgacttcgacagccagaccaacgtgtcccagagcaaggactccgacgtgtacatcaccgataagtgcgtgctggacatgcggagcatggacttcaagagcaactccgccgtggcctggtccaacaagtccgatttcgcctgcgccaacgccttcaacaacagcattatccccgaggacacattcttcccaagccccgagagcagctgcggctttaccagcgagagctaccagcagggcgtgctgagcgccaccatcctgtacgagatcctgctgggcaaggccaccctgtacgccgtgctggtgtctgccctggtgctgatggctatggtcaagcggaaggacagccgggga

SEQ ID NO: 4713 - DNA, 2682 bp, synthetic construct
  source 1..2682: mol_type = other DNA
atggccttaccagtgaccgccttgctcctgccgctggccttgctgctccacgccgccaggccggaagtgcagctggttgaatctggcggaggactggttcagcctggcggatctctgagactgtcttgtgccgccagcggcttcagcttcagcgacttttggatgagctgggtccgacaggcccctggcaaaggacttgaatgggtcgccacaatcagccaggccggcagcgagaaggactacgtggactctgtgaagggcagattcaccatcagccgggacaacgccaagaagtccctgtacctccagatgaacagcctgagagccgaggacaccgccgtgtactattgtgcctctggcgtgtacagcttcgactacagaggccagggcaccctggtcacagtctcttctggtaccggcggaggcggatctggcggcggaggtagcggtggcggaggatctgaattcgagatcgtgctgacacagagccctgccaccctgtctctgagccctggcgaaagagccaccctgagctgtagagccagccagagcgtgtccagctacctggcctggtatcagcagaagcccggccaggctccccggctgctgatctacgatgccagcaatagagccaccggcatccccgccagattttccggctctggcagcggcaccgacttcaccctgaccatcagctccctggaacccgaggacttcgccgtgtactactgccagcagcggagcaactggcccatcacattcggccagggcacccggctggaaatcaaactcgaggacctgaagaacgtgttcccacctgaggtggccgtgttcgagcctagcgaggccgagatcagccacacccagaaagccaccctcgtgtgcctggctaccggcttctaccccgaccatgtggaactgtcttggtgggtcaacggcaaagaggtgcacagcggcgtgtgtaccgacccccagccactgaaagaacagcccgccctgaacgacagccggtactgcctgagcagcagactgagagtgtccgccaccttctggcagaacccccggaaccacttcagatgccaggtgcagttctacggcctgagcgagaacgacgagtggacccaggacagagccaagcccgtgacccagatcgtgtctgccgaagcctggggcagagccgattgcgacgtgaagctggtggaaaagagcttcgagacagacaccaacctgaacttccagaacctgagcgtgatcggcttcagaatcctgctgctgaaagtggccggctttaacctgctgatgaccctgcggctgtggtccagcagggccaagcgatctggatctggagcaacaaacttctcactactcaaacaagcaggtgacgtggaggagaatcccgggcctactagtatggactggatttggcgcatccttttccttgtcggcgctgctaccggcgcgcattccgggccccagctccagctgcaagagtctggacctggcctggtcaagcctagcgagacactgagcctgacctgtaccgtgtccggcgatagcatcagcagcggcgattactactggggctggatcagacagcctcctggcaaaggactggaatggatcggccacatctactacagcggcgtgacctactacaaccccagcctgaagtccagagtgaccatcagcgtggacaccagccggaaccagttctccctgaagctgtctagcgtgacagccgccgataccgccgtgtactactgcaccagagaggacagcagcaactggcggagtagaggccagggaacactggtcacagttagctctggatccggcggaggcggaagtggaggcggaggatctggcggcggaggctctttcgaagaggtgcagcttgttgagtctggcggaggactggtgcagcccgatagaagcctgagactgtcttgtgccgccagcggcttcaccttccacgattatgccatgcactgggtccgacaggcccctggcaaaggacttgaatgggtgtccaccatctcttggaacagcggcacaatcggctacgccgactctgtgaagggcagattcaccatcagccgggacaacgccaagaacagcctgtacctccagatgaactccctgagagccgaggacacagccctgtactactgcgccaaggacatccagtacggcaactactactacggcatggacgtgtggggccagggcacaacagtgacagtctcttctacgcgtatccagaaccctgatcctgccgtgtaccagctgcgggatagcaagagcagcgacaagagcgtgtgtctgttcaccgacttcgacagccagaccaacgtgtcccagagcaaggactccgacgtgtacatcaccgataagtgcgtgctggacatgcggagcatggacttcaagagcaactccgccgtggcctggtccaacaagtccgatttcgcctgcgccaacgccttcaacaacagcattatccccgaggacacattcttcccaagccccgagagcagctgcggctttaccagcgagagctaccagcagggcgtgctgagcgccaccatcctgtacgagatcctgctgggcaaggccaccctgtacgccgtgctggtgtctgccctggtgctgatggctatggtcaagcggaaggacagccgggga

SEQ ID NO: 4714 - DNA, 2667 bp, synthetic construct
  source 1..2667: mol_type = other DNA
atggccttaccagtgaccgccttgctcctgccgctggccttgctgctccacgccgccaggccggaagtgcagctggttgaatctggcggaggactggttcagcctggcggatctctgagactgtcttgtgccgccagcggcttcagcttcagcgacttttggatgagctgggtccgacaggcccctggcaaaggacttgaatgggtcgccacaatcagccaggccggcagcgagaaggactacgtggactctgtgaagggcagattcaccatcagccgggacaacgccaagaagtccctgtacctccagatgaacagcctgagagccgaggacaccgccgtgtactattgtgcctctggcgtgtacagcttcgactacagaggccagggcaccctggtcacagtctcttctggtaccggcggaggcggatctggcggcggaggtagcggtggcggaggatctgaattcgacatccagatgacacagagccctagcagcctgtctgccagcgtgggagatagagtgaccatcaactgcaaggccagccaggacatcaacagctacctgagctggttccagcagaagcctggcaaggcccctaagacactgatctaccgggccaacagactggtggatggcgtgccaagcagattttctggcagcggcagcggccaggattacaccctgacaatatccagcctccagcctgaggacttcgccacctactactgcctccagtacgacgagttccctctgacctttggcggaggcaccaaggtggaaatcaaactcgaggacctgaagaacgtgttcccacctgaggtggccgtgttcgagcctagcgaggccgagatcagccacacccagaaagccaccctcgtgtgcctggctaccggcttctaccccgaccatgtggaactgtcttggtgggtcaacggcaaagaggtgcacagcggcgtgtgtaccgacccccagccactgaaagaacagcccgccctgaacgacagccggtactgcctgagcagcagactgagagtgtccgccaccttctggcagaacccccggaaccacttcagatgccaggtgcagttctacggcctgagcgagaacgacgagtggacccaggacagagccaagcccgtgacccagatcgtgtctgccgaagcctggggcagagccgattgcgacgtgaagctggtggaaaagagcttcgagacagacaccaacctgaacttccagaacctgagcgtgatcggcttcagaatcctgctgctgaaagtggccggctttaacctgctgatgaccctgcggctgtggtccagcagggccaagcgatctggatctggagcaacaaacttctcactactcaaacaagcaggtgacgtggaggagaatcccgggcctactagtatggactggatttggcgcatccttttccttgtcggcgctgctaccggcgcgcattccgggccccagctccagctgcaagagtctggacctggcctggtcaagcctagcgagacactgagcctgacctgtaccgtgtccggcgatagcatcagcagcggcgattactactggggctggatcagacagcctcctggcaaaggactggaatggatcggccacatctactacagcggcgtgacctactacaaccccagcctgaagtccagagtgaccatcagcgtggacaccagccggaaccagttctccctgaagctgtctagcgtgacagccgccgataccgccgtgtactactgcaccagagaggacagcagcaactggcggagtagaggccagggaacactggtcacagttagctctggatccggcggaggcggaagtggaggcggaggatctggcggcggaggctctttcgaacaggtgcaactggtgcagtctggggccgaagtgaagaaacctggggcctctgtgaaggtgtcctgcaaagccagcggctacacctttaccaactacgacatcaactgggtccgacaggctccaggccaaggactggaatggatcggctggatctatcctggcgacggcagcaccaagtacaacgagaagttcaaggccaaggccacactgaccgccgataccagcacaagcaccgcctacatggaactgcggagcctgagaagcgacgacaccgccgtgtactattgtgcctccggctacgaggacgctatggactattggggccagggcaccaccgtgacagtgtctagtacgcgtatccagaaccctgatcctgccgtgtaccagctgcgggatagcaagagcagcgacaagagcgtgtgtctgttcaccgacttcgacagccagaccaacgtgtcccagagcaaggactccgacgtgtacatcaccgataagtgcgtgctggacatgcggagcatggacttcaagagcaactccgccgtggcctggtccaacaagtccgatttcgcctgcgccaacgccttcaacaacagcattatccccgaggacacattcttcccaagccccgagagcagctgcggctttaccagcgagagctaccagcagggcgtgctgagcgccaccatcctgtacgagatcctgctgggcaaggccaccctgtacgccgtgctggtgtctgccctggtgctgatggctatggtcaagcggaaggacagccgggga

SEQ ID NO: 4715 - DNA, 2673 bp, synthetic construct
  source 1..2673: mol_type = other DNA
atggccttaccagtgaccgccttgctcctgccgctggccttgctgctccacgccgccaggccggaagtgcagctggttgaatctggcggaggactggttcagcctggcggatctctgagactgtcttgtgccgccagcggcttcagcttcagcgacttttggatgagctgggtccgacaggcccctggcaaaggacttgaatgggtcgccacaatcagccaggccggcagcgagaaggactacgtggactctgtgaagggcagattcaccatcagccgggacaacgccaagaagtccctgtacctccagatgaacagcctgagagccgaggacaccgccgtgtactattgtgcctctggcgtgtacagcttcgactacagaggccagggcaccctggtcacagtctcttctggtaccggcggaggcggatctggcggcggaggtagcggtggcggaggatctgaattcgacatcgtgatgacccagacacctctgagcctgagcgtgacacctggacagcctgccagcattagctgcaagagcagccagtctctgctggacggcgacggcaagacctacctgaattggctgctccagaagcctggacagagccctcagcggctgatctacctggtgtccaagctggatagcggcgtgcccgatagattttctggcagcggctctggcaccgacttcaccctgaagatcagcagagtggaagccgaggacgtgggcgtgtactactgttggcagggcacacacttccccagaacattcggccagggcacaaagctggaaatcaaactcgaggacctgaagaacgtgttcccacctgaggtggccgtgttcgagcctagcgaggccgagatcagccacacccagaaagccaccctcgtgtgcctggctaccggcttctaccccgaccatgtggaactgtcttggtgggtcaacggcaaagaggtgcacagcggcgtgtgtaccgacccccagccactgaaagaacagcccgccctgaacgacagccggtactgcctgagcagcagactgagagtgtccgccaccttctggcagaacccccggaaccacttcagatgccaggtgcagttctacggcctgagcgagaacgacgagtggacccaggacagagccaagcccgtgacccagatcgtgtctgccgaagcctggggcagagccgattgcgacgtgaagctggtggaaaagagcttcgagacagacaccaacctgaacttccagaacctgagcgtgatcggcttcagaatcctgctgctgaaagtggccggctttaacctgctgatgaccctgcggctgtggtccagcagggccaagcgatctggatctggagcaacaaacttctcactactcaaacaagcaggtgacgtggaggagaatcccgggcctactagtatggactggatttggcgcatccttttccttgtcggcgctgctaccggcgcgcattccgggccccagctccagctgcaagagtctggacctggcctggtcaagcctagcgagacactgagcctgacctgtaccgtgtccggcgatagcatcagcagcggcgattactactggggctggatcagacagcctcctggcaaaggactggaatggatcggccacatctactacagcggcgtgacctactacaaccccagcctgaagtccagagtgaccatcagcgtggacaccagccggaaccagttctccctgaagctgtctagcgtgacagccgccgataccgccgtgtactactgcaccagagaggacagcagcaactggcggagtagaggccagggaacactggtcacagttagctctggatccggcggaggcggaagtggaggcggaggatctggcggcggaggctctttcgaacaagtgcaactggttcagagcggagccgaagtgaagaaacctggggcctctgtgaaggtgtcctgcaaggccagcggctacaccttcaaggacacctacatccactgggtccgacaggcccctggacaaggacttgagtggatgggcagaatcgaccccgccaacggcaacaccaaatacgaccccaagttccagggcagagtgaccatgaccagagacaccagcatcagcaccgcctacatggaactgagccggctgagatccgatgacaccgccgtgtactattgcgctagaagaggcggagtggattggggccagggaacactggttaccgtgtctagtacgcgtatccagaaccctgatcctgccgtgtaccagctgcgggatagcaagagcagcgacaagagcgtgtgtctgttcaccgacttcgacagccagaccaacgtgtcccagagcaaggactccgacgtgtacatcaccgataagtgcgtgctggacatgcggagcatggacttcaagagcaactccgccgtggcctggtccaacaagtccgatttcgcctgcgccaacgccttcaacaacagcattatccccgaggacacattcttcccaagccccgagagcagctgcggctttaccagcgagagctaccagcagggcgtgctgagcgccaccatcctgtacgagatcctgctgggcaaggccaccctgtacgccgtgctggtgtctgccctggtgctgatggctatggtcaagcggaaggacagccgggga

SEQ ID NO: 4716 - DNA, 2676 bp, synthetic construct
  source 1..2676: mol_type = other DNA
atggccttaccagtgaccgccttgctcctgccgctggccttgctgctccacgccgccaggccggaagtgcagctggttgaatctggcggaggactggttcagcctggcggatctctgagactgtcttgtgccgccagcggcttcagcttcagcgacttttggatgagctgggtccgacaggcccctggcaaaggacttgaatgggtcgccacaatcagccaggccggcagcgagaaggactacgtggactctgtgaagggcagattcaccatcagccgggacaacgccaagaagtccctgtacctccagatgaacagcctgagagccgaggacaccgccgtgtactattgtgcctctggcgtgtacagcttcgactacagaggccagggcaccctggtcacagtctcttctggtaccggcggaggcggatctggcggcggaggtagcggtggcggaggatctgaattcgacatccagatgacacagagccctagcagcctgtctgccagcgtgggagacagagtgaccatcacatgcaaggccagccaggatgtgtctacagccgtggcctggttccagcagaagcctggaaaagcccctaagctgctgatctacagccccagctacagatacaccggcgtgcccagcagattttctggcagcggctctggcaccgacttcaccctgacaatatccagcctccagcctgaggacttcacctactactgccagcagctctacagcaccccttacacattcggccagggcaccaaggtggaaatcaaactcgaggacctgaagaacgtgttcccacctgaggtggccgtgttcgagcctagcgaggccgagatcagccacacccagaaagccaccctcgtgtgcctggctaccggcttctaccccgaccatgtggaactgtcttggtgggtcaacggcaaagaggtgcacagcggcgtgtgtaccgacccccagccactgaaagaacagcccgccctgaacgacagccggtactgcctgagcagcagactgagagtgtccgccaccttctggcagaacccccggaaccacttcagatgccaggtgcagttctacggcctgagcgagaacgacgagtggacccaggacagagccaagcccgtgacccagatcgtgtctgccgaagcctggggcagagccgattgcgacgtgaagctggtggaaaagagcttcgagacagacaccaacctgaacttccagaacctgagcgtgatcggcttcagaatcctgctgctgaaagtggccggctttaacctgctgatgaccctgcggctgtggtccagcagggccaagcgatctggatctggagcaacaaacttctcactactcaaacaagcaggtgacgtggaggagaatcccgggcctactagtatggactggatttggcgcatccttttccttgtcggcgctgctaccggcgcgcattccgggccccagctccagctgcaagagtctggacctggcctggtcaagcctagcgagacactgagcctgacctgtaccgtgtccggcgatagcatcagcagcggcgattactactggggctggatcagacagcctcctggcaaaggactggaatggatcggccacatctactacagcggcgtgacctactacaaccccagcctgaagtccagagtgaccatcagcgtggacaccagccggaaccagttctccctgaagctgtctagcgtgacagccgccgataccgccgtgtactactgcaccagagaggacagcagcaactggcggagtagaggccagggaacactggtcacagttagctctggatccggcggaggcggaagtggaggcggaggatctggcggcggaggctctttcgaagaagtgcaactggttcagagcggagccgaagtgaagaaacctggggcctctgtgaaggtgtcctgcaaagccagcggctacacctttaccgactactacctggacgtggtcgtgcggcaagctcctggacaaggactggaatggatcggcagagtgaacccctacaacggcggcaccatctacaaccagaaattcaagggaagagtgaccctgaccagagacaccagcacctccacagcctacctggaactgagcagcctgagaagcgaagataccgccgtgtactactgcgccagggaccactacagatatgaccctctgctggactactggggccagggaaccctggttacagtgtctagtacgcgtatccagaaccctgatcctgccgtgtaccagctgcgggatagcaagagcagcgacaagagcgtgtgtctgttcaccgacttcgacagccagaccaacgtgtcccagagcaaggactccgacgtgtacatcaccgataagtgcgtgctggacatgcggagcatggacttcaagagcaactccgccgtggcctggtccaacaagtccgatttcgcctgcgccaacgccttcaacaacagcattatccccgaggacacattcttcccaagccccgagagcagctgcggctttaccagcgagagctaccagcagggcgtgctgagcgccaccatcctgtacgagatcctgctgggcaaggccaccctgtacgccgtgctggtgtctgccctggtgctgatggctatggtcaagcggaaggacagccgggga

SEQ ID NO: 4717 - DNA, 2694 bp, synthetic construct
  source 1..2694: mol_type = other DNA
atggccttaccagtgaccgccttgctcctgccgctggccttgctgctccacgccgccaggccggaagtgcagctggttgaatctggcggaggactggttcagcctggcggatctctgagactgtcttgtgccgccagcggcttcagcttcagcgacttttggatgagctgggtccgacaggcccctggcaaaggacttgaatgggtcgccacaatcagccaggccggcagcgagaaggactacgtggactctgtgaagggcagattcaccatcagccgggacaacgccaagaagtccctgtacctccagatgaacagcctgagagccgaggacaccgccgtgtactattgtgcctctggcgtgtacagcttcgactacagaggccagggcaccctggtcacagtctcttctggtaccggcggaggcggatctggcggcggaggtagcggtggcggaggatctgaattcgacatccagatgacacagagccctagcagcctgtctgccagcgtgggagacagagtgaccatcacctgtagagccagccagagcgtgtccaccagcagctacaactacatgcactggtatcagcagaagcccggcaagcctcctaagctgctgattaagtacgccagcaacctggaaagcggcgtgcccagcagattttctggcagcggctctggcaccgacttcaccctgacaatatccagcctccagcctgaggacttcgccacctactactgtcagcactcctgggagatccctctgacattcggccagggcaccaaggtggaaatcaaactcgaggacctgaagaacgtgttcccacctgaggtggccgtgttcgagcctagcgaggccgagatcagccacacccagaaagccaccctcgtgtgcctggctaccggcttctaccccgaccatgtggaactgtcttggtgggtcaacggcaaagaggtgcacagcggcgtgtgtaccgacccccagccactgaaagaacagcccgccctgaacgacagccggtactgcctgagcagcagactgagagtgtccgccaccttctggcagaacccccggaaccacttcagatgccaggtgcagttctacggcctgagcgagaacgacgagtggacccaggacagagccaagcccgtgacccagatcgtgtctgccgaagcctggggcagagccgattgcgacgtgaagctggtggaaaagagcttcgagacagacaccaacctgaacttccagaacctgagcgtgatcggcttcagaatcctgctgctgaaagtggccggctttaacctgctgatgaccctgcggctgtggtccagcagggccaagcgatctggatctggagcaacaaacttctcactactcaaacaagcaggtgacgtggaggagaatcccgggcctactagtatggactggatttggcgcatccttttccttgtcggcgctgctaccggcgcgcattccgggccccagctccagctgcaagagtctggacctggcctggtcaagcctagcgagacactgagcctgacctgtaccgtgtccggcgatagcatcagcagcggcgattactactggggctggatcagacagcctcctggcaaaggactggaatggatcggccacatctactacagcggcgtgacctactacaaccccagcctgaagtccagagtgaccatcagcgtggacaccagccggaaccagttctccctgaagctgtctagcgtgacagccgccgataccgccgtgtactactgcaccagagaggacagcagcaactggcggagtagaggccagggaacactggtcacagttagctctggatccggcggaggcggaagtggaggcggaggatctggcggcggaggctctttcgaagaagtgcaactggttcagagcggagccgaagtgaagaaacctggggcctctgtgaaggtgtcctgcaaggccagcggctacagcttcaccgactattatatgcactgggtccgacaggctccaggccagggacttgagtggatcggcagaatcaacccctacaacggcgctgccttctacagccagaacttcaaggatagagtgaccctgaccgtggacaccagcaccagcacagcctacctggaactgagcagcctgagaagcgaggacaccgccgtgtactactgcgccattgagagaggcgctgacctggaaggctacgctatggattattggggccagggaaccctggtcaccgtgtcatctacgcgtatccagaaccctgatcctgccgtgtaccagctgcgggatagcaagagcagcgacaagagcgtgtgtctgttcaccgacttcgacagccagaccaacgtgtcccagagcaaggactccgacgtgtacatcaccgataagtgcgtgctggacatgcggagcatggacttcaagagcaactccgccgtggcctggtccaacaagtccgatttcgcctgcgccaacgccttcaacaacagcattatccccgaggacacattcttcccaagccccgagagcagctgcggctttaccagcgagagctaccagcagggcgtgctgagcgccaccatcctgtacgagatcctgctgggcaaggccaccctgtacgccgtgctggtgtctgccctggtgctgatggctatggtcaagcggaaggacagccgggga

SEQ ID NO: 4718 - DNA, 2688 bp, synthetic construct
  source 1..2688: mol_type = other DNA
atggccttaccagtgaccgccttgctcctgccgctggccttgctgctccacgccgccaggccggaagtgcagctggttgaatctggcggaggactggttcagcctggcggatctctgagactgtcttgtgccgccagcggcttcagcttcagcgacttttggatgagctgggtccgacaggcccctggcaaaggacttgaatgggtcgccacaatcagccaggccggcagcgagaaggactacgtggactctgtgaagggcagattcaccatcagccgggacaacgccaagaagtccctgtacctccagatgaacagcctgagagccgaggacaccgccgtgtactattgtgcctctggcgtgtacagcttcgactacagaggccagggcaccctggtcacagtctcttctggtaccggcggaggcggatctggcggcggaggtagcggtggcggaggatctgaattcgagatcgtgctgacacagtctccagccacactgagcgcttctccaggcgagagagtgaccctgacctgtagagccagcagcaacgtgatctccagctacgtgcactggtatcagcagaagcctggcagcagccccagactgtttctgtacagcaccagcaatctggcctccggcgtgccaagcagattttctggctctggcagcggcaccgacttcacctttaccatctctagcctggaagccgaggacgccgccacctactactgtcagcagtacagcggctaccctctgaccttcggccagggcacaagactggaaatcaaactcgaggacctgaagaacgtgttcccacctgaggtggccgtgttcgagcctagcgaggccgagatcagccacacccagaaagccaccctcgtgtgcctggctaccggcttctaccccgaccatgtggaactgtcttggtgggtcaacggcaaagaggtgcacagcggcgtgtgtaccgacccccagccactgaaagaacagcccgccctgaacgacagccggtactgcctgagcagcagactgagagtgtccgccaccttctggcagaacccccggaaccacttcagatgccaggtgcagttctacggcctgagcgagaacgacgagtggacccaggacagagccaagcccgtgacccagatcgtgtctgccgaagcctggggcagagccgattgcgacgtgaagctggtggaaaagagcttcgagacagacaccaacctgaacttccagaacctgagcgtgatcggcttcagaatcctgctgctgaaagtggccggctttaacctgctgatgaccctgcggctgtggtccagcagggccaagcgatctggatctggagcaacaaacttctcactactcaaacaagcaggtgacgtggaggagaatcccgggcctactagtatggactggatttggcgcatccttttccttgtcggcgctgctaccggcgcgcattccgggccccagctccagctgcaagagtctggacctggcctggtcaagcctagcgagacactgagcctgacctgtaccgtgtccggcgatagcatcagcagcggcgattactactggggctggatcagacagcctcctggcaaaggactggaatggatcggccacatctactacagcggcgtgacctactacaaccccagcctgaagtccagagtgaccatcagcgtggacaccagccggaaccagttctccctgaagctgtctagcgtgacagccgccgataccgccgtgtactactgcaccagagaggacagcagcaactggcggagtagaggccagggaacactggtcacagttagctctggatccggcggaggcggaagtggaggcggaggatctggcggcggaggctctttcgaacaagttcagctgcaagagtctggccctggcctggtcaagcctagcgaaacactgagcctgacctgcgccgtgtctggctactctatcaccagcgcctactattggaactggatcagacagcctcctggcaaaggactggaatggatcggctacatcagctacgacggcagaaacaactacaaccccagcctgaagaaccggatcaccatcaatcccgacaccagcaagaaccagttcagcctccagctgaacagcgtgacccctgaggataccgccgtgtactactgtgccagagaaggcgactacgacgtgggcaactactacgctatggactactggggccagggaaccctggtcacagtctcttctacgcgtatccagaaccctgatcctgccgtgtaccagctgcgggatagcaagagcagcgacaagagcgtgtgtctgttcaccgacttcgacagccagaccaacgtgtcccagagcaaggactccgacgtgtacatcaccgataagtgcgtgctggacatgcggagcatggacttcaagagcaactccgccgtggcctggtccaacaagtccgatttcgcctgcgccaacgccttcaacaacagcattatccccgaggacacattcttcccaagccccgagagcagctgcggctttaccagcgagagctaccagcagggcgtgctgagcgccaccatcctgtacgagatcctgctgggcaaggccaccctgtacgccgtgctggtgtctgccctggtgctgatggctatggtcaagcggaaggacagccgggga

SEQ ID NO: 4719 - DNA, 2688 bp, synthetic construct
  source 1..2688: mol_type = other DNA
atggccttaccagtgaccgccttgctcctgccgctggccttgctgctccacgccgccaggccggaagtgcagctggttgaatctggcggaggactggttcagcctggcggatctctgagactgtcttgtgccgccagcggcttcagcttcagcgacttttggatgagctgggtccgacaggcccctggcaaaggacttgaatgggtcgccacaatcagccaggccggcagcgagaaggactacgtggactctgtgaagggcagattcaccatcagccgggacaacgccaagaagtccctgtacctccagatgaacagcctgagagccgaggacaccgccgtgtactattgtgcctctggcgtgtacagcttcgactacagaggccagggcaccctggtcacagtctcttctggtaccggcggaggcggatctggcggcggaggtagcggtggcggaggatctgaattcgagatcgtgctgacacagtctcccgccacactgtcactgtctccaggcgaaagagccacactgagctgtagagccagcagcaacgtgatctccagctacgtgcactggtatcagcagaagcctggacaggcccctcggctgctgatctacagcacaagcaatctggcctctggcatccccgccagattttctggctctggaagcggcaccgacttcaccctgaccataagcagcctggaacctgaggacttcgccgtgtactactgccagcagtatagcggctaccctctgaccttcggccagggcacaagactggaaatcaaactcgaggacctgaagaacgtgttcccacctgaggtggccgtgttcgagcctagcgaggccgagatcagccacacccagaaagccaccctcgtgtgcctggctaccggcttctaccccgaccatgtggaactgtcttggtgggtcaacggcaaagaggtgcacagcggcgtgtgtaccgacccccagccactgaaagaacagcccgccctgaacgacagccggtactgcctgagcagcagactgagagtgtccgccaccttctggcagaacccccggaaccacttcagatgccaggtgcagttctacggcctgagcgagaacgacgagtggacccaggacagagccaagcccgtgacccagatcgtgtctgccgaagcctggggcagagccgattgcgacgtgaagctggtggaaaagagcttcgagacagacaccaacctgaacttccagaacctgagcgtgatcggcttcagaatcctgctgctgaaagtggccggctttaacctgctgatgaccctgcggctgtggtccagcagggccaagcgatctggatctggagcaacaaacttctcactactcaaacaagcaggtgacgtggaggagaatcccgggcctactagtatggactggatttggcgcatccttttccttgtcggcgctgctaccggcgcgcattccgggccccagctccagctgcaagagtctggacctggcctggtcaagcctagcgagacactgagcctgacctgtaccgtgtccggcgatagcatcagcagcggcgattactactggggctggatcagacagcctcctggcaaaggactggaatggatcggccacatctactacagcggcgtgacctactacaaccccagcctgaagtccagagtgaccatcagcgtggacaccagccggaaccagttctccctgaagctgtctagcgtgacagccgccgataccgccgtgtactactgcaccagagaggacagcagcaactggcggagtagaggccagggaacactggtcacagttagctctggatccggcggaggcggaagtggaggcggaggatctggcggcggaggctctttcgaagaagtgcaactggtggaaagtggcggcggactggtgcaacctggaagaagcctgagactgtcctgtgccgccagcggctactctatcacaagcgcctactactggaactgggtccgacaggctcctggcaaaggactggaatgggtgtcctacatcagctacgacggcagaaacaactacaaccccagcctgaagaaccgcttcaccatcagccgggacaacgccaagaagtccctgtacctccagatgaacagcctgagagccgaggacacagccctgtactattgcgccaaagagggcgactacgacgtcggcaactactacgctatggactactggggccagggaaccaccgtgactgtctcttctacgcgtatccagaaccctgatcctgccgtgtaccagctgcgggatagcaagagcagcgacaagagcgtgtgtctgttcaccgacttcgacagccagaccaacgtgtcccagagcaaggactccgacgtgtacatcaccgataagtgcgtgctggacatgcggagcatggacttcaagagcaactccgccgtggcctggtccaacaagtccgatttcgcctgcgccaacgccttcaacaacagcattatccccgaggacacattcttcccaagccccgagagcagctgcggctttaccagcgagagctaccagcagggcgtgctgagcgccaccatcctgtacgagatcctgctgggcaaggccaccctgtacgccgtgctggtgtctgccctggtgctgatggctatggtcaagcggaaggacagccgggga

SEQ ID NO: 4720 - DNA, 2685 bp, synthetic construct
  source 1..2685: mol_type = other DNA
atggccttaccagtgaccgccttgctcctgccgctggccttgctgctccacgccgccaggccggaagtgcagctggttgaatctggcggaggactggttcagcctggcggatctctgagactgtcttgtgccgccagcggcttcagcttcagcgacttttggatgagctgggtccgacaggcccctggcaaaggacttgaatgggtcgccacaatcagccaggccggcagcgagaaggactacgtggactctgtgaagggcagattcaccatcagccgggacaacgccaagaagtccctgtacctccagatgaacagcctgagagccgaggacaccgccgtgtactattgtgcctctggcgtgtacagcttcgactacagaggccagggcaccctggtcacagtctcttctggtaccggcggaggcggatctggcggcggaggtagcggtggcggaggatctgaattcgacgtggtcatgacacagaccccactgagcctgcctgtgtctctgggagatcaggccagcatctcctgtagaagcagccagagcctggtgcacagcaacggcaacacctacctgcggtggtatctccagaagcctggacagagccccaaggtgctgatctacaaggtgtccaacagagtgtccggcgtgcccgatagattttctggcagcggctctggcaccgacttcaccctgaagatcaatagagtggaagccgaggacctgggcgtgtacttctgtagccagagcacccatgtgccttggacctttggcggaggcaccaagctggaaatcaagctcgaggacctgaagaacgtgttcccacctgaggtggccgtgttcgagcctagcgaggccgagatcagccacacccagaaagccaccctcgtgtgcctggctaccggcttctaccccgaccatgtggaactgtcttggtgggtcaacggcaaagaggtgcacagcggcgtgtgtaccgacccccagccactgaaagaacagcccgccctgaacgacagccggtactgcctgagcagcagactgagagtgtccgccaccttctggcagaacccccggaaccacttcagatgccaggtgcagttctacggcctgagcgagaacgacgagtggacccaggacagagccaagcccgtgacccagatcgtgtctgccgaagcctggggcagagccgattgcgacgtgaagctggtggaaaagagcttcgagacagacaccaacctgaacttccagaacctgagcgtgatcggcttcagaatcctgctgctgaaagtggccggctttaacctgctgatgaccctgcggctgtggtccagcagggccaagcgatctggatctggagcaacaaacttctcactactcaaacaagcaggtgacgtggaggagaatcccgggcctactagtatggactggatttggcgcatccttttccttgtcggcgctgctaccggcgcgcattccgggccccagctccagctgcaagagtctggacctggcctggtcaagcctagcgagacactgagcctgacctgtaccgtgtccggcgatagcatcagcagcggcgattactactggggctggatcagacagcctcctggcaaaggactggaatggatcggccacatctactacagcggcgtgacctactacaaccccagcctgaagtccagagtgaccatcagcgtggacaccagccggaaccagttctccctgaagctgtctagcgtgacagccgccgataccgccgtgtactactgcaccagagaggacagcagcaactggcggagtagaggccagggaacactggtcacagttagctctggatccggcggaggcggaagtggaggcggaggatctggcggcggaggctctttcgaaggcgtgaagctggacgagacaggcggaggacttgttcaacctggcggagccatgaagctgagctgtgtgaccagcggctttaccttcggccactactggatgaactgggtccgacagtcccctgagaaaggactggaatgggtcgcccagttcagaaacaagccctacaactacgaaacctactacagcgacagcgtgaagggcagattcaccatcagccgggacgacagcaagtccagcgtgtacctccagatgaacaacctgcgcgtggaagataccggcatctactactgtaccggggccagctacggcatggaatatctcggccagggcaccagcgtgaccgtgtctacaacgcgtatccagaaccctgatcctgccgtgtaccagctgcgggatagcaagagcagcgacaagagcgtgtgtctgttcaccgacttcgacagccagaccaacgtgtcccagagcaaggactccgacgtgtacatcaccgataagtgcgtgctggacatgcggagcatggacttcaagagcaactccgccgtggcctggtccaacaagtccgatttcgcctgcgccaacgccttcaacaacagcattatccccgaggacacattcttcccaagccccgagagcagctgcggctttaccagcgagagctaccagcagggcgtgctgagcgccaccatcctgtacgagatcctgctgggcaaggccaccctgtacgccgtgctggtgtctgccctggtgctgatggctatggtcaagcggaaggacagccgggga

SEQ ID NO: 4721 - DNA, 2703 bp, synthetic construct
  source 1..2703: mol_type = other DNA
atggccttaccagtgaccgccttgctcctgccgctggccttgctgctccacgccgccaggccggaagtgcagctggttgaatctggcggaggactggttcagcctggcggatctctgagactgtcttgtgccgccagcggcttcagcttcagcgacttttggatgagctgggtccgacaggcccctggcaaaggacttgaatgggtcgccacaatcagccaggccggcagcgagaaggactacgtggactctgtgaagggcagattcaccatcagccgggacaacgccaagaagtccctgtacctccagatgaacagcctgagagccgaggacaccgccgtgtactattgtgcctctggcgtgtacagcttcgactacagaggccagggcaccctggtcacagtctcttctggtaccggcggaggcggatctggcggcggaggtagcggtggcggaggatctgaattccaggtgcaactggtggaatctggcggcaatctggttcagcctggcggctctctgagactgtcttgtgccgccagcggcttcaccttcggcagcttttctatgagctgggtccgacaagctcctggcggaggacttgaatgggtggcaggactgtctgccagaagcagcctgacacactacgccgactctgtgaagggcagattcaccatcagccgggacaacgccaagaacagcgtgtacctccagatgaacagcctgagagtggaagataccgccgtgtactactgcgccagaagaagctacgacagcagcggctactggggccacttctacagctacatggatgtgtggggccagggcaccctggttacagtttctctcgaggacctgaagaacgtgttcccacctgaggtggccgtgttcgagcctagcgaggccgagatcagccacacccagaaagccaccctcgtgtgcctggctaccggcttctaccccgaccatgtggaactgtcttggtgggtcaacggcaaagaggtgcacagcggcgtgtgtaccgacccccagccactgaaagaacagcccgccctgaacgacagccggtactgcctgagcagcagactgagagtgtccgccaccttctggcagaacccccggaaccacttcagatgccaggtgcagttctacggcctgagcgagaacgacgagtggacccaggacagagccaagcccgtgacccagatcgtgtctgccgaagcctggggcagagccgattgcgacgtgaagctggtggaaaagagcttcgagacagacaccaacctgaacttccagaacctgagcgtgatcggcttcagaatcctgctgctgaaagtggccggctttaacctgctgatgaccctgcggctgtggtccagcagggccaagcgatctggatctggagcaacaaacttctcactactcaaacaagcaggtgacgtggaggagaatcccgggcctactagtatggactggatttggcgcatccttttccttgtcggcgctgctaccggcgcgcattccgggccccagctccagctgcaagagtctggacctggcctggtcaagcctagcgagacactgagcctgacctgtaccgtgtccggcgatagcatcagcagcggcgattactactggggctggatcagacagcctcctggcaaaggactggaatggatcggccacatctactacagcggcgtgacctactacaaccccagcctgaagtccagagtgaccatcagcgtggacaccagccggaaccagttctccctgaagctgtctagcgtgacagccgccgataccgccgtgtactactgcaccagagaggacagcagcaactggcggagtagaggccagggaacactggtcacagttagctctggatccggcggaggcggaagtggaggcggaggatctggcggcggaggctctttcgaatctgtgctgacccagcctagctccgtgtctgctgctcctggacagaaagtgaccatctcctgtagcggcagcaccagcaacatcggcaacaactacgtgtcctggtatcagcagcaccccggcaaggcccctaagctgatgatctacgacgtgtccaagaggcccagcggcgtgccagatagattttccggcagcaagagcggcaacagcgccagcctggatattagcggactccagtctgaggacgaggccgactactattgcgccgcctgggatgatagcctgagcgagtttctgtttggcaccggcaccaagctgacagtgcttggaacgcgtatccagaaccctgatcctgccgtgtaccagctgcgggatagcaagagcagcgacaagagcgtgtgtctgttcaccgacttcgacagccagaccaacgtgtcccagagcaaggactccgacgtgtacatcaccgataagtgcgtgctggacatgcggagcatggacttcaagagcaactccgccgtggcctggtccaacaagtccgatttcgcctgcgccaacgccttcaacaacagcattatccccgaggacacattcttcccaagccccgagagcagctgcggctttaccagcgagagctaccagcagggcgtgctgagcgccaccatcctgtacgagatcctgctgggcaaggccaccctgtacgccgtgctggtgtctgccctggtgctgatggctatggtcaagcggaaggacagccgggga

SEQ ID NO: 4722 - DNA, 2688 bp, synthetic construct
  source 1..2688: mol_type = other DNA
atggccttaccagtgaccgccttgctcctgccgctggccttgctgctccacgccgccaggccggaagtgcagctggttgaatctggcggaggactggttcagcctggcggatctctgagactgtcttgtgccgccagcggcttcagcttcagcgacttttggatgagctgggtccgacaggcccctggcaaaggacttgaatgggtcgccacaatcagccaggccggcagcgagaaggactacgtggactctgtgaagggcagattcaccatcagccgggacaacgccaagaagtccctgtacctccagatgaacagcctgagagccgaggacaccgccgtgtactattgtgcctctggcgtgtacagcttcgactacagaggccagggcaccctggtcacagtctcttctggtaccggcggaggcggatctggcggcggaggtagcggtggcggaggatctgaattcgacgtggtcatgacacagagcccttctagcctgtctgccagcgtgggcgacagagtgacaatcacctgtcagagcagcctggacatcagccactacctgaactggtatcagcagaagcccggcaaggcccctaagctgctgatctacgacgccagcaatctggaaaccggcgtgcccagcagattttctggcagcggaagcggcacccacttcaccttcacaatatccagcctccagcctgaggacttcgccacctactactgccagcagtacgacaacctgcctctgacctttggcggaggcaccaagctggaaatcaagagactcgaggacctgaagaacgtgttcccacctgaggtggccgtgttcgagcctagcgaggccgagatcagccacacccagaaagccaccctcgtgtgcctggctaccggcttctaccccgaccatgtggaactgtcttggtgggtcaacggcaaagaggtgcacagcggcgtgtgtaccgacccccagccactgaaagaacagcccgccctgaacgacagccggtactgcctgagcagcagactgagagtgtccgccaccttctggcagaacccccggaaccacttcagatgccaggtgcagttctacggcctgagcgagaacgacgagtggacccaggacagagccaagcccgtgacccagatcgtgtctgccgaagcctggggcagagccgattgcgacgtgaagctggtggaaaagagcttcgagacagacaccaacctgaacttccagaacctgagcgtgatcggcttcagaatcctgctgctgaaagtggccggctttaacctgctgatgaccctgcggctgtggtccagcagggccaagcgatctggatctggagcaacaaacttctcactactcaaacaagcaggtgacgtggaggagaatcccgggcctactagtatggactggatttggcgcatccttttccttgtcggcgctgctaccggcgcgcattccgggccccagctccagctgcaagagtctggacctggcctggtcaagcctagcgagacactgagcctgacctgtaccgtgtccggcgatagcatcagcagcggcgattactactggggctggatcagacagcctcctggcaaaggactggaatggatcggccacatctactacagcggcgtgacctactacaaccccagcctgaagtccagagtgaccatcagcgtggacaccagccggaaccagttctccctgaagctgtctagcgtgacagccgccgataccgccgtgtactactgcaccagagaggacagcagcaactggcggagtagaggccagggaacactggtcacagttagctctggatccggcggaggcggaagtggaggcggaggatctggcggcggaggctctttcgaacaagttcaactggttcaatcaggcggaggcgtggtgcaacctggtggctctctgagagtgtcttgtgctgcctctggcgtgaccctgagcgactatggaatgcactgggtccgacaggcccctggcaaaggacttgagtgggtcgccttcatcagaaacgacggcagcgacaagtattacgccgacagcgtgaagggcagattcaccatcagccgggacaacagcgagaaaaccgtgtctctccagatgtctagcctgagagccgaggacaccgccgtgtactactgtgccaagaatggcgagagcggccctctggactactggtatctggatctgtggggcagaggcaccctggtcacagtctcttctacgcgtatccagaaccctgatcctgccgtgtaccagctgcgggatagcaagagcagcgacaagagcgtgtgtctgttcaccgacttcgacagccagaccaacgtgtcccagagcaaggactccgacgtgtacatcaccgataagtgcgtgctggacatgcggagcatggacttcaagagcaactccgccgtggcctggtccaacaagtccgatttcgcctgcgccaacgccttcaacaacagcattatccccgaggacacattcttcccaagccccgagagcagctgcggctttaccagcgagagctaccagcagggcgtgctgagcgccaccatcctgtacgagatcctgctgggcaaggccaccctgtacgccgtgctggtgtctgccctggtgctgatggctatggtcaagcggaaggacagccgggga

SEQ ID NO: 4723 - DNA, 2700 bp, synthetic construct
  source 1..2700: mol_type = other DNA
atggccttaccagtgaccgccttgctcctgccgctggccttgctgctccacgccgccaggccggaagtgcagctggttgaatctggcggaggactggttcagcctggcggatctctgagactgtcttgtgccgccagcggcttcagcttcagcgacttttggatgagctgggtccgacaggcccctggcaaaggacttgaatgggtcgccacaatcagccaggccggcagcgagaaggactacgtggactctgtgaagggcagattcaccatcagccgggacaacgccaagaagtccctgtacctccagatgaacagcctgagagccgaggacaccgccgtgtactattgtgcctctggcgtgtacagcttcgactacagaggccagggcaccctggtcacagtctcttctggtaccggcggaggcggatctggcggcggaggtagcggtggcggaggatctgaattcagctacgagctgacacagcctccatccgtgtctggcacacctggacagagagtggctatctcctgtagcggcagcagcagcaacatcggcaccagaatggtcacctggtatcagcacgtgccaggcacagcccctaagctgctgatcttcaacaacaaccagcggcctagcggcgtgcccgatagattttctgccagcaagagcggcacaagcgccagcctggctatcatcggactccagtctgacgacgaggccgactactactgtgccacctgggacgacaacgtgaagtcctacgtgttcggcaccggcaccaaagtgacagtgcttggaagtagactcgaggacctgaagaacgtgttcccacctgaggtggccgtgttcgagcctagcgaggccgagatcagccacacccagaaagccaccctcgtgtgcctggctaccggcttctaccccgaccatgtggaactgtcttggtgggtcaacggcaaagaggtgcacagcggcgtgtgtaccgacccccagccactgaaagaacagcccgccctgaacgacagccggtactgcctgagcagcagactgagagtgtccgccaccttctggcagaacccccggaaccacttcagatgccaggtgcagttctacggcctgagcgagaacgacgagtggacccaggacagagccaagcccgtgacccagatcgtgtctgccgaagcctggggcagagccgattgcgacgtgaagctggtggaaaagagcttcgagacagacaccaacctgaacttccagaacctgagcgtgatcggcttcagaatcctgctgctgaaagtggccggctttaacctgctgatgaccctgcggctgtggtccagcagggccaagcgatctggatctggagcaacaaacttctcactactcaaacaagcaggtgacgtggaggagaatcccgggcctactagtatggactggatttggcgcatccttttccttgtcggcgctgctaccggcgcgcattccgggccccagctccagctgcaagagtctggacctggcctggtcaagcctagcgagacactgagcctgacctgtaccgtgtccggcgatagcatcagcagcggcgattactactggggctggatcagacagcctcctggcaaaggactggaatggatcggccacatctactacagcggcgtgacctactacaaccccagcctgaagtccagagtgaccatcagcgtggacaccagccggaaccagttctccctgaagctgtctagcgtgacagccgccgataccgccgtgtactactgcaccagagaggacagcagcaactggcggagtagaggccagggaacactggtcacagttagctctggatccggcggaggcggaagtggaggcggaggatctggcggcggaggctctttcgaacttgaaatggcccaggttcagctccagcagtggggagctggactgctgaagcctagcgagacactgagcctgacctgtgctgtgtacggcggcagcttcagcggctactactggtcctggatcagacagcctcctggcaaaggactggaatggatcggcgagatcaaccacagcggctccaccaactacaaccccagcctgaagtccagagtgaccatcagcgtggacaccagcaagaaccagttctccctgaagctgagcagcgtgacagccgctgataccgccgtgtactattgcgctagagcccctcagtcttggtacgtgggagatgtgtggggccagggcacactggttacagtgtcatctacgcgtatccagaaccctgatcctgccgtgtaccagctgcgggatagcaagagcagcgacaagagcgtgtgtctgttcaccgacttcgacagccagaccaacgtgtcccagagcaaggactccgacgtgtacatcaccgataagtgcgtgctggacatgcggagcatggacttcaagagcaactccgccgtggcctggtccaacaagtccgatttcgcctgcgccaacgccttcaacaacagcattatccccgaggacacattcttcccaagccccgagagcagctgcggctttaccagcgagagctaccagcagggcgtgctgagcgccaccatcctgtacgagatcctgctgggcaaggccaccctgtacgccgtgctggtgtctgccctggtgctgatggctatggtcaagcggaaggacagccgggga

SEQ ID NO: 4724 - DNA, 2691 bp, synthetic construct
  source 1..2691: mol_type = other DNA
atggccttaccagtgaccgccttgctcctgccgctggccttgctgctccacgccgccaggccggaagtgcagctggttgaatctggcggaggactggttcagcctggcggatctctgagactgtcttgtgccgccagcggcttcagcttcagcgacttttggatgagctgggtccgacaggcccctggcaaaggacttgaatgggtcgccacaatcagccaggccggcagcgagaaggactacgtggactctgtgaagggcagattcaccatcagccgggacaacgccaagaagtccctgtacctccagatgaacagcctgagagccgaggacaccgccgtgtactattgtgcctctggcgtgtacagcttcgactacagaggccagggcaccctggtcacagtctcttctggtaccggcggaggcggatctggcggcggaggtagcggtggcggaggatctgaattccagtctgtgctgacacagcctcctagcctgtctgtggcccctggaaagacagccagcatcacatgcggcggcaacaacatcggcatgaagtccgtgcactggtatcagcagaggccaggacaggctcctgtgctggtcatctactacgacagcgacagaccctctggcatccccggcagattttccggcagcaactctggcaataccgccacactgaccatctccagagtggaagctggcgacgaggccgactactactgccaagtgtgggataccaccggcgatcaccctggctatgtgtttggcaccggcaccaaagtgacagtgcttctcgaggacctgaagaacgtgttcccacctgaggtggccgtgttcgagcctagcgaggccgagatcagccacacccagaaagccaccctcgtgtgcctggctaccggcttctaccccgaccatgtggaactgtcttggtgggtcaacggcaaagaggtgcacagcggcgtgtgtaccgacccccagccactgaaagaacagcccgccctgaacgacagccggtactgcctgagcagcagactgagagtgtccgccaccttctggcagaacccccggaaccacttcagatgccaggtgcagttctacggcctgagcgagaacgacgagtggacccaggacagagccaagcccgtgacccagatcgtgtctgccgaagcctggggcagagccgattgcgacgtgaagctggtggaaaagagcttcgagacagacaccaacctgaacttccagaacctgagcgtgatcggcttcagaatcctgctgctgaaagtggccggctttaacctgctgatgaccctgcggctgtggtccagcagggccaagcgatctggatctggagcaacaaacttctcactactcaaacaagcaggtgacgtggaggagaatcccgggcctactagtatggactggatttggcgcatccttttccttgtcggcgctgctaccggcgcgcattccgggccccagctccagctgcaagagtctggacctggcctggtcaagcctagcgagacactgagcctgacctgtaccgtgtccggcgatagcatcagcagcggcgattactactggggctggatcagacagcctcctggcaaaggactggaatggatcggccacatctactacagcggcgtgacctactacaaccccagcctgaagtccagagtgaccatcagcgtggacaccagccggaaccagttctccctgaagctgtctagcgtgacagccgccgataccgccgtgtactactgcaccagagaggacagcagcaactggcggagtagaggccagggaacactggtcacagttagctctggatccggcggaggcggaagtggaggcggaggatctggcggcggaggctctttcgaacaagttcaactggttcagagcggagccgaagtgaagaaacctggcagcagcgtgaaggtgtcctgcaaagcaagcggcggcacctttagcagctacgccatctcttgggtccgacaggcacctggacaaggactggaatggatgggcggcatcatccccatcttcggcacagccaattacgcccagaaattccagggcagagtgaccatcaccgccgacgagtctacaagcaccgcctacatggaactgagcagcctgagaagcgaggacaccgccgtgtactattgtgccagaggcgtgtacggctacagcggctctgccccttatgatgagtggggccagggaaccctggtcaccgtttcttctacgcgtatccagaaccctgatcctgccgtgtaccagctgcgggatagcaagagcagcgacaagagcgtgtgtctgttcaccgacttcgacagccagaccaacgtgtcccagagcaaggactccgacgtgtacatcaccgataagtgcgtgctggacatgcggagcatggacttcaagagcaactccgccgtggcctggtccaacaagtccgatttcgcctgcgccaacgccttcaacaacagcattatccccgaggacacattcttcccaagccccgagagcagctgcggctttaccagcgagagctaccagcagggcgtgctgagcgccaccatcctgtacgagatcctgctgggcaaggccaccctgtacgccgtgctggtgtctgccctggtgctgatggctatggtcaagcggaaggacagccgggga

SEQ ID NO: 4725 - DNA, 2685 bp, synthetic construct
  source 1..2685: mol_type = other DNA
atggccttaccagtgaccgccttgctcctgccgctggccttgctgctccacgccgccaggccggaagtgcagctggttgaatctggcggaggactggttcagcctggcggatctctgagactgtcttgtgccgccagcggcttcagcttcagcgacttttggatgagctgggtccgacaggcccctggcaaaggacttgaatgggtcgccacaatcagccaggccggcagcgagaaggactacgtggactctgtgaagggcagattcaccatcagccgggacaacgccaagaagtccctgtacctccagatgaacagcctgagagccgaggacaccgccgtgtactattgtgcctctggcgtgtacagcttcgactacagaggccagggcaccctggtcacagtctcttctggtaccggcggaggcggatctggcggcggaggtagcggtggcggaggatctgaattcgaggtgcaactggttgagtctggcggaggactggtgcagcctggaagaagcctgagactgtcttgtgccgccagcggcttcaccttcgacgattatgccatgcactgggtccgacaggcccctggcaaaggacttgaatgggtgtccggcatctcctggaacagcggctctatcggctacgccgattccgtgaagggcagattcaccatcagccgggacaacgccaagaacagcctgtacctccagatgaactccctgagagccgaggacacagccctgtactactgcgccaaagacaaaggcggaggctactacgacttttggagcggcagcgattattggggccagggcacactggtcacagtgtctagcctcgaggacctgaagaacgtgttcccacctgaggtggccgtgttcgagcctagcgaggccgagatcagccacacccagaaagccaccctcgtgtgcctggctaccggcttctaccccgaccatgtggaactgtcttggtgggtcaacggcaaagaggtgcacagcggcgtgtgtaccgacccccagccactgaaagaacagcccgccctgaacgacagccggtactgcctgagcagcagactgagagtgtccgccaccttctggcagaacccccggaaccacttcagatgccaggtgcagttctacggcctgagcgagaacgacgagtggacccaggacagagccaagcccgtgacccagatcgtgtctgccgaagcctggggcagagccgattgcgacgtgaagctggtggaaaagagcttcgagacagacaccaacctgaacttccagaacctgagcgtgatcggcttcagaatcctgctgctgaaagtggccggctttaacctgctgatgaccctgcggctgtggtccagcagggccaagcgatctggatctggagcaacaaacttctcactactcaaacaagcaggtgacgtggaggagaatcccgggcctactagtatggactggatttggcgcatccttttccttgtcggcgctgctaccggcgcgcattccgggccccagctccagctgcaagagtctggacctggcctggtcaagcctagcgagacactgagcctgacctgtaccgtgtccggcgatagcatcagcagcggcgattactactggggctggatcagacagcctcctggcaaaggactggaatggatcggccacatctactacagcggcgtgacctactacaaccccagcctgaagtccagagtgaccatcagcgtggacaccagccggaaccagttctccctgaagctgtctagcgtgacagccgccgataccgccgtgtactactgcaccagagaggacagcagcaactggcggagtagaggccagggaacactggtcacagttagctctggatccggcggaggcggaagtggaggcggaggatctggcggcggaggctctttcgaatcttctgagctgacacaggaccctgccgtgtctgttgctctgggccagacagtgcggattacctgtcagggcgatagcctgagaagctactacgcctcctggtatcagcagaagccaggccaggctcctgtgctggtcatctacggcaagaacaacagacccagcggcatccccgatagattcagcggaagcagctctggcaataccgccagcctgacaattactggcgctcaggccgaggacgaggccgactactactgcaacagcagagatagcagcggctgggttttcggcggaggcacaaaactgacagtgctgacgcgtatccagaaccctgatcctgccgtgtaccagctgcgggatagcaagagcagcgacaagagcgtgtgtctgttcaccgacttcgacagccagaccaacgtgtcccagagcaaggactccgacgtgtacatcaccgataagtgcgtgctggacatgcggagcatggacttcaagagcaactccgccgtggcctggtccaacaagtccgatttcgcctgcgccaacgccttcaacaacagcattatccccgaggacacattcttcccaagccccgagagcagctgcggctttaccagcgagagctaccagcagggcgtgctgagcgccaccatcctgtacgagatcctgctgggcaaggccaccctgtacgccgtgctggtgtctgccctggtgctgatggctatggtcaagcggaaggacagccgggga

SEQ ID NO: 4726 - DNA, 2712 bp, synthetic construct
  source 1..2712: mol_type = other DNA
atggccttaccagtgaccgccttgctcctgccgctggccttgctgctccacgccgccaggccggaagtgcagctggttgaatctggcggaggactggttcagcctggcggatctctgagactgtcttgtgccgccagcggcttcagcttcagcgacttttggatgagctgggtccgacaggcccctggcaaaggacttgaatgggtcgccacaatcagccaggccggcagcgagaaggactacgtggactctgtgaagggcagattcaccatcagccgggacaacgccaagaagtccctgtacctccagatgaacagcctgagagccgaggacaccgccgtgtactattgtgcctctggcgtgtacagcttcgactacagaggccagggcaccctggtcacagtctcttctggtaccggcggaggcggatctggcggcggaggtagcggtggcggaggatctgaattcgaagtgcagctccagcagtctggacctggcctggttaagcctagccagacactgagcctgacctgtgccatcagcggcgatagcgtgctgagcaacagcgacacctggaactggatcagacagagccctagcagaggactggaatggctgggcagaacctaccacagaagcacttggtacgacgactacgccagctctgtgcggggcagagtgtccatcaatgtggacaccagcaagaaccagtacagcctgcaactgaacgccgtgacacctgaggataccggcgtgtactactgcgccagagacagactccaggacggcaactcttggagcgacgcctttgatgtgtggggccagggcacaatggtcaccgtttctagcctcgaggacctgaagaacgtgttcccacctgaggtggccgtgttcgagcctagcgaggccgagatcagccacacccagaaagccaccctcgtgtgcctggctaccggcttctaccccgaccatgtggaactgtcttggtgggtcaacggcaaagaggtgcacagcggcgtgtgtaccgacccccagccactgaaagaacagcccgccctgaacgacagccggtactgcctgagcagcagactgagagtgtccgccaccttctggcagaacccccggaaccacttcagatgccaggtgcagttctacggcctgagcgagaacgacgagtggacccaggacagagccaagcccgtgacccagatcgtgtctgccgaagcctggggcagagccgattgcgacgtgaagctggtggaaaagagcttcgagacagacaccaacctgaacttccagaacctgagcgtgatcggcttcagaatcctgctgctgaaagtggccggctttaacctgctgatgaccctgcggctgtggtccagcagggccaagcgatctggatctggagcaacaaacttctcactactcaaacaagcaggtgacgtggaggagaatcccgggcctactagtatggactggatttggcgcatccttttccttgtcggcgctgctaccggcgcgcattccgggccccagctccagctgcaagagtctggacctggcctggtcaagcctagcgagacactgagcctgacctgtaccgtgtccggcgatagcatcagcagcggcgattactactggggctggatcagacagcctcctggcaaaggactggaatggatcggccacatctactacagcggcgtgacctactacaaccccagcctgaagtccagagtgaccatcagcgtggacaccagccggaaccagttctccctgaagctgtctagcgtgacagccgccgataccgccgtgtactactgcaccagagaggacagcagcaactggcggagtagaggccagggaacactggtcacagttagctctggatccggcggaggcggaagtggaggcggaggatctggcggcggaggctctttcgaacaatctgctctgacacagcctgccagcgtgtcaggatctcctggacagagcatcaccatctcttgcaccggcaccagctctgatgtcggcggctacaattacgtgtcctggtatcagcagcaccccggcaaggcccctaagctgatgatctacgacgtgtccaacagacccagcggcgtgtccaatagattctccggcagcaagagcggcaacaccgccagcctgacaatttctggactgcaagccgaggacgaggccgactactactgtagcagctacaccagcagcagcacactggtgtacgtgttcggcacaggcaccaaagtgaccgtgcttacgcgtatccagaaccctgatcctgccgtgtaccagctgcgggatagcaagagcagcgacaagagcgtgtgtctgttcaccgacttcgacagccagaccaacgtgtcccagagcaaggactccgacgtgtacatcaccgataagtgcgtgctggacatgcggagcatggacttcaagagcaactccgccgtggcctggtccaacaagtccgatttcgcctgcgccaacgccttcaacaacagcattatccccgaggacacattcttcccaagccccgagagcagctgcggctttaccagcgagagctaccagcagggcgtgctgagcgccaccatcctgtacgagatcctgctgggcaaggccaccctgtacgccgtgctggtgtctgccctggtgctgatggctatggtcaagcggaaggacagccgggga

SEQ ID NO: 4727 - DNA, 2646 bp, synthetic construct
  source 1..2646: mol_type = other DNA
atggccttaccagtgaccgccttgctcctgccgctggccttgctgctccacgccgccaggccggaagtgcagctggttgaatctggcggaggactggttcagcctggcggatctctgagactgtcttgtgccgccagcggcttcagcttcagcgacttttggatgagctgggtccgacaggcccctggcaaaggacttgaatgggtcgccacaatcagccaggccggcagcgagaaggactacgtggactctgtgaagggcagattcaccatcagccgggacaacgccaagaagtccctgtacctccagatgaacagcctgagagccgaggacaccgccgtgtactattgtgcctctggcgtgtacagcttcgactacagaggccagggcaccctggtcacagtctcttctggtaccggcggaggcggatctggcggcggaggtagcggtggcggaggatctgaattccaggtgcaactggttcagtctggggccgaagtgaagaaacctggggcctctgtgaaggtgtcctgcaaggcttccggctacacctttaccagctacgacatcaactgggtccgacaggccacaggccaaggactggaatggatgggctggatgaaccccaacagcggcaataccggctacgcccagaaattccagggcagagtgaccatgaccagaaacaccagcatcagcaccgcctacatggaactgagcagcctgagaagcgaggacaccgccgtgtactattgcgccagaggcgacagcaccaaggtggaaatcaaactcgaggacctgaagaacgtgttcccacctgaggtggccgtgttcgagcctagcgaggccgagatcagccacacccagaaagccaccctcgtgtgcctggctaccggcttctaccccgaccatgtggaactgtcttggtgggtcaacggcaaagaggtgcacagcggcgtgtgtaccgacccccagccactgaaagaacagcccgccctgaacgacagccggtactgcctgagcagcagactgagagtgtccgccaccttctggcagaacccccggaaccacttcagatgccaggtgcagttctacggcctgagcgagaacgacgagtggacccaggacagagccaagcccgtgacccagatcgtgtctgccgaagcctggggcagagccgattgcgacgtgaagctggtggaaaagagcttcgagacagacaccaacctgaacttccagaacctgagcgtgatcggcttcagaatcctgctgctgaaagtggccggctttaacctgctgatgaccctgcggctgtggtccagcagggccaagcgatctggatctggagcaacaaacttctcactactcaaacaagcaggtgacgtggaggagaatcccgggcctactagtatggactggatttggcgcatccttttccttgtcggcgctgctaccggcgcgcattccgggccccagctccagctgcaagagtctggacctggcctggtcaagcctagcgagacactgagcctgacctgtaccgtgtccggcgatagcatcagcagcggcgattactactggggctggatcagacagcctcctggcaaaggactggaatggatcggccacatctactacagcggcgtgacctactacaaccccagcctgaagtccagagtgaccatcagcgtggacaccagccggaaccagttctccctgaagctgtctagcgtgacagccgccgataccgccgtgtactactgcaccagagaggacagcagcaactggcggagtagaggccagggaacactggtcacagttagctctggatccggcggaggcggaagtggaggcggaggatctggcggcggaggctctttcgaacaatctgtgctgacccagcctagatccgtgtctggctctcctggacagagcgtgaccatctcttgtaccggcaccagctctgatgtcggcggctacaattacgtgtcctggtatcagcagcaccccggcgaagcccctaagctgattatctacgacgccgacaagcggcccagcggcatcagcaatagattcagctctggcaagagcggcaacaccgccagcctgacaatcagcggactccaggtggaagatgaggccgactactactgctgctcctatgccggcggaagcacctgggttttcggaggcggtacaaaagtgaccgtgctgacgcgtatccagaaccctgatcctgccgtgtaccagctgcgggatagcaagagcagcgacaagagcgtgtgtctgttcaccgacttcgacagccagaccaacgtgtcccagagcaaggactccgacgtgtacatcaccgataagtgcgtgctggacatgcggagcatggacttcaagagcaactccgccgtggcctggtccaacaagtccgatttcgcctgcgccaacgccttcaacaacagcattatccccgaggacacattcttcccaagccccgagagcagctgcggctttaccagcgagagctaccagcagggcgtgctgagcgccaccatcctgtacgagatcctgctgggcaaggccaccctgtacgccgtgctggtgtctgccctggtgctgatggctatggtcaagcggaaggacagccgggga

SEQ ID NO: 4728 - DNA, 2712 bp, synthetic construct
  source 1..2712: mol_type = other DNA
atggccttaccagtgaccgccttgctcctgccgctggccttgctgctccacgccgccaggccggaagtgcagctggttgaatctggcggaggactggttcagcctggcggatctctgagactgtcttgtgccgccagcggcttcagcttcagcgacttttggatgagctgggtccgacaggcccctggcaaaggacttgaatgggtcgccacaatcagccaggccggcagcgagaaggactacgtggactctgtgaagggcagattcaccatcagccgggacaacgccaagaagtccctgtacctccagatgaacagcctgagagccgaggacaccgccgtgtactattgtgcctctggcgtgtacagcttcgactacagaggccagggcaccctggtcacagtctcttctggtaccggcggaggcggatctggcggcggaggtagcggtggcggaggatctgaattcgaagtgcagctccagcagtctggacctggcctggttaagcctagccagacactgagcctgacctgtgccatcagcggcgatagcgtgtcctctaatagcgccgcctggaactggatcagacagagccctagcagaggactggaatggctgggcagaacctactaccgcagcaagtggtacagcgactacgccgtgtccgtgaagtcccggatcaccatcaatcccgacaccagcaagaaccagttcagcctgcaactgaacagcgtgacccctgaggataccgccgtgtactactgcgccagagatccctacgacttttggagcggctaccccgacgcctttgacatctggggacagggcacaatggtcaccgtttctagcctcgaggacctgaagaacgtgttcccacctgaggtggccgtgttcgagcctagcgaggccgagatcagccacacccagaaagccaccctcgtgtgcctggctaccggcttctaccccgaccatgtggaactgtcttggtgggtcaacggcaaagaggtgcacagcggcgtgtgtaccgacccccagccactgaaagaacagcccgccctgaacgacagccggtactgcctgagcagcagactgagagtgtccgccaccttctggcagaacccccggaaccacttcagatgccaggtgcagttctacggcctgagcgagaacgacgagtggacccaggacagagccaagcccgtgacccagatcgtgtctgccgaagcctggggcagagccgattgcgacgtgaagctggtggaaaagagcttcgagacagacaccaacctgaacttccagaacctgagcgtgatcggcttcagaatcctgctgctgaaagtggccggctttaacctgctgatgaccctgcggctgtggtccagcagggccaagcgatctggatctggagcaacaaacttctcactactcaaacaagcaggtgacgtggaggagaatcccgggcctactagtatggactggatttggcgcatccttttccttgtcggcgctgctaccggcgcgcattccgggccccagctccagctgcaagagtctggacctggcctggtcaagcctagcgagacactgagcctgacctgtaccgtgtccggcgatagcatcagcagcggcgattactactggggctggatcagacagcctcctggcaaaggactggaatggatcggccacatctactacagcggcgtgacctactacaaccccagcctgaagtccagagtgaccatcagcgtggacaccagccggaaccagttctccctgaagctgtctagcgtgacagccgccgataccgccgtgtactactgcaccagagaggacagcagcaactggcggagtagaggccagggaacactggtcacagttagctctggatccggcggaggcggaagtggaggcggaggatctggcggcggaggctctttcgaacaatctgctctgacacagcctgccagcgtgtcaggatctcctggacagagcatcaccatctcttgcaccggcaccagctctgatgtcggcggctacaattacgtgtcctggtatcagcagcaccccggcaaggcccctaaagtgattatcagcgaagtgaacaacagacccagcggcgtgtcccacagattcagcggctctaagtctggcaacaccgccagcctgacaatctctggactgcaagccgaggacgaggccgactacttctgtagcagctacaccagcggcagaaccctgtacgtgttcggcacaggcagcaaagtgacagtgctgggaacgcgtatccagaaccctgatcctgccgtgtaccagctgcgggatagcaagagcagcgacaagagcgtgtgtctgttcaccgacttcgacagccagaccaacgtgtcccagagcaaggactccgacgtgtacatcaccgataagtgcgtgctggacatgcggagcatggacttcaagagcaactccgccgtggcctggtccaacaagtccgatttcgcctgcgccaacgccttcaacaacagcattatccccgaggacacattcttcccaagccccgagagcagctgcggctttaccagcgagagctaccagcagggcgtgctgagcgccaccatcctgtacgagatcctgctgggcaaggccaccctgtacgccgtgctggtgtctgccctggtgctgatggctatggtcaagcggaaggacagccgggga

SEQ ID NO: 4729 - DNA, 2709 bp, synthetic construct
  source 1..2709: mol_type = other DNA
atggccttaccagtgaccgccttgctcctgccgctggccttgctgctccacgccgccaggccggaagtgcagctggttgaatctggcggaggactggttcagcctggcggatctctgagactgtcttgtgccgccagcggcttcagcttcagcgacttttggatgagctgggtccgacaggcccctggcaaaggacttgaatgggtcgccacaatcagccaggccggcagcgagaaggactacgtggactctgtgaagggcagattcaccatcagccgggacaacgccaagaagtccctgtacctccagatgaacagcctgagagccgaggacaccgccgtgtactattgtgcctctggcgtgtacagcttcgactacagaggccagggcaccctggtcacagtctcttctggtaccggcggaggcggatctggcggcggaggtagcggtggcggaggatctgaattccaatctgctctgacacagcctgccagcgcctctggatctcctggacagagcgtgaccatctcctgtaccggcacctcttctgatgtcggcggctacaactacgtgtcctggtatcagcagcaccccggcaaggcccctaagctgatgatctacgacgtgtccaacagacccagcggcgtgtccaatagattctccggcagcaagagcggcaacaccgccagcctgacaatttctggactgcaagccgaggacgaggccgactactactgtagcagctacaccagcagcagcacactgtacgtgttcggcacaggcacccagctcacagttcttctcgaggacctgaagaacgtgttcccacctgaggtggccgtgttcgagcctagcgaggccgagatcagccacacccagaaagccaccctcgtgtgcctggctaccggcttctaccccgaccatgtggaactgtcttggtgggtcaacggcaaagaggtgcacagcggcgtgtgtaccgacccccagccactgaaagaacagcccgccctgaacgacagccggtactgcctgagcagcagactgagagtgtccgccaccttctggcagaacccccggaaccacttcagatgccaggtgcagttctacggcctgagcgagaacgacgagtggacccaggacagagccaagcccgtgacccagatcgtgtctgccgaagcctggggcagagccgattgcgacgtgaagctggtggaaaagagcttcgagacagacaccaacctgaacttccagaacctgagcgtgatcggcttcagaatcctgctgctgaaagtggccggctttaacctgctgatgaccctgcggctgtggtccagcagggccaagcgatctggatctggagcaacaaacttctcactactcaaacaagcaggtgacgtggaggagaatcccgggcctactagtatggactggatttggcgcatccttttccttgtcggcgctgctaccggcgcgcattccgggccccagctccagctgcaagagtctggacctggcctggtcaagcctagcgagacactgagcctgacctgtaccgtgtccggcgatagcatcagcagcggcgattactactggggctggatcagacagcctcctggcaaaggactggaatggatcggccacatctactacagcggcgtgacctactacaaccccagcctgaagtccagagtgaccatcagcgtggacaccagccggaaccagttctccctgaagctgtctagcgtgacagccgccgataccgccgtgtactactgcaccagagaggacagcagcaactggcggagtagaggccagggaacactggtcacagttagctctggatccggcggaggcggaagtggaggcggaggatctggcggcggaggctctttcgaagaagtgcagctccagcagtctggacctggcctggttaagcctagccagacactgagcctgacctgtgccatcagcggcgattccatgctgagcaacagcgacacctggaactggatcagacagagccccagcagaggcctggaatggctgggcagaacataccacagaagcacttggtacgacgactacgccagctctgtgcggggcagagtgtccatcaatgtggacaccagcaagaaccagtacagcctgcaactgaacgccgtgacacctgaggataccggcgtgtactactgtgccagagtgcggctccaggacggcaattcttggagcgacgcctttgatgtgtggggccagggcacaatggtcaccgtttctagcacgcgtatccagaaccctgatcctgccgtgtaccagctgcgggatagcaagagcagcgacaagagcgtgtgtctgttcaccgacttcgacagccagaccaacgtgtcccagagcaaggactccgacgtgtacatcaccgataagtgcgtgctggacatgcggagcatggacttcaagagcaactccgccgtggcctggtccaacaagtccgatttcgcctgcgccaacgccttcaacaacagcattatccccgaggacacattcttcccaagccccgagagcagctgcggctttaccagcgagagctaccagcagggcgtgctgagcgccaccatcctgtacgagatcctgctgggcaaggccaccctgtacgccgtgctggtgtctgccctggtgctgatggctatggtcaagcggaaggacagccgggga

SEQ ID NO: 4730 - DNA, 2709 bp, synthetic construct
  source 1..2709: mol_type = other DNA
atggccttaccagtgaccgccttgctcctgccgctggccttgctgctccacgccgccaggccggaagtgcagctggttgaatctggcggaggactggttcagcctggcggatctctgagactgtcttgtgccgccagcggcttcagcttcagcgacttttggatgagctgggtccgacaggcccctggcaaaggacttgaatgggtcgccacaatcagccaggccggcagcgagaaggactacgtggactctgtgaagggcagattcaccatcagccgggacaacgccaagaagtccctgtacctccagatgaacagcctgagagccgaggacaccgccgtgtactattgtgcctctggcgtgtacagcttcgactacagaggccagggcaccctggtcacagtctcttctggtaccggcggaggcggatctggcggcggaggtagcggtggcggaggatctgaattcgacgtgatgctgacccagacaccactgagcctgcctgtgtctctgggcgatcaggccagcatctcctgtagaagcagccagagcatcctgcacagcaccggcgatacctacctggaatggtatctccagaagcctggacagagccccaagctgctgattaacaaggtgtccaaccggctgagcggcgtgcccgatagattttctggcagcggctctggcaccgacttcaccctgaagatcagcagagtggaagccgaggacctgggcgtgtactactgcttccaaggcagccatgttccttggacctttggcggaggcaccaagctggaaatcaagagagctgacgccgctcctaccgtgtccatctttcctctcgaggacctgaagaacgtgttcccacctgaggtggccgtgttcgagcctagcgaggccgagatcagccacacccagaaagccaccctcgtgtgcctggctaccggcttctaccccgaccatgtggaactgtcttggtgggtcaacggcaaagaggtgcacagcggcgtgtgtaccgacccccagccactgaaagaacagcccgccctgaacgacagccggtactgcctgagcagcagactgagagtgtccgccaccttctggcagaacccccggaaccacttcagatgccaggtgcagttctacggcctgagcgagaacgacgagtggacccaggacagagccaagcccgtgacccagatcgtgtctgccgaagcctggggcagagccgattgcgacgtgaagctggtggaaaagagcttcgagacagacaccaacctgaacttccagaacctgagcgtgatcggcttcagaatcctgctgctgaaagtggccggctttaacctgctgatgaccctgcggctgtggtccagcagggccaagcgatctggatctggagcaacaaacttctcactactcaaacaagcaggtgacgtggaggagaatcccgggcctactagtatggactggatttggcgcatccttttccttgtcggcgctgctaccggcgcgcattccgggccccagctccagctgcaagagtctggacctggcctggtcaagcctagcgagacactgagcctgacctgtaccgtgtccggcgatagcatcagcagcggcgattactactggggctggatcagacagcctcctggcaaaggactggaatggatcggccacatctactacagcggcgtgacctactacaaccccagcctgaagtccagagtgaccatcagcgtggacaccagccggaaccagttctccctgaagctgtctagcgtgacagccgccgataccgccgtgtactactgcaccagagaggacagcagcaactggcggagtagaggccagggaacactggtcacagttagctctggatccggcggaggcggaagtggaggcggaggatctggcggcggaggctctttcgaacaagtgaagctccagcagagcggccctagccttgtgaaacctggcgcttccgtgaagatgagctgcaaggccagcggctacaccttcaccgatttctacatgaaatgggtcaagcagagccacggcaagtctctggaatggatcggcgacatcaaccccaacatcggagacaccttctacaaccagaagttcaagggcaaagccacactgaccgtggacaagagcagcagcaccgcctacatgcagctcaacagcctgaccagcgaggacagcgccgtgtacttttgttccgtgggctacttcgacgtgtggggagccggaacaaccgtgacagtctcttctacgcgtatccagaaccctgatcctgccgtgtaccagctgcgggatagcaagagcagcgacaagagcgtgtgtctgttcaccgacttcgacagccagaccaacgtgtcccagagcaaggactccgacgtgtacatcaccgataagtgcgtgctggacatgcggagcatggacttcaagagcaactccgccgtggcctggtccaacaagtccgatttcgcctgcgccaacgccttcaacaacagcattatccccgaggacacattcttcccaagccccgagagcagctgcggctttaccagcgagagctaccagcagggcgtgctgagcgccaccatcctgtacgagatcctgctgggcaaggccaccctgtacgccgtgctggtgtctgccctggtgctgatggctatggtcaagcggaaggacagccgggga

SEQ ID NO: 4731 - DNA, 2697 bp, synthetic construct
  source 1..2697: mol_type = other DNA
atggccttaccagtgaccgccttgctcctgccgctggccttgctgctccacgccgccaggccggaagtgcagctggttgaatctggcggaggactggttcagcctggcggatctctgagactgtcttgtgccgccagcggcttcagcttcagcgacttttggatgagctgggtccgacaggcccctggcaaaggacttgaatgggtcgccacaatcagccaggccggcagcgagaaggactacgtggactctgtgaagggcagattcaccatcagccgggacaacgccaagaagtccctgtacctccagatgaacagcctgagagccgaggacaccgccgtgtactattgtgcctctggcgtgtacagcttcgactacagaggccagggcaccctggtcacagtctcttctggtaccggcggaggcggatctggcggcggaggtagcggtggcggaggatctgaattcgagatcgtgctgacacagtctcccgccacactgtcactgtctccaggcgaaagagccacactgagctgtagagccagccagagcgtgtccatctacctggcctggtatcagcagaagcctggacaggctccccggctgctgatctacgatgccagcaatagagccacaggcatccccgccagattttctggctctggcagcggcaccgatttcaccctgaccataagcagcctggaacctgaggacttcgccgtgtactactgccagcagagaagcaactggcctcctttcacattcggccctggcaccaaggtggacatcaaactcgaggacctgaagaacgtgttcccacctgaggtggccgtgttcgagcctagcgaggccgagatcagccacacccagaaagccaccctcgtgtgcctggctaccggcttctaccccgaccatgtggaactgtcttggtgggtcaacggcaaagaggtgcacagcggcgtgtgtaccgacccccagccactgaaagaacagcccgccctgaacgacagccggtactgcctgagcagcagactgagagtgtccgccaccttctggcagaacccccggaaccacttcagatgccaggtgcagttctacggcctgagcgagaacgacgagtggacccaggacagagccaagcccgtgacccagatcgtgtctgccgaagcctggggcagagccgattgcgacgtgaagctggtggaaaagagcttcgagacagacaccaacctgaacttccagaacctgagcgtgatcggcttcagaatcctgctgctgaaagtggccggctttaacctgctgatgaccctgcggctgtggtccagcagggccaagcgatctggatctggagcaacaaacttctcactactcaaacaagcaggtgacgtggaggagaatcccgggcctactagtatggactggatttggcgcatccttttccttgtcggcgctgctaccggcgcgcattccgggccccagctccagctgcaagagtctggacctggcctggtcaagcctagcgagacactgagcctgacctgtaccgtgtccggcgatagcatcagcagcggcgattactactggggctggatcagacagcctcctggcaaaggactggaatggatcggccacatctactacagcggcgtgacctactacaaccccagcctgaagtccagagtgaccatcagcgtggacaccagccggaaccagttctccctgaagctgtctagcgtgacagccgccgataccgccgtgtactactgcaccagagaggacagcagcaactggcggagtagaggccagggaacactggtcacagttagctctggatccggcggaggcggaagtggaggcggaggatctggcggcggaggctctttcgaacaggtgcagcttgttgaaagcggaggcggagttgtgcagcctggcagaagtctgagactgtcttgtgccgccagcggcttcaccttcagcagctatggaatgcactgggtccgacaggcccctggcaaaggacttgaatgggttgccgtgatctgggacgacggcagcaacaagtattacgtggacagcgtgaagggcagattcaccatcagccgggacaacagcaagaacaccctgtacctccagatgaacagcctgagagccgaggacacagccgtgtattattgcgccagagatgactactacggcagcggctccttcaacagctactatggcacagacgtgtggggccagggcacaacagttaccgttagctctacgcgtatccagaaccctgatcctgccgtgtaccagctgcgggatagcaagagcagcgacaagagcgtgtgtctgttcaccgacttcgacagccagaccaacgtgtcccagagcaaggactccgacgtgtacatcaccgataagtgcgtgctggacatgcggagcatggacttcaagagcaactccgccgtggcctggtccaacaagtccgatttcgcctgcgccaacgccttcaacaacagcattatccccgaggacacattcttcccaagccccgagagcagctgcggctttaccagcgagagctaccagcagggcgtgctgagcgccaccatcctgtacgagatcctgctgggcaaggccaccctgtacgccgtgctggtgtctgccctggtgctgatggctatggtcaagcggaaggacagccgggga

SEQ ID NO: 4732 - DNA, 2652 bp, synthetic construct
  source 1..2652: mol_type = other DNA
atggccttaccagtgaccgccttgctcctgccgctggccttgctgctccacgccgccaggccggaagtgcagctggttgaatctggcggaggactggttcagcctggcggatctctgagactgtcttgtgccgccagcggcttcagcttcagcgacttttggatgagctgggtccgacaggcccctggcaaaggacttgaatgggtcgccacaatcagccaggccggcagcgagaaggactacgtggactctgtgaagggcagattcaccatcagccgggacaacgccaagaagtccctgtacctccagatgaacagcctgagagccgaggacaccgccgtgtactattgtgcctctggcgtgtacagcttcgactacagaggccagggcaccctggtcacagtctcttctggtaccggcggaggcggatctggcggcggaggtagcggtggcggaggatctgaattcgacatccagatgacacagagccctagcagcctgtctgccagcgtgggagacagagtgaccatcacctgtagagccagccagggcatctcttcttggctggcctggtatcagcagaagcccgagaaggcccctaagagcctgatctatgccgccagctctctccagagcggagtgcctagcagattttctggcagcggctccggcaccgatttcaccctgacaatatccagcctccagcctgaggacttcgccacctactactgccagcagtacaacagctacccctacaccttcggccagggcaccaagctggaaatcaaactcgaggacctgaagaacgtgttcccacctgaggtggccgtgttcgagcctagcgaggccgagatcagccacacccagaaagccaccctcgtgtgcctggctaccggcttctaccccgaccatgtggaactgtcttggtgggtcaacggcaaagaggtgcacagcggcgtgtgtaccgacccccagccactgaaagaacagcccgccctgaacgacagccggtactgcctgagcagcagactgagagtgtccgccaccttctggcagaacccccggaaccacttcagatgccaggtgcagttctacggcctgagcgagaacgacgagtggacccaggacagagccaagcccgtgacccagatcgtgtctgccgaagcctggggcagagccgattgcgacgtgaagctggtggaaaagagcttcgagacagacaccaacctgaacttccagaacctgagcgtgatcggcttcagaatcctgctgctgaaagtggccggctttaacctgctgatgaccctgcggctgtggtccagcagggccaagcgatctggatctggagcaacaaacttctcactactcaaacaagcaggtgacgtggaggagaatcccgggcctactagtatggactggatttggcgcatccttttccttgtcggcgctgctaccggcgcgcattccgggccccagctccagctgcaagagtctggacctggcctggtcaagcctagcgagacactgagcctgacctgtaccgtgtccggcgatagcatcagcagcggcgattactactggggctggatcagacagcctcctggcaaaggactggaatggatcggccacatctactacagcggcgtgacctactacaaccccagcctgaagtccagagtgaccatcagcgtggacaccagccggaaccagttctccctgaagctgtctagcgtgacagccgccgataccgccgtgtactactgcaccagagaggacagcagcaactggcggagtagaggccagggaacactggtcacagttagctctggatccggcggaggcggaagtggaggcggaggatctggcggcggaggctctttcgaagaagtgcaactggttcaatctggcggcggactggttcatccaggcggttctctgagactgagctgtgccggctctggcttcaccttcagcacctacctgatgtactgggtccgacaggcccctggcaagacactggaatgggtgtccgctattggcagcggaggcgatacctactacgccgactctgtgaagggcagattcaccatcagccgggacaacgccaagaacagcctgtacctccagatgaactccctgagagccgaggacatggccgtgtactactgtgccagaggactcggctattggggccagggaacactggtcacagtgtcctctacgcgtatccagaaccctgatcctgccgtgtaccagctgcgggatagcaagagcagcgacaagagcgtgtgtctgttcaccgacttcgacagccagaccaacgtgtcccagagcaaggactccgacgtgtacatcaccgataagtgcgtgctggacatgcggagcatggacttcaagagcaactccgccgtggcctggtccaacaagtccgatttcgcctgcgccaacgccttcaacaacagcattatccccgaggacacattcttcccaagccccgagagcagctgcggctttaccagcgagagctaccagcagggcgtgctgagcgccaccatcctgtacgagatcctgctgggcaaggccaccctgtacgccgtgctggtgtctgccctggtgctgatggctatggtcaagcggaaggacagccgggga

SEQ ID NO: 4733 - DNA, 2709 bp, synthetic construct
  source 1..2709: mol_type = other DNA
atggccttaccagtgaccgccttgctcctgccgctggccttgctgctccacgccgccaggccggaagtgcagctggttgaatctggcggaggactggttcagcctggcggatctctgagactgtcttgtgccgccagcggcttcagcttcagcgacttttggatgagctgggtccgacaggcccctggcaaaggacttgaatgggtcgccacaatcagccaggccggcagcgagaaggactacgtggactctgtgaagggcagattcaccatcagccgggacaacgccaagaagtccctgtacctccagatgaacagcctgagagccgaggacaccgccgtgtactattgtgcctctggcgtgtacagcttcgactacagaggccagggcaccctggtcacagtctcttctggtaccggcggaggcggatctggcggcggaggtagcggtggcggaggatctgaattcctgcctgttctgacacagcctccatccgtgtctgtggcccctggaaagaccgccagaatcacatgcggcggcaacaacatcggcagcaagagcgtgcactggtatcagcagaagcctggacaggctcctgtgctggtggtgtacgacgacagcgatagacctagcggcatccccgagagattcagcggcagcaattccggcaataccgccacactgaccatcagcagagtggaagctggcgacgaggccgactactactgccaagtgtgggacagcagcagcgactacgtggtgtttggcggcggaacaaagctgacagtgcttctcgaggacctgaagaacgtgttcccacctgaggtggccgtgttcgagcctagcgaggccgagatcagccacacccagaaagccaccctcgtgtgcctggctaccggcttctaccccgaccatgtggaactgtcttggtgggtcaacggcaaagaggtgcacagcggcgtgtgtaccgacccccagccactgaaagaacagcccgccctgaacgacagccggtactgcctgagcagcagactgagagtgtccgccaccttctggcagaacccccggaaccacttcagatgccaggtgcagttctacggcctgagcgagaacgacgagtggacccaggacagagccaagcccgtgacccagatcgtgtctgccgaagcctggggcagagccgattgcgacgtgaagctggtggaaaagagcttcgagacagacaccaacctgaacttccagaacctgagcgtgatcggcttcagaatcctgctgctgaaagtggccggctttaacctgctgatgaccctgcggctgtggtccagcagggccaagcgatctggatctggagcaacaaacttctcactactcaaacaagcaggtgacgtggaggagaatcccgggcctactagtatggactggatttggcgcatccttttccttgtcggcgctgctaccggcgcgcattccgggccccagctccagctgcaagagtctggacctggcctggtcaagcctagcgagacactgagcctgacctgtaccgtgtccggcgatagcatcagcagcggcgattactactggggctggatcagacagcctcctggcaaaggactggaatggatcggccacatctactacagcggcgtgacctactacaaccccagcctgaagtccagagtgaccatcagcgtggacaccagccggaaccagttctccctgaagctgtctagcgtgacagccgccgataccgccgtgtactactgcaccagagaggacagcagcaactggcggagtagaggccagggaacactggtcacagttagctctggatccggcggaggcggaagtggaggcggaggatctggcggcggaggctctttcgaagaagttcaactggtgcagagcggagccgaagtgaagaagccaggcgagagcctgaagattagctgcaaaggcagcggctacagcttcaccagctactggatcggctgggtccgacagatgcctggcaaaggactggaatggatgggcatcatctaccccggcgacagcgacaccagatacagccctagctttcagggccaagtgaccatctccgccgacaagagcatcagcacagcctacctccagtggtcctctctgaaggccagcgataccgccatgtactactgcgccagacaagtctggggatggcaaggcggcatgtaccccaggtctaactggtggtacaacctggactcttggggccagggcacactggtcacagtctcttctacgcgtatccagaaccctgatcctgccgtgtaccagctgcgggatagcaagagcagcgacaagagcgtgtgtctgttcaccgacttcgacagccagaccaacgtgtcccagagcaaggactccgacgtgtacatcaccgataagtgcgtgctggacatgcggagcatggacttcaagagcaactccgccgtggcctggtccaacaagtccgatttcgcctgcgccaacgccttcaacaacagcattatccccgaggacacattcttcccaagccccgagagcagctgcggctttaccagcgagagctaccagcagggcgtgctgagcgccaccatcctgtacgagatcctgctgggcaaggccaccctgtacgccgtgctggtgtctgccctggtgctgatggctatggtcaagcggaaggacagccgggga

SEQ ID NO: 4734 - DNA, 2688 bp, synthetic construct
  source 1..2688: mol_type = other DNA
atggccttaccagtgaccgccttgctcctgccgctggccttgctgctccacgccgccaggccggaagtgcagctggttgaatctggcggaggactggttcagcctggcggatctctgagactgtcttgtgccgccagcggcttcagcttcagcgacttttggatgagctgggtccgacaggcccctggcaaaggacttgaatgggtcgccacaatcagccaggccggcagcgagaaggactacgtggactctgtgaagggcagattcaccatcagccgggacaacgccaagaagtccctgtacctccagatgaacagcctgagagccgaggacaccgccgtgtactattgtgcctctggcgtgtacagcttcgactacagaggccagggcaccctggtcacagtctcttctggtaccggcggaggcggatctggcggcggaggtagcggtggcggaggatctgaattcgagctggtcatgacacagagccctgcttctctggccgtgtcactgggacagagagccaccatctcttgcagagccagcgagagcgtggacagctacggcaagagcttcatgcactggtatcagctcaagcccggccagcctcctaagctgctgatctacagagcctccaacctggaaagcggcgtgccagccagattttctggcagcggcagcagaaccgacttcaccctgaccattgatcccgtggaagccgatgatgccgccacctactactgccagcagaacaacgaggacccctggacatttggcggaggcaccaagctggaaatcaaactcgaggacctgaagaacgtgttcccacctgaggtggccgtgttcgagcctagcgaggccgagatcagccacacccagaaagccaccctcgtgtgcctggctaccggcttctaccccgaccatgtggaactgtcttggtgggtcaacggcaaagaggtgcacagcggcgtgtgtaccgacccccagccactgaaagaacagcccgccctgaacgacagccggtactgcctgagcagcagactgagagtgtccgccaccttctggcagaacccccggaaccacttcagatgccaggtgcagttctacggcctgagcgagaacgacgagtggacccaggacagagccaagcccgtgacccagatcgtgtctgccgaagcctggggcagagccgattgcgacgtgaagctggtggaaaagagcttcgagacagacaccaacctgaacttccagaacctgagcgtgatcggcttcagaatcctgctgctgaaagtggccggctttaacctgctgatgaccctgcggctgtggtccagcagggccaagcgatctggatctggagcaacaaacttctcactactcaaacaagcaggtgacgtggaggagaatcccgggcctactagtatggactggatttggcgcatccttttccttgtcggcgctgctaccggcgcgcattccgggccccagctccagctgcaagagtctggacctggcctggtcaagcctagcgagacactgagcctgacctgtaccgtgtccggcgatagcatcagcagcggcgattactactggggctggatcagacagcctcctggcaaaggactggaatggatcggccacatctactacagcggcgtgacctactacaaccccagcctgaagtccagagtgaccatcagcgtggacaccagccggaaccagttctccctgaagctgtctagcgtgacagccgccgataccgccgtgtactactgcaccagagaggacagcagcaactggcggagtagaggccagggaacactggtcacagttagctctggatccggcggaggcggaagtggaggcggaggatctggcggcggaggctctttcgaagaagtgcagctcgaacagtctggccccgagcttgtgaaacctggcgcttccgtgaagatgagctgcaaggccagcggctacaccttcaccaactactacatgaaatgggtcaagcagagccacggcaagtccctggaatggatcggcgatctgaaccccaacaacggcgacaccttctacaaccagaagttcaagggcaaagccacactgaccgtggacaagagcagcaacaccgcctacatgcagctcaactccctgaccagcgaggacagcgccgtgtactactgtgccagaaccggcagatacgaagagaacgctatggactactggggccagggcacaagcgtgacagtctcttctacgcgtatccagaaccctgatcctgccgtgtaccagctgcgggatagcaagagcagcgacaagagcgtgtgtctgttcaccgacttcgacagccagaccaacgtgtcccagagcaaggactccgacgtgtacatcaccgataagtgcgtgctggacatgcggagcatggacttcaagagcaactccgccgtggcctggtccaacaagtccgatttcgcctgcgccaacgccttcaacaacagcattatccccgaggacacattcttcccaagccccgagagcagctgcggctttaccagcgagagctaccagcagggcgtgctgagcgccaccatcctgtacgagatcctgctgggcaaggccaccctgtacgccgtgctggtgtctgccctggtgctgatggctatggtcaagcggaaggacagccgggga

SEQ ID NO: 4735 - DNA, 2670 bp, synthetic construct
  source 1..2670: mol_type = other DNA
atggccttaccagtgaccgccttgctcctgccgctggccttgctgctccacgccgccaggccggaagtgcagctggttgaatctggcggaggactggttcagcctggcggatctctgagactgtcttgtgccgccagcggcttcagcttcagcgacttttggatgagctgggtccgacaggcccctggcaaaggacttgaatgggtcgccacaatcagccaggccggcagcgagaaggactacgtggactctgtgaagggcagattcaccatcagccgggacaacgccaagaagtccctgtacctccagatgaacagcctgagagccgaggacaccgccgtgtactattgtgcctctggcgtgtacagcttcgactacagaggccagggcaccctggtcacagtctcttctggtaccggcggaggcggatctggcggcggaggtagcggtggcggaggatctgaattcgacgtggtcatgacacagagcccttctagcctgtctgccagcgtgggcgacagagtgaccatcacctgtatggcctccgaggacatctacatccggctggcctggtatcagcagaagcctggaaacgcccctaagctgctgatctacgccgccacctctctggaaacaggcgtgccaagcagattttccggcagcggctctggcaccgatttcaccctgacaatatccagcctccagcctgaggacttcgccacctactactgccagcagtattggagcagcccctggacatttggcggaggcaccaaggtggaaatcaaactcgaggacctgaagaacgtgttcccacctgaggtggccgtgttcgagcctagcgaggccgagatcagccacacccagaaagccaccctcgtgtgcctggctaccggcttctaccccgaccatgtggaactgtcttggtgggtcaacggcaaagaggtgcacagcggcgtgtgtaccgacccccagccactgaaagaacagcccgccctgaacgacagccggtactgcctgagcagcagactgagagtgtccgccaccttctggcagaacccccggaaccacttcagatgccaggtgcagttctacggcctgagcgagaacgacgagtggacccaggacagagccaagcccgtgacccagatcgtgtctgccgaagcctggggcagagccgattgcgacgtgaagctggtggaaaagagcttcgagacagacaccaacctgaacttccagaacctgagcgtgatcggcttcagaatcctgctgctgaaagtggccggctttaacctgctgatgaccctgcggctgtggtccagcagggccaagcgatctggatctggagcaacaaacttctcactactcaaacaagcaggtgacgtggaggagaatcccgggcctactagtatggactggatttggcgcatccttttccttgtcggcgctgctaccggcgcgcattccgggccccagctccagctgcaagagtctggacctggcctggtcaagcctagcgagacactgagcctgacctgtaccgtgtccggcgatagcatcagcagcggcgattactactggggctggatcagacagcctcctggcaaaggactggaatggatcggccacatctactacagcggcgtgacctactacaaccccagcctgaagtccagagtgaccatcagcgtggacaccagccggaaccagttctccctgaagctgtctagcgtgacagccgccgataccgccgtgtactactgcaccagagaggacagcagcaactggcggagtagaggccagggaacactggtcacagttagctctggatccggcggaggcggaagtggaggcggaggatctggcggcggaggctctttcgaacaggttcagctgcaagagtctggccccggactggtcaagcctagccaaacactgagcctgacctgtaccgtgtccggctacagcatcaccagcgactacacctggaactggatcagacagcctcctggcaacggactggaatggatcggctacatcacctacagcggcagcaccagctacaaccccagcctgaaaagccgggtgctgatctccgtggacaccagcaagaatcaggtgtccctgaagctgagcagcgtgacagccgctgataccgccgtgtactactgtgccagactggggagaagatacacaatggactactggggccagggcaccaccgtgacagtttcttctacgcgtatccagaaccctgatcctgccgtgtaccagctgcgggatagcaagagcagcgacaagagcgtgtgtctgttcaccgacttcgacagccagaccaacgtgtcccagagcaaggactccgacgtgtacatcaccgataagtgcgtgctggacatgcggagcatggacttcaagagcaactccgccgtggcctggtccaacaagtccgatttcgcctgcgccaacgccttcaacaacagcattatccccgaggacacattcttcccaagccccgagagcagctgcggctttaccagcgagagctaccagcagggcgtgctgagcgccaccatcctgtacgagatcctgctgggcaaggccaccctgtacgccgtgctggtgtctgccctggtgctgatggctatggtcaagcggaaggacagccgggga

SEQ ID NO: 4736 - DNA, 2682 bp, synthetic construct
  source 1..2682: mol_type = other DNA
atggccttaccagtgaccgccttgctcctgccgctggccttgctgctccacgccgccaggccggaagtgcagctggttgaatctggcggaggactggttcagcctggcggatctctgagactgtcttgtgccgccagcggcttcagcttcagcgacttttggatgagctgggtccgacaggcccctggcaaaggacttgaatgggtcgccacaatcagccaggccggcagcgagaaggactacgtggactctgtgaagggcagattcaccatcagccgggacaacgccaagaagtccctgtacctccagatgaacagcctgagagccgaggacaccgccgtgtactattgtgcctctggcgtgtacagcttcgactacagaggccagggcaccctggtcacagtctcttctggtaccggcggaggcggatctggcggcggaggtagcggtggcggaggatctgaattcgatattgtgctgactcagagccctgccactctgagccttagtccaggcgacagagctaccatctcctgtagggcctctgaatccgtgaccattctgggctctcatctcatatattggtatcaacaaaagccgggccagcctccacggctgctcattcaactggcctctaacgtgcagaccggcgtgccagctagattttctggctctggctcccggaccgactttacactgacaatcagctccgtggaacccgaagattttgccgtctattattgcctccagtccaggaccattcctcggacattcggccagggaacaaaactcgaaatcaagcggctcgaggacctgaagaacgtgttcccacctgaggtggccgtgttcgagcctagcgaggccgagatcagccacacccagaaagccaccctcgtgtgcctggctaccggcttctaccccgaccatgtggaactgtcttggtgggtcaacggcaaagaggtgcacagcggcgtgtgtaccgacccccagccactgaaagaacagcccgccctgaacgacagccggtactgcctgagcagcagactgagagtgtccgccaccttctggcagaacccccggaaccacttcagatgccaggtgcagttctacggcctgagcgagaacgacgagtggacccaggacagagccaagcccgtgacccagatcgtgtctgccgaagcctggggcagagccgattgcgacgtgaagctggtggaaaagagcttcgagacagacaccaacctgaacttccagaacctgagcgtgatcggcttcagaatcctgctgctgaaagtggccggctttaacctgctgatgaccctgcggctgtggtccagcagggccaagcgatctggatctggagcaacaaacttctcactactcaaacaagcaggtgacgtggaggagaatcccgggcctactagtatggactggatttggcgcatccttttccttgtcggcgctgctaccggcgcgcattccgggccccagctccagctgcaagagtctggacctggcctggtcaagcctagcgagacactgagcctgacctgtaccgtgtccggcgatagcatcagcagcggcgattactactggggctggatcagacagcctcctggcaaaggactggaatggatcggccacatctactacagcggcgtgacctactacaaccccagcctgaagtccagagtgaccatcagcgtggacaccagccggaaccagttctccctgaagctgtctagcgtgacagccgccgataccgccgtgtactactgcaccagagaggacagcagcaactggcggagtagaggccagggaacactggtcacagttagctctggatccggcggaggcggaagtggaggcggaggatctggcggcggaggctctttcgaacaggtgcagctcgttcagagtggccccgaagtgaaaaagccaggcgagtccgtgaagatttcctgcaaagcctccggctacacattccggcactactctatgaattgggtcaagcaggccccaggccagggccttaagtggatgggacgcatcaataccgagtccggcgtgccaatctacgccgatgacttcaaaggccggttcagcttcaccgtggatacctctgcctccaccgcctacctggaaatcagcagcctgaccagcgaggatacagctgtgtacttctgtagcaacgattacctctacagcctggatttctggggacagggaaccacactgaccgtgtctagcacgcgtatccagaaccctgatcctgccgtgtaccagctgcgggatagcaagagcagcgacaagagcgtgtgtctgttcaccgacttcgacagccagaccaacgtgtcccagagcaaggactccgacgtgtacatcaccgataagtgcgtgctggacatgcggagcatggacttcaagagcaactccgccgtggcctggtccaacaagtccgatttcgcctgcgccaacgccttcaacaacagcattatccccgaggacacattcttcccaagccccgagagcagctgcggctttaccagcgagagctaccagcagggcgtgctgagcgccaccatcctgtacgagatcctgctgggcaaggccaccctgtacgccgtgctggtgtctgccctggtgctgatggctatggtcaagcggaaggacagccgggga

SEQ ID NO: 4737 - DNA, 2682 bp, synthetic construct
  source 1..2682: mol_type = other DNA
atggccttaccagtgaccgccttgctcctgccgctggccttgctgctccacgccgccaggccggaagtgcagctggttgaatctggcggaggactggttcagcctggcggatctctgagactgtcttgtgccgccagcggcttcagcttcagcgacttttggatgagctgggtccgacaggcccctggcaaaggacttgaatgggtcgccacaatcagccaggccggcagcgagaaggactacgtggactctgtgaagggcagattcaccatcagccgggacaacgccaagaagtccctgtacctccagatgaacagcctgagagccgaggacaccgccgtgtactattgtgcctctggcgtgtacagcttcgactacagaggccagggcaccctggtcacagtctcttctggtaccggcggaggcggatctggcggcggaggtagcggtggcggaggatctgaattcgacatcgtgctgacacagtctcccgccacactgtcactgagccctggcgatagagccacactgagctgtagagccagcgagagcgtgacaatcctgggcagccacctgatctactggtatcagcagaagcccggacaggcccctagactgctgattcagctcgccagcaatgtgcagacaggcatccctgccagattttccggcagcggcagcagaaccgatttcaccctgaccataagcagcctggaacctgaggacttcgccgtgtactactgcctccagagccggacaatccccagaacctttggacagggcaccaagctggaaatcaagagactcgaggacctgaagaacgtgttcccacctgaggtggccgtgttcgagcctagcgaggccgagatcagccacacccagaaagccaccctcgtgtgcctggctaccggcttctaccccgaccatgtggaactgtcttggtgggtcaacggcaaagaggtgcacagcggcgtgtgtaccgacccccagccactgaaagaacagcccgccctgaacgacagccggtactgcctgagcagcagactgagagtgtccgccaccttctggcagaacccccggaaccacttcagatgccaggtgcagttctacggcctgagcgagaacgacgagtggacccaggacagagccaagcccgtgacccagatcgtgtctgccgaagcctggggcagagccgattgcgacgtgaagctggtggaaaagagcttcgagacagacaccaacctgaacttccagaacctgagcgtgatcggcttcagaatcctgctgctgaaagtggccggctttaacctgctgatgaccctgcggctgtggtccagcagggccaagcgatctggatctggagcaacaaacttctcactactcaaacaagcaggtgacgtggaggagaatcccgggcctactagtatggactggatttggcgcatccttttccttgtcggcgctgctaccggcgcgcattccgggccccagctccagctgcaagagtctggacctggcctggtcaagcctagcgagacactgagcctgacctgtaccgtgtccggcgatagcatcagcagcggcgattactactggggctggatcagacagcctcctggcaaaggactggaatggatcggccacatctactacagcggcgtgacctactacaaccccagcctgaagtccagagtgaccatcagcgtggacaccagccggaaccagttctccctgaagctgtctagcgtgacagccgccgataccgccgtgtactactgcaccagagaggacagcagcaactggcggagtagaggccagggaacactggtcacagttagctctggatccggcggaggcggaagtggaggcggaggatctggcggcggaggctctttcgaacaggttcagctggtgcagtctggcagcgagctgaagaaacctggcgagagcgtgaagatcagctgcaaggccagcggctacaccttcacacactacagcatgaactgggtccgacaggcccctggacaaggactggaatggatgggcagaatcaacaccgagacaggcgagcccctgtacgccgacgatttcaagggcagattcgtgttcagcctggacaccagcgccagcacagcctatctccagatcagctctctgaaggccgaggacaccgccgtgtactactgctccaacgactacctgtactccctggactattggggccagggcacactggtcacagtgtctagtacgcgtatccagaaccctgatcctgccgtgtaccagctgcgggatagcaagagcagcgacaagagcgtgtgtctgttcaccgacttcgacagccagaccaacgtgtcccagagcaaggactccgacgtgtacatcaccgataagtgcgtgctggacatgcggagcatggacttcaagagcaactccgccgtggcctggtccaacaagtccgatttcgcctgcgccaacgccttcaacaacagcattatccccgaggacacattcttcccaagccccgagagcagctgcggctttaccagcgagagctaccagcagggcgtgctgagcgccaccatcctgtacgagatcctgctgggcaaggccaccctgtacgccgtgctggtgtctgccctggtgctgatggctatggtcaagcggaaggacagccgggga

SEQ ID NO: 4738 - DNA, 2685 bp, synthetic construct
  source 1..2685: mol_type = other DNA
atggccttaccagtgaccgccttgctcctgccgctggccttgctgctccacgccgccaggccggaagtgcagctggttgaatctggcggaggactggttcagcctggcggatctctgagactgtcttgtgccgccagcggcttcagcttcagcgacttttggatgagctgggtccgacaggcccctggcaaaggacttgaatgggtcgccacaatcagccaggccggcagcgagaaggactacgtggactctgtgaagggcagattcaccatcagccgggacaacgccaagaagtccctgtacctccagatgaacagcctgagagccgaggacaccgccgtgtactattgtgcctctggcgtgtacagcttcgactacagaggccagggcaccctggtcacagtctcttctggtaccggcggaggcggatctggcggcggaggtagcggtggcggaggatctgaattcgacatccagctgactcagagccctagctttctgagcgccagcgtgggcgacagagtgaccattacatgtagagccagccagggcatcagcaccgacctgaactggtatcagcagaagcctggcaaggcccctaagctgctgatctacgccgccagcaatctggaaagcggcgtgccaagcagattttccggctctggcagcggcaccgagttcaccctgacaatatctagcctccagcctgaggacttcgccacctactactgccagcagagctacaactggccctacacctttggcggaggcaccaaggtggaaatcaagagactcgaggacctgaagaacgtgttcccacctgaggtggccgtgttcgagcctagcgaggccgagatcagccacacccagaaagccaccctcgtgtgcctggctaccggcttctaccccgaccatgtggaactgtcttggtgggtcaacggcaaagaggtgcacagcggcgtgtgtaccgacccccagccactgaaagaacagcccgccctgaacgacagccggtactgcctgagcagcagactgagagtgtccgccaccttctggcagaacccccggaaccacttcagatgccaggtgcagttctacggcctgagcgagaacgacgagtggacccaggacagagccaagcccgtgacccagatcgtgtctgccgaagcctggggcagagccgattgcgacgtgaagctggtggaaaagagcttcgagacagacaccaacctgaacttccagaacctgagcgtgatcggcttcagaatcctgctgctgaaagtggccggctttaacctgctgatgaccctgcggctgtggtccagcagggccaagcgatctggatctggagcaacaaacttctcactactcaaacaagcaggtgacgtggaggagaatcccgggcctactagtatggactggatttggcgcatccttttccttgtcggcgctgctaccggcgcgcattccgggccccagctccagctgcaagagtctggacctggcctggtcaagcctagcgagacactgagcctgacctgtaccgtgtccggcgatagcatcagcagcggcgattactactggggctggatcagacagcctcctggcaaaggactggaatggatcggccacatctactacagcggcgtgacctactacaaccccagcctgaagtccagagtgaccatcagcgtggacaccagccggaaccagttctccctgaagctgtctagcgtgacagccgccgataccgccgtgtactactgcaccagagaggacagcagcaactggcggagtagaggccagggaacactggtcacagttagctctggatccggcggaggcggaagtggaggcggaggatctggcggcggaggctctttcgaagaagttcagctggttgaatcaggcggaggactcgtgaaacctggcggctctctgagactgtcttgtgccgccagcggcttcaccttcagcaacttcgagatgaactgggtccgacaggccccaggcaaaggactggaatgggtgtccggcatcagctccaatggccggtacatcaactacgccgacagcgtgaagggcagattcaccatcagccgggacaacgccaagaacagcctgtacctccagatgaactccctgagagccgaggacaccgccgtgtactattgtgccagagtggtggacttcgaccaggactacaacggcttcgactattggggccagggcaccctggttaccgttagctctacgcgtatccagaaccctgatcctgccgtgtaccagctgcgggatagcaagagcagcgacaagagcgtgtgtctgttcaccgacttcgacagccagaccaacgtgtcccagagcaaggactccgacgtgtacatcaccgataagtgcgtgctggacatgcggagcatggacttcaagagcaactccgccgtggcctggtccaacaagtccgatttcgcctgcgccaacgccttcaacaacagcattatccccgaggacacattcttcccaagccccgagagcagctgcggctttaccagcgagagctaccagcagggcgtgctgagcgccaccatcctgtacgagatcctgctgggcaaggccaccctgtacgccgtgctggtgtctgccctggtgctgatggctatggtcaagcggaaggacagccgggga

SEQ ID NO: 4739 - DNA, 2679 bp, synthetic construct
  source 1..2679: mol_type = other DNA
atggccttaccagtgaccgccttgctcctgccgctggccttgctgctccacgccgccaggccggaagtgcagctggttgaatctggcggaggactggttcagcctggcggatctctgagactgtcttgtgccgccagcggcttcagcttcagcgacttttggatgagctgggtccgacaggcccctggcaaaggacttgaatgggtcgccacaatcagccaggccggcagcgagaaggactacgtggactctgtgaagggcagattcaccatcagccgggacaacgccaagaagtccctgtacctccagatgaacagcctgagagccgaggacaccgccgtgtactattgtgcctctggcgtgtacagcttcgactacagaggccagggcaccctggtcacagtctcttctggtaccggcggaggcggatctggcggcggaggtagcggtggcggaggatctgaattcgacatccaactgactcagagccccagctttctgagcgcctctgtgggcgacagagtgaccatcacatgtagtctcagcctgggcatcagcacatggcgggattggtttccgccgaggcttggcaggggccttgagccgctgacctacgccgccagcacactgcaaagcggagtgcctagcagattttccggcagcggctctggcaccgagttcaccctgacaatatccagcctccagcctgaggacttcgccacctactactgccagcagctcaacagctaccctctgacctttggcggaggcaccaaggtggaaatcaagagactcgaggacctgaagaacgtgttcccacctgaggtggccgtgttcgagcctagcgaggccgagatcagccacacccagaaagccaccctcgtgtgcctggctaccggcttctaccccgaccatgtggaactgtcttggtgggtcaacggcaaagaggtgcacagcggcgtgtgtaccgacccccagccactgaaagaacagcccgccctgaacgacagccggtactgcctgagcagcagactgagagtgtccgccaccttctggcagaacccccggaaccacttcagatgccaggtgcagttctacggcctgagcgagaacgacgagtggacccaggacagagccaagcccgtgacccagatcgtgtctgccgaagcctggggcagagccgattgcgacgtgaagctggtggaaaagagcttcgagacagacaccaacctgaacttccagaacctgagcgtgatcggcttcagaatcctgctgctgaaagtggccggctttaacctgctgatgaccctgcggctgtggtccagcagggccaagcgatctggatctggagcaacaaacttctcactactcaaacaagcaggtgacgtggaggagaatcccgggcctactagtatggactggatttggcgcatccttttccttgtcggcgctgctaccggcgcgcattccgggccccagctccagctgcaagagtctggacctggcctggtcaagcctagcgagacactgagcctgacctgtaccgtgtccggcgatagcatcagcagcggcgattactactggggctggatcagacagcctcctggcaaaggactggaatggatcggccacatctactacagcggcgtgacctactacaaccccagcctgaagtccagagtgaccatcagcgtggacaccagccggaaccagttctccctgaagctgtctagcgtgacagccgccgataccgccgtgtactactgcaccagagaggacagcagcaactggcggagtagaggccagggaacactggtcacagttagctctggatccggcggaggcggaagtggaggcggaggatctggcggcggaggctctttcgaagaagttcaactggttgagtctggtggcggcctggttaagcctggcggatctctgagactgagctgtgccgccagcggcttcacctttagcacatacggcatgagctgggtccgacaggcccctggaaaaggacttgagtgggtcgcctacatcaacaacggctccggctacatctactacgccgacagcgtgaagggcagattcaccatcagccgggacaacgccaagaacagcctgtacctccagatgaactccctgagagccgaggacaccgccgtgtactattgtgccagaggacagtggtggagcggcggagactttgattattggggccagggcaccctggtcaccgtttcttctacgcgtatccagaaccctgatcctgccgtgtaccagctgcgggatagcaagagcagcgacaagagcgtgtgtctgttcaccgacttcgacagccagaccaacgtgtcccagagcaaggactccgacgtgtacatcaccgataagtgcgtgctggacatgcggagcatggacttcaagagcaactccgccgtggcctggtccaacaagtccgatttcgcctgcgccaacgccttcaacaacagcattatccccgaggacacattcttcccaagccccgagagcagctgcggctttaccagcgagagctaccagcagggcgtgctgagcgccaccatcctgtacgagatcctgctgggcaaggccaccctgtacgccgtgctggtgtctgccctggtgctgatggctatggtcaagcggaaggacagccgggga

SEQ ID NO: 4740 - DNA, 2682 bp, synthetic construct
  source 1..2682: mol_type = other DNA
atggccttaccagtgaccgccttgctcctgccgctggccttgctgctccacgccgccaggccggaagtgcagctggttgaatctggcggaggactggttcagcctggcggatctctgagactgtcttgtgccgccagcggcttcagcttcagcgacttttggatgagctgggtccgacaggcccctggcaaaggacttgaatgggtcgccacaatcagccaggccggcagcgagaaggactacgtggactctgtgaagggcagattcaccatcagccgggacaacgccaagaagtccctgtacctccagatgaacagcctgagagccgaggacaccgccgtgtactattgtgcctctggcgtgtacagcttcgactacagaggccagggcaccctggtcacagtctcttctggtaccggcggaggcggatctggcggcggaggtagcggtggcggaggatctgaattcgagatcgtgctgacacagtctcccgccacactgtcactgtctccaggcgaaagagccacactgagctgtagcgccagcagcagcgtgtcctacatgtactggtatcagcagaagcccggacaggcccctagactgctgatctacagaaccagcaacctggcctctggcatccccgccagattttctggctctggcagcggcaccgatttcaccctgaccataagcagcctggaacctgaggacttcgccgtgtactactgccagcagtaccacagctaccccaccacctttggacagggcaccaaggtggaaatcaagcggacagttctcgaggacctgaagaacgtgttcccacctgaggtggccgtgttcgagcctagcgaggccgagatcagccacacccagaaagccaccctcgtgtgcctggctaccggcttctaccccgaccatgtggaactgtcttggtgggtcaacggcaaagaggtgcacagcggcgtgtgtaccgacccccagccactgaaagaacagcccgccctgaacgacagccggtactgcctgagcagcagactgagagtgtccgccaccttctggcagaacccccggaaccacttcagatgccaggtgcagttctacggcctgagcgagaacgacgagtggacccaggacagagccaagcccgtgacccagatcgtgtctgccgaagcctggggcagagccgattgcgacgtgaagctggtggaaaagagcttcgagacagacaccaacctgaacttccagaacctgagcgtgatcggcttcagaatcctgctgctgaaagtggccggctttaacctgctgatgaccctgcggctgtggtccagcagggccaagcgatctggatctggagcaacaaacttctcactactcaaacaagcaggtgacgtggaggagaatcccgggcctactagtatggactggatttggcgcatccttttccttgtcggcgctgctaccggcgcgcattccgggccccagctccagctgcaagagtctggacctggcctggtcaagcctagcgagacactgagcctgacctgtaccgtgtccggcgatagcatcagcagcggcgattactactggggctggatcagacagcctcctggcaaaggactggaatggatcggccacatctactacagcggcgtgacctactacaaccccagcctgaagtccagagtgaccatcagcgtggacaccagccggaaccagttctccctgaagctgtctagcgtgacagccgccgataccgccgtgtactactgcaccagagaggacagcagcaactggcggagtagaggccagggaacactggtcacagttagctctggatccggcggaggcggaagtggaggcggaggatctggcggcggaggctctttcgaagaagtgcagctggttgaatcaggtggcggcctggttcaacctggcggatctctgagactgtcttgtgccgccagcggcttcagcttcaacacctacgccatgaactgggtccgacaggctcctggcaaaggactggaatgggtgtcccacatcagaagcaagagcaacaacttcgccacctactacgccgacagcgtgaaggacagattcaccatcagccgggacaacgccaagaacagcctgtacctccagatgaactccctgagagccgaggacaccgccgtgtattattgcgccagacaaggcggcgacttccctatggattattggggccagggcaccctggtcaccgtttcttctacgcgtatccagaaccctgatcctgccgtgtaccagctgcgggatagcaagagcagcgacaagagcgtgtgtctgttcaccgacttcgacagccagaccaacgtgtcccagagcaaggactccgacgtgtacatcaccgataagtgcgtgctggacatgcggagcatggacttcaagagcaactccgccgtggcctggtccaacaagtccgatttcgcctgcgccaacgccttcaacaacagcattatccccgaggacacattcttcccaagccccgagagcagctgcggctttaccagcgagagctaccagcagggcgtgctgagcgccaccatcctgtacgagatcctgctgggcaaggccaccctgtacgccgtgctggtgtctgccctggtgctgatggctatggtcaagcggaaggacagccgggga

SEQ ID NO: 4741 - DNA, 2670 bp, synthetic construct
  source 1..2670: mol_type = other DNA
atggccttaccagtgaccgccttgctcctgccgctggccttgctgctccacgccgccaggccggaagtgcagctggttgaatctggcggaggactggttcagcctggcggatctctgagactgtcttgtgccgccagcggcttcagcttcagcgacttttggatgagctgggtccgacaggcccctggcaaaggacttgaatgggtcgccacaatcagccaggccggcagcgagaaggactacgtggactctgtgaagggcagattcaccatcagccgggacaacgccaagaagtccctgtacctccagatgaacagcctgagagccgaggacaccgccgtgtactattgtgcctctggcgtgtacagcttcgactacagaggccagggcaccctggtcacagtctcttctggtaccggcggaggcggatctggcggcggaggtagcggtggcggaggatctgaattcgacgtggtcatgacacagagcccttctagcctgtctgccagcgtgggcgacagagtgaccatcacctgtaaagccagcgaggacatctacatccggctggcctggtatcagcagaagcctggaaaggcccctaagctgctgatctacgccgccacctctctggaaacaggcgtgccaagcagattttccggcagcggctctggcaccgatttcaccctgacaatatccagcctccagcctgaggacttcgccacctactactgccagcagtattggaccacaccttggacctttggcggaggcaccaaggtggaaatcaaactcgaggacctgaagaacgtgttcccacctgaggtggccgtgttcgagcctagcgaggccgagatcagccacacccagaaagccaccctcgtgtgcctggctaccggcttctaccccgaccatgtggaactgtcttggtgggtcaacggcaaagaggtgcacagcggcgtgtgtaccgacccccagccactgaaagaacagcccgccctgaacgacagccggtactgcctgagcagcagactgagagtgtccgccaccttctggcagaacccccggaaccacttcagatgccaggtgcagttctacggcctgagcgagaacgacgagtggacccaggacagagccaagcccgtgacccagatcgtgtctgccgaagcctggggcagagccgattgcgacgtgaagctggtggaaaagagcttcgagacagacaccaacctgaacttccagaacctgagcgtgatcggcttcagaatcctgctgctgaaagtggccggctttaacctgctgatgaccctgcggctgtggtccagcagggccaagcgatctggatctggagcaacaaacttctcactactcaaacaagcaggtgacgtggaggagaatcccgggcctactagtatggactggatttggcgcatccttttccttgtcggcgctgctaccggcgcgcattccgggccccagctccagctgcaagagtctggacctggcctggtcaagcctagcgagacactgagcctgacctgtaccgtgtccggcgatagcatcagcagcggcgattactactggggctggatcagacagcctcctggcaaaggactggaatggatcggccacatctactacagcggcgtgacctactacaaccccagcctgaagtccagagtgaccatcagcgtggacaccagccggaaccagttctccctgaagctgtctagcgtgacagccgccgataccgccgtgtactactgcaccagagaggacagcagcaactggcggagtagaggccagggaacactggtcacagttagctctggatccggcggaggcggaagtggaggcggaggatctggcggcggaggctctttcgaacaggtgcagctccaagagtctggccctggactggtcaagcctagccagacactgagcctgacctgtaccgtgtccggctacagcatcaccatcgactacacctggaactggatcagacagcctcctggcaaaggactggaatggatcggctacatcacctacagcggcagcaccgactacaaccccagcctgaaaagccgggtgctgatctccgtggacaccagcaagaatcaggtgtccctgaagctgagcagcgtgacagccgctgataccgccgtgtactactgtgccagactgggcagaagatacgccctggattattggggccagggcaccaccgtgacagtgtcatctacgcgtatccagaaccctgatcctgccgtgtaccagctgcgggatagcaagagcagcgacaagagcgtgtgtctgttcaccgacttcgacagccagaccaacgtgtcccagagcaaggactccgacgtgtacatcaccgataagtgcgtgctggacatgcggagcatggacttcaagagcaactccgccgtggcctggtccaacaagtccgatttcgcctgcgccaacgccttcaacaacagcattatccccgaggacacattcttcccaagccccgagagcagctgcggctttaccagcgagagctaccagcagggcgtgctgagcgccaccatcctgtacgagatcctgctgggcaaggccaccctgtacgccgtgctggtgtctgccctggtgctgatggctatggtcaagcggaaggacagccgggga

SEQ ID NO: 4742 - DNA, 2685 bp, synthetic construct
  source 1..2685: mol_type = other DNA
atggccttaccagtgaccgccttgctcctgccgctggccttgctgctccacgccgccaggccggaagtgcagctggttgaatctggcggaggactggttcagcctggcggatctctgagactgtcttgtgccgccagcggcttcagcttcagcgacttttggatgagctgggtccgacaggcccctggcaaaggacttgaatgggtcgccacaatcagccaggccggcagcgagaaggactacgtggactctgtgaagggcagattcaccatcagccgggacaacgccaagaagtccctgtacctccagatgaacagcctgagagccgaggacaccgccgtgtactattgtgcctctggcgtgtacagcttcgactacagaggccagggcaccctggtcacagtctcttctggtaccggcggaggcggatctggcggcggaggtagcggtggcggaggatctgaattcgacatccagatgacccagaccacaagcagcctgtctgccagcctgggcgacagagtgaccatctcttgtagagccagccaggacatcagcaactacctgaactggtatcagcagaaacccgacggcaccgtgaagctgctgatctactacaccagcatcctgcacagcggcgtgcccagcagattttctggctctggcagcggcaccgactacagcctgaccatcagcaatctggaacaagaggacttcgctacctacttctgccagcaaggcaacaccctgccttggacatttggcggaggcaccaagctggaaatcaaagctctcgaggacctgaagaacgtgttcccacctgaggtggccgtgttcgagcctagcgaggccgagatcagccacacccagaaagccaccctcgtgtgcctggctaccggcttctaccccgaccatgtggaactgtcttggtgggtcaacggcaaagaggtgcacagcggcgtgtgtaccgacccccagccactgaaagaacagcccgccctgaacgacagccggtactgcctgagcagcagactgagagtgtccgccaccttctggcagaacccccggaaccacttcagatgccaggtgcagttctacggcctgagcgagaacgacgagtggacccaggacagagccaagcccgtgacccagatcgtgtctgccgaagcctggggcagagccgattgcgacgtgaagctggtggaaaagagcttcgagacagacaccaacctgaacttccagaacctgagcgtgatcggcttcagaatcctgctgctgaaagtggccggctttaacctgctgatgaccctgcggctgtggtccagcagggccaagcgatctggatctggagcaacaaacttctcactactcaaacaagcaggtgacgtggaggagaatcccgggcctactagtatggactggatttggcgcatccttttccttgtcggcgctgctaccggcgcgcattccgggccccagctccagctgcaagagtctggacctggcctggtcaagcctagcgagacactgagcctgacctgtaccgtgtccggcgatagcatcagcagcggcgattactactggggctggatcagacagcctcctggcaaaggactggaatggatcggccacatctactacagcggcgtgacctactacaaccccagcctgaagtccagagtgaccatcagcgtggacaccagccggaaccagttctccctgaagctgtctagcgtgacagccgccgataccgccgtgtactactgcaccagagaggacagcagcaactggcggagtagaggccagggaacactggtcacagttagctctggatccggcggaggcggaagtggaggcggaggatctggcggcggaggctctttcgaagaagtgcaactggttgaatctggcggcggactggttaagcctggcggatctctgaagctgagctgtgccgcctctggcttcgccttcagcatctacgatatgagctgggtccgacagacccctgagaagagactggaatgggtcgcctacatctctagcggcggagggacctactatcccgacacagtgaagggcagattcaccatctccagagacaacgccaagaacaccctgtacctccagatgagcagcctgaagtccgaggacaccgccatgtactactgcgccagacacagcggctatggcacacattggggagtgctgtttgcctactggggccagggaacactggtcacagtttctgctacgcgtatccagaaccctgatcctgccgtgtaccagctgcgggatagcaagagcagcgacaagagcgtgtgtctgttcaccgacttcgacagccagaccaacgtgtcccagagcaaggactccgacgtgtacatcaccgataagtgcgtgctggacatgcggagcatggacttcaagagcaactccgccgtggcctggtccaacaagtccgatttcgcctgcgccaacgccttcaacaacagcattatccccgaggacacattcttcccaagccccgagagcagctgcggctttaccagcgagagctaccagcagggcgtgctgagcgccaccatcctgtacgagatcctgctgggcaaggccaccctgtacgccgtgctggtgtctgccctggtgctgatggctatggtcaagcggaaggacagccgggga

SEQ ID NO: 4743 - DNA, 2715 bp, synthetic construct
  source 1..2715: mol_type = other DNA
atggccttaccagtgaccgccttgctcctgccgctggccttgctgctccacgccgccaggccggaagtgcagctggttgaatctggcggaggactggttcagcctggcggatctctgagactgtcttgtgccgccagcggcttcagcttcagcgacttttggatgagctgggtccgacaggcccctggcaaaggacttgaatgggtcgccacaatcagccaggccggcagcgagaaggactacgtggactctgtgaagggcagattcaccatcagccgggacaacgccaagaagtccctgtacctccagatgaacagcctgagagccgaggacaccgccgtgtactattgtgcctctggcgtgtacagcttcgactacagaggccagggcaccctggtcacagtctcttctggtaccggcggaggcggatctggcggcggaggtagcggtggcggaggatctgaattcgacatcgtgatgacacagagccctgatagcctggccgtgtctctgggagagagagccaccatcaactgcaagagcagccagagcctgctgtacagaagcaaccagaagaactacctggcctggtatcagcagaagcccggccagcctcctaagctgctgatctactgggccagcaccagagaaagcggcgtgcccgatagattttctggctctggcagcggcaccgacttcaccctgacaatttctagcctgcaagccgaggacgtggccgtgtactactgccagcagtattacaactaccccagaaccttcggccagggcaccaaggtggaaatcaagagaacagttctcgaggacctgaagaacgtgttcccacctgaggtggccgtgttcgagcctagcgaggccgagatcagccacacccagaaagccaccctcgtgtgcctggctaccggcttctaccccgaccatgtggaactgtcttggtgggtcaacggcaaagaggtgcacagcggcgtgtgtaccgacccccagccactgaaagaacagcccgccctgaacgacagccggtactgcctgagcagcagactgagagtgtccgccaccttctggcagaacccccggaaccacttcagatgccaggtgcagttctacggcctgagcgagaacgacgagtggacccaggacagagccaagcccgtgacccagatcgtgtctgccgaagcctggggcagagccgattgcgacgtgaagctggtggaaaagagcttcgagacagacaccaacctgaacttccagaacctgagcgtgatcggcttcagaatcctgctgctgaaagtggccggctttaacctgctgatgaccctgcggctgtggtccagcagggccaagcgatctggatctggagcaacaaacttctcactactcaaacaagcaggtgacgtggaggagaatcccgggcctactagtatggactggatttggcgcatccttttccttgtcggcgctgctaccggcgcgcattccgggccccagctccagctgcaagagtctggacctggcctggtcaagcctagcgagacactgagcctgacctgtaccgtgtccggcgatagcatcagcagcggcgattactactggggctggatcagacagcctcctggcaaaggactggaatggatcggccacatctactacagcggcgtgacctactacaaccccagcctgaagtccagagtgaccatcagcgtggacaccagccggaaccagttctccctgaagctgtctagcgtgacagccgccgataccgccgtgtactactgcaccagagaggacagcagcaactggcggagtagaggccagggaacactggtcacagttagctctggatccggcggaggcggaagtggaggcggaggatctggcggcggaggctctttcgaagaagttcagctgcttgaatcaggcggcggactggttcaacctggcggatctctgagactgagctgtgccgccagcggctacagcatcacaagcgactatgcctggaactgggtccgacaggcccctggcaaaggactggaatgggtgtcctacatcagcaacagcggcagcaccagctacaaccccagcctgaagtcccggttcaccatcagcagagacaacagcaagaacaccctgtacctccagatgaacagcctgagagctgaggacaccgccgtgtattattgcgccaaagagcggaactacgactacgacgattactactacgctatggactactggggccagggaaccctggtcacagtctcttctacgcgtatccagaaccctgatcctgccgtgtaccagctgcgggatagcaagagcagcgacaagagcgtgtgtctgttcaccgacttcgacagccagaccaacgtgtcccagagcaaggactccgacgtgtacatcaccgataagtgcgtgctggacatgcggagcatggacttcaagagcaactccgccgtggcctggtccaacaagtccgatttcgcctgcgccaacgccttcaacaacagcattatccccgaggacacattcttcccaagccccgagagcagctgcggctttaccagcgagagctaccagcagggcgtgctgagcgccaccatcctgtacgagatcctgctgggcaaggccaccctgtacgccgtgctggtgtctgccctggtgctgatggctatggtcaagcggaaggacagccgggga

SEQ ID NO: 4744 - DNA, 2694 bp, synthetic construct
  source 1..2694: mol_type = other DNA
atggccttaccagtgaccgccttgctcctgccgctggccttgctgctccacgccgccaggccggaagtgcagctggttgaatctggcggaggactggttcagcctggcggatctctgagactgtcttgtgccgccagcggcttcagcttcagcgacttttggatgagctgggtccgacaggcccctggcaaaggacttgaatgggtcgccacaatcagccaggccggcagcgagaaggactacgtggactctgtgaagggcagattcaccatcagccgggacaacgccaagaagtccctgtacctccagatgaacagcctgagagccgaggacaccgccgtgtactattgtgcctctggcgtgtacagcttcgactacagaggccagggcaccctggtcacagtctcttctggtaccggcggaggcggatctggcggcggaggtagcggtggcggaggatctgaattcgacgtggtcatgacacagagccctctgagcctgcctgtgacacttggacagcctgccagcatcagctgtagaagcagccagagcctgctgcacagcagcggcaatacctacctggaatggtatcagcagaggcccggacagagccccagacctctgatctacaagatcagcacccggttcagcggcgtgcccgatagattttctggctctggcagcggcaccgacttcaccctgaagattagcagagtggaagccgaggacgtgggcgtgtactactgcttccaaggcagccacgtgccatacacctttggcggcggaacaaaggtggaaatcaagagactcgaggacctgaagaacgtgttcccacctgaggtggccgtgttcgagcctagcgaggccgagatcagccacacccagaaagccaccctcgtgtgcctggctaccggcttctaccccgaccatgtggaactgtcttggtgggtcaacggcaaagaggtgcacagcggcgtgtgtaccgacccccagccactgaaagaacagcccgccctgaacgacagccggtactgcctgagcagcagactgagagtgtccgccaccttctggcagaacccccggaaccacttcagatgccaggtgcagttctacggcctgagcgagaacgacgagtggacccaggacagagccaagcccgtgacccagatcgtgtctgccgaagcctggggcagagccgattgcgacgtgaagctggtggaaaagagcttcgagacagacaccaacctgaacttccagaacctgagcgtgatcggcttcagaatcctgctgctgaaagtggccggctttaacctgctgatgaccctgcggctgtggtccagcagggccaagcgatctggatctggagcaacaaacttctcactactcaaacaagcaggtgacgtggaggagaatcccgggcctactagtatggactggatttggcgcatccttttccttgtcggcgctgctaccggcgcgcattccgggccccagctccagctgcaagagtctggacctggcctggtcaagcctagcgagacactgagcctgacctgtaccgtgtccggcgatagcatcagcagcggcgattactactggggctggatcagacagcctcctggcaaaggactggaatggatcggccacatctactacagcggcgtgacctactacaaccccagcctgaagtccagagtgaccatcagcgtggacaccagccggaaccagttctccctgaagctgtctagcgtgacagccgccgataccgccgtgtactactgcaccagagaggacagcagcaactggcggagtagaggccagggaacactggtcacagttagctctggatccggcggaggcggaagtggaggcggaggatctggcggcggaggctctttcgaacaagttcagctggttcagagcggagccgaagtgaagaaacctggggcctctgtgaaggtgtcctgcaaagcctctggcctgaccatcgaggactactacatgcactgggtccgacaggcccctggacaaggacttgaatggatgggctggatcgaccccgagaacggcgatacagagtacggccctaagttccagggcagagtgaccatgaccagagacaccagcatcaacaccgcctacatggaactgagccggctgagatccgatgacaccgccgtgtactattgcgccgtgcacaatgcccactacggcacttggtttgcctattggggccagggcacactggtcaccgttagctctacgcgtatccagaaccctgatcctgccgtgtaccagctgcgggatagcaagagcagcgacaagagcgtgtgtctgttcaccgacttcgacagccagaccaacgtgtcccagagcaaggactccgacgtgtacatcaccgataagtgcgtgctggacatgcggagcatggacttcaagagcaactccgccgtggcctggtccaacaagtccgatttcgcctgcgccaacgccttcaacaacagcattatccccgaggacacattcttcccaagccccgagagcagctgcggctttaccagcgagagctaccagcagggcgtgctgagcgccaccatcctgtacgagatcctgctgggcaaggccaccctgtacgccgtgctggtgtctgccctggtgctgatggctatggtcaagcggaaggacagccgggga

SEQ ID NO: 4745 - DNA, 2670 bp, synthetic construct
  source 1..2670: mol_type = other DNA
atggccttaccagtgaccgccttgctcctgccgctggccttgctgctccacgccgccaggccggaagtgcagctggttgaatctggcggaggactggttcagcctggcggatctctgagactgtcttgtgccgccagcggcttcagcttcagcgacttttggatgagctgggtccgacaggcccctggcaaaggacttgaatgggtcgccacaatcagccaggccggcagcgagaaggactacgtggactctgtgaagggcagattcaccatcagccgggacaacgccaagaagtccctgtacctccagatgaacagcctgagagccgaggacaccgccgtgtactattgtgcctctggcgtgtacagcttcgactacagaggccagggcaccctggtcacagtctcttctggtaccggcggaggcggatctggcggcggaggtagcggtggcggaggatctgaattcgacatccagatgacacagagccctagcagcctgtctgccagcgtgggagacagagtgaccatcacctgtagagccagcgagaacatctacagcaacctggcctggtatcagcagaagcctggcaaggcccctaagctgctgatctacgccgccaccaatctggctgatggcgtgccaagcagattttccggctctggcagcggcaccgatttcaccctgacaatatccagcctccagcctgaggacttcgccacctactactgccagcacttttggggcacccctacattcggccagggcaccaaggtggaaatcaagagaacagttctcgaggacctgaagaacgtgttcccacctgaggtggccgtgttcgagcctagcgaggccgagatcagccacacccagaaagccaccctcgtgtgcctggctaccggcttctaccccgaccatgtggaactgtcttggtgggtcaacggcaaagaggtgcacagcggcgtgtgtaccgacccccagccactgaaagaacagcccgccctgaacgacagccggtactgcctgagcagcagactgagagtgtccgccaccttctggcagaacccccggaaccacttcagatgccaggtgcagttctacggcctgagcgagaacgacgagtggacccaggacagagccaagcccgtgacccagatcgtgtctgccgaagcctggggcagagccgattgcgacgtgaagctggtggaaaagagcttcgagacagacaccaacctgaacttccagaacctgagcgtgatcggcttcagaatcctgctgctgaaagtggccggctttaacctgctgatgaccctgcggctgtggtccagcagggccaagcgatctggatctggagcaacaaacttctcactactcaaacaagcaggtgacgtggaggagaatcccgggcctactagtatggactggatttggcgcatccttttccttgtcggcgctgctaccggcgcgcattccgggccccagctccagctgcaagagtctggacctggcctggtcaagcctagcgagacactgagcctgacctgtaccgtgtccggcgatagcatcagcagcggcgattactactggggctggatcagacagcctcctggcaaaggactggaatggatcggccacatctactacagcggcgtgacctactacaaccccagcctgaagtccagagtgaccatcagcgtggacaccagccggaaccagttctccctgaagctgtctagcgtgacagccgccgataccgccgtgtactactgcaccagagaggacagcagcaactggcggagtagaggccagggaacactggtcacagttagctctggatccggcggaggcggaagtggaggcggaggatctggcggcggaggctctttcgaagaagtgcagctggttgaatcaggtggcggcctggttcaacctggcggatctctgagactgagctgtgccgcctctggcttcagcctgacaaattacggcgtgcactgggtccgacaggcccctggaaaaggactggaatgggtgtccgtgatttggagcggcggcagcaccgattacaacgccgccttcatcagccggttcaccatcagcgccgacaccagcaagaataccgcctacctccagatgaactccctgagagccgaggacaccgccgtgtactattgcgccagagaactgatccacgctatggacaactggggccagggaaccctggtcacagtctcttctacgcgtatccagaaccctgatcctgccgtgtaccagctgcgggatagcaagagcagcgacaagagcgtgtgtctgttcaccgacttcgacagccagaccaacgtgtcccagagcaaggactccgacgtgtacatcaccgataagtgcgtgctggacatgcggagcatggacttcaagagcaactccgccgtggcctggtccaacaagtccgatttcgcctgcgccaacgccttcaacaacagcattatccccgaggacacattcttcccaagccccgagagcagctgcggctttaccagcgagagctaccagcagggcgtgctgagcgccaccatcctgtacgagatcctgctgggcaaggccaccctgtacgccgtgctggtgtctgccctggtgctgatggctatggtcaagcggaaggacagccgggga

SEQ ID NO: 4746 - DNA, 2691 bp, synthetic construct
  source 1..2691: mol_type = other DNA
atggccttaccagtgaccgccttgctcctgccgctggccttgctgctccacgccgccaggccggaagtgcagctggttgaatctggcggaggactggttcagcctggcggatctctgagactgtcttgtgccgccagcggcttcagcttcagcgacttttggatgagctgggtccgacaggcccctggcaaaggacttgaatgggtcgccacaatcagccaggccggcagcgagaaggactacgtggactctgtgaagggcagattcaccatcagccgggacaacgccaagaagtccctgtacctccagatgaacagcctgagagccgaggacaccgccgtgtactattgtgcctctggcgtgtacagcttcgactacagaggccagggcaccctggtcacagtctcttctggtaccggcggaggcggatctggcggcggaggtagcggtggcggaggatctgaattcgacttcgtgatgacacagagccctctgagcctgcctgtgacacctggcgaacctgccagcatcagctgtagaagcagccagagcatcgtgcacagcaacggcaacacctacctggaatggtatctccagaagcctggacagagcccacagctgctgatctacaaggtgtccaacagattcagcggcgtgcccgacagattttctggcagcggctctggcaccgacttcaccctgaagattagcagagtggaagccgaggacgtgggcgtgtactactgcttccaaggctctcacgtgcccctgacctttggacagggcaccaagctggaaatcaagagactcgaggacctgaagaacgtgttcccacctgaggtggccgtgttcgagcctagcgaggccgagatcagccacacccagaaagccaccctcgtgtgcctggctaccggcttctaccccgaccatgtggaactgtcttggtgggtcaacggcaaagaggtgcacagcggcgtgtgtaccgacccccagccactgaaagaacagcccgccctgaacgacagccggtactgcctgagcagcagactgagagtgtccgccaccttctggcagaacccccggaaccacttcagatgccaggtgcagttctacggcctgagcgagaacgacgagtggacccaggacagagccaagcccgtgacccagatcgtgtctgccgaagcctggggcagagccgattgcgacgtgaagctggtggaaaagagcttcgagacagacaccaacctgaacttccagaacctgagcgtgatcggcttcagaatcctgctgctgaaagtggccggctttaacctgctgatgaccctgcggctgtggtccagcagggccaagcgatctggatctggagcaacaaacttctcactactcaaacaagcaggtgacgtggaggagaatcccgggcctactagtatggactggatttggcgcatccttttccttgtcggcgctgctaccggcgcgcattccgggccccagctccagctgcaagagtctggacctggcctggtcaagcctagcgagacactgagcctgacctgtaccgtgtccggcgatagcatcagcagcggcgattactactggggctggatcagacagcctcctggcaaaggactggaatggatcggccacatctactacagcggcgtgacctactacaaccccagcctgaagtccagagtgaccatcagcgtggacaccagccggaaccagttctccctgaagctgtctagcgtgacagccgccgataccgccgtgtactactgcaccagagaggacagcagcaactggcggagtagaggccagggaacactggtcacagttagctctggatccggcggaggcggaagtggaggcggaggatctggcggcggaggctctttcgaagaagtgcagctggttgaaagcggagccgaagtgaagaaacctggggcctctgtgaaggtgtcctgcaaggccagcggctacacctttaccagctactggattcactgggtccgacaggcccctggacaaggacttgagtggatgggcgagaacgacccctccaacggcaggaccaactacaacgagaagttcaagaaccgcgtgaccctgaccgtggacaccagcatctctaccgcctacatggaactgagccggctgagatccgatgacaccgccgtgtactattgcgccagaggacccaactacttttacagcatggactactggggccagggcacaatggtcaccgttagctctacgcgtatccagaaccctgatcctgccgtgtaccagctgcgggatagcaagagcagcgacaagagcgtgtgtctgttcaccgacttcgacagccagaccaacgtgtcccagagcaaggactccgacgtgtacatcaccgataagtgcgtgctggacatgcggagcatggacttcaagagcaactccgccgtggcctggtccaacaagtccgatttcgcctgcgccaacgccttcaacaacagcattatccccgaggacacattcttcccaagccccgagagcagctgcggctttaccagcgagagctaccagcagggcgtgctgagcgccaccatcctgtacgagatcctgctgggcaaggccaccctgtacgccgtgctggtgtctgccctggtgctgatggctatggtcaagcggaaggacagccgggga

SEQ ID NO: 4747 - DNA, 2670 bp, synthetic construct
  source 1..2670: mol_type = other DNA
atggccttaccagtgaccgccttgctcctgccgctggccttgctgctccacgccgccaggccggaagtgcagctggttgaatctggcggaggactggttcagcctggcggatctctgagactgtcttgtgccgccagcggcttcagcttcagcgacttttggatgagctgggtccgacaggcccctggcaaaggacttgaatgggtcgccacaatcagccaggccggcagcgagaaggactacgtggactctgtgaagggcagattcaccatcagccgggacaacgccaagaagtccctgtacctccagatgaacagcctgagagccgaggacaccgccgtgtactattgtgcctctggcgtgtacagcttcgactacagaggccagggcaccctggtcacagtctcttctggtaccggcggaggcggatctggcggcggaggtagcggtggcggaggatctgaattcgacatccagctgactcagagccctagctttctgagcgccagcgtgggcgacagagtgaccatcacatgtagcgccagatccagcatcagcttcatgtactggtatcagcagaagcccggcaaggcccctaagctgctgatctacgacaccagcaatctggcctctggcgtgcccagcagattttctggaagcggcagcggcaccgagttcaccctgacaatctctagcctggaagccgaggatgccgccacctactattgccagcagtggtccagctatcccctgacatttggacagggcaccaagctggaaatcaaactcgaggacctgaagaacgtgttcccacctgaggtggccgtgttcgagcctagcgaggccgagatcagccacacccagaaagccaccctcgtgtgcctggctaccggcttctaccccgaccatgtggaactgtcttggtgggtcaacggcaaagaggtgcacagcggcgtgtgtaccgacccccagccactgaaagaacagcccgccctgaacgacagccggtactgcctgagcagcagactgagagtgtccgccaccttctggcagaacccccggaaccacttcagatgccaggtgcagttctacggcctgagcgagaacgacgagtggacccaggacagagccaagcccgtgacccagatcgtgtctgccgaagcctggggcagagccgattgcgacgtgaagctggtggaaaagagcttcgagacagacaccaacctgaacttccagaacctgagcgtgatcggcttcagaatcctgctgctgaaagtggccggctttaacctgctgatgaccctgcggctgtggtccagcagggccaagcgatctggatctggagcaacaaacttctcactactcaaacaagcaggtgacgtggaggagaatcccgggcctactagtatggactggatttggcgcatccttttccttgtcggcgctgctaccggcgcgcattccgggccccagctccagctgcaagagtctggacctggcctggtcaagcctagcgagacactgagcctgacctgtaccgtgtccggcgatagcatcagcagcggcgattactactggggctggatcagacagcctcctggcaaaggactggaatggatcggccacatctactacagcggcgtgacctactacaaccccagcctgaagtccagagtgaccatcagcgtggacaccagccggaaccagttctccctgaagctgtctagcgtgacagccgccgataccgccgtgtactactgcaccagagaggacagcagcaactggcggagtagaggccagggaacactggtcacagttagctctggatccggcggaggcggaagtggaggcggaggatctggcggcggaggctctttcgaacaggttcagctggttcagtctggggccgaagtgaagaaacctggggcctctgtgaaggtgtcctgcaaggcttccggctacacctttaccggctcttggatgaactgggtccgacaggctcctggacagggactcgaatggatcggcagaatctatcctggcgacggcgagacaaactacaacggcaagttcaaggaccgcgtgacaatcaccgccgacaagagcacaagcaccgcctacatggaactgagcagcctgcggagcgaagataccgccgtgtactactgcgcccggatctacggcaacaacgtgtacttcgatgtgtggggccagggcacaaccgtgacagtctcttctacgcgtatccagaaccctgatcctgccgtgtaccagctgcgggatagcaagagcagcgacaagagcgtgtgtctgttcaccgacttcgacagccagaccaacgtgtcccagagcaaggactccgacgtgtacatcaccgataagtgcgtgctggacatgcggagcatggacttcaagagcaactccgccgtggcctggtccaacaagtccgatttcgcctgcgccaacgccttcaacaacagcattatccccgaggacacattcttcccaagccccgagagcagctgcggctttaccagcgagagctaccagcagggcgtgctgagcgccaccatcctgtacgagatcctgctgggcaaggccaccctgtacgccgtgctggtgtctgccctggtgctgatggctatggtcaagcggaaggacagccgggga

SEQ ID NO: 4748 - DNA, 2694 bp, synthetic construct
  source 1..2694: mol_type = other DNA
atggccttaccagtgaccgccttgctcctgccgctggccttgctgctccacgccgccaggccggaagtgcagctggttgaatctggcggaggactggttcagcctggcggatctctgagactgtcttgtgccgccagcggcttcagcttcagcgacttttggatgagctgggtccgacaggcccctggcaaaggacttgaatgggtcgccacaatcagccaggccggcagcgagaaggactacgtggactctgtgaagggcagattcaccatcagccgggacaacgccaagaagtccctgtacctccagatgaacagcctgagagccgaggacaccgccgtgtactattgtgcctctggcgtgtacagcttcgactacagaggccagggcaccctggtcacagtctcttctggtaccggcggaggcggatctggcggcggaggtagcggtggcggaggatctgaattccagctggtgctgacacagtctccaagcgcctctgccagcctgggatctagcgtgaagctgacctgtacactgagcagcggccacaagaccgacaccatcgactggtatcagcagcagcctggcaaggcccctagatacctgatgaagctggaaggcagcggcagctacaacaaaggctctggcgtgcccgatagattcagcggcagttcttctggcgctgattggtatctgaccatcagcagcctccagagcgaggacgaggccgattactactgcggcacagactaccccggcaactacctgtttggcggcggaacacagctgacagtgcttggcctcgaggacctgaagaacgtgttcccacctgaggtggccgtgttcgagcctagcgaggccgagatcagccacacccagaaagccaccctcgtgtgcctggctaccggcttctaccccgaccatgtggaactgtcttggtgggtcaacggcaaagaggtgcacagcggcgtgtgtaccgacccccagccactgaaagaacagcccgccctgaacgacagccggtactgcctgagcagcagactgagagtgtccgccaccttctggcagaacccccggaaccacttcagatgccaggtgcagttctacggcctgagcgagaacgacgagtggacccaggacagagccaagcccgtgacccagatcgtgtctgccgaagcctggggcagagccgattgcgacgtgaagctggtggaaaagagcttcgagacagacaccaacctgaacttccagaacctgagcgtgatcggcttcagaatcctgctgctgaaagtggccggctttaacctgctgatgaccctgcggctgtggtccagcagggccaagcgatctggatctggagcaacaaacttctcactactcaaacaagcaggtgacgtggaggagaatcccgggcctactagtatggactggatttggcgcatccttttccttgtcggcgctgctaccggcgcgcattccgggccccagctccagctgcaagagtctggacctggcctggtcaagcctagcgagacactgagcctgacctgtaccgtgtccggcgatagcatcagcagcggcgattactactggggctggatcagacagcctcctggcaaaggactggaatggatcggccacatctactacagcggcgtgacctactacaaccccagcctgaagtccagagtgaccatcagcgtggacaccagccggaaccagttctccctgaagctgtctagcgtgacagccgccgataccgccgtgtactactgcaccagagaggacagcagcaactggcggagtagaggccagggaacactggtcacagttagctctggatccggcggaggcggaagtggaggcggaggatctggcggcggaggctctttcgaacaagaacagctggttgaaagcggcggaggactggttcaacctggcggttctctgagactgagctgtgccgccagcggcttcaccttcagcgactactacatgagctggatcagacaggccccaggcaaaggactggaatgggtcgccacaatctaccccagcagcggcaagacctactacgccgattctgccaagggcagactgaccatctccagcgacaacgccaaggacagcctgtacctccagatgaacagcctgagagccgaggacaccgccgtgtactactgcaccagagatagctacgccgacgacgccgctctgtttgacatttggggccagggcaccaccgtgaccgtttcttctacgcgtatccagaaccctgatcctgccgtgtaccagctgcgggatagcaagagcagcgacaagagcgtgtgtctgttcaccgacttcgacagccagaccaacgtgtcccagagcaaggactccgacgtgtacatcaccgataagtgcgtgctggacatgcggagcatggacttcaagagcaactccgccgtggcctggtccaacaagtccgatttcgcctgcgccaacgccttcaacaacagcattatccccgaggacacattcttcccaagccccgagagcagctgcggctttaccagcgagagctaccagcagggcgtgctgagcgccaccatcctgtacgagatcctgctgggcaaggccaccctgtacgccgtgctggtgtctgccctggtgctgatggctatggtcaagcggaaggacagccgggga

SEQ ID NO: 4749 - DNA, 2670 bp, synthetic construct; identical to SEQ ID NO: 4745
  source 1..2670: mol_type = other DNA

SEQ ID NO: 4750 - DNA, 2691 bp, synthetic construct; identical to SEQ ID NO: 4746
  source 1..2691: mol_type = other DNA

SEQ ID NO: 4751 - DNA, 2670 bp, synthetic construct; identical to SEQ ID NO: 4747
  source 1..2670: mol_type = other DNA

SEQ ID NO: 4752 - DNA, 2694 bp, synthetic construct; identical to SEQ ID NO: 4748
  source 1..2694: mol_type = other DNA

SEQ ID NO: 4753 - DNA, 2691 bp, synthetic construct
  source 1..2691: mol_type = other DNA
atggccttaccagtgaccgccttgctcctgccgctggccttgctgctccacgccgccaggccggaagtgcagctggttgaatctggcggaggactggttcagcctggcggatctctgagactgtcttgtgccgccagcggcttcagcttcagcgacttttggatgagctgggtccgacaggcccctggcaaaggacttgaatgggtcgccacaatcagccaggccggcagcgagaaggactacgtggactctgtgaagggcagattcaccatcagccgggacaacgccaagaagtccctgtacctccagatgaacagcctgagagccgaggacaccgccgtgtactattgtgcctctggcgtgtacagcttcgactacagaggccagggcaccctggtcacagtctcttctggtaccggcggaggcggatctggcggcggaggtagcggtggcggaggatctgaattcgatatccagctcactcaaagcccctctagtctctctgcctcagtgggggatcgggtcagttttacttgtcaagcttcacaggatatcaacaacttccttaattggtatcagcagaagccaggaaaagcacccaagctgctcatctatgatgcctcaaatttggagacgggtgttcccagtcgattctctgggtcagggtccgggaccgactttacgtttacgatctcctctctgcagcccgaagacatcgccacatactattgtcaacagtacggcaacttgcctttcacatttgggggcgggactaaggttgaaatcaagaggctcgaggacctgaagaacgtgttcccacctgaggtggccgtgttcgagcctagcgaggccgagatcagccacacccagaaagccaccctcgtgtgcctggctaccggcttctaccccgaccatgtggaactgtcttggtgggtcaacggcaaagaggtgcacagcggcgtgtgtaccgacccccagccactgaaagaacagcccgccctgaacgacagccggtactgcctgagcagcagactgagagtgtccgccaccttctggcagaacccccggaaccacttcagatgccaggtgcagttctacggcctgagcgagaacgacgagtggacccaggacagagccaagcccgtgacccagatcgtgtctgccgaagcctggggcagagccgattgcgacgtgaagctggtggaaaagagcttcgagacagacaccaacctgaacttccagaacctgagcgtgatcggcttcagaatcctgctgctgaaagtggccggctttaacctgctgatgaccctgcggctgtggtccagcagggccaagcgatctggatctggagcaacaaacttctcactactcaaacaagcaggtgacgtggaggagaatcccgggcctactagtatggactggatttggcgcatccttttccttgtcggcgctgctaccggcgcgcattccgggccccagctccagctgcaagagtctggacctggcctggtcaagcctagcgagacactgagcctgacctgtaccgtgtccggcgatagcatcagcagcggcgattactactggggctggatcagacagcctcctggcaaaggactggaatggatcggccacatctactacagcggcgtgacctactacaaccccagcctgaagtccagagtgaccatcagcgtggacaccagccggaaccagttctccctgaagctgtctagcgtgacagccgccgataccgccgtgtactactgcaccagagaggacagcagcaactggcggagtagaggccagggaacactggtcacagttagctctggatccggcggaggcggaagtggaggcggaggatctggcggcggaggctctttcgaacaggtacagctgcaggaatctgggcccggacttgtcaagccaagtcagacactttctcttacatgtaccgtgagcggcggaagtataagcagtggaggcttttactggtcttggatacggcagcacccaggcaaaggcttggagtggattggatacattcatcattcaggatctacacactataatccatcccttaagtcccgggtcaccattagcattgatacgtctaagaatctgttcagtctcaggctgtcctccgtcactgctgccgacacagccgtgtactactgcgcctccttggtttactgcggaggcgactgttatagcggctttgattattgggggcaggggaccctcgtaaccgtgagctctacgcgtatccagaaccctgatcctgccgtgtaccagctgcgggatagcaagagcagcgacaagagcgtgtgtctgttcaccgacttcgacagccagaccaacgtgtcccagagcaaggactccgacgtgtacatcaccgataagtgcgtgctggacatgcggagcatggacttcaagagcaactccgccgtggcctggtccaacaagtccgatttcgcctgcgccaacgccttcaacaacagcattatccccgaggacacattcttcccaagccccgagagcagctgcggctttaccagcgagagctaccagcagggcgtgctgagcgccaccatcctgtacgagatcctgctgggcaaggccaccctgtacgccgtgctggtgtctgccctggtgctgatggctatggtcaagcggaaggacagccgggga

SEQ ID NO: 4754 - DNA, 2679 bp, synthetic construct
  source 1..2679: mol_type = other DNA
atggccttaccagtgaccgccttgctcctgccgctggccttgctgctccacgccgccaggccggaagtgcagctggttgaatctggcggaggactggttcagcctggcggatctctgagactgtcttgtgccgccagcggcttcagcttcagcgacttttggatgagctgggtccgacaggcccctggcaaaggacttgaatgggtcgccacaatcagccaggccggcagcgagaaggactacgtggactctgtgaagggcagattcaccatcagccgggacaacgccaagaagtccctgtacctccagatgaacagcctgagagccgaggacaccgccgtgtactattgtgcctctggcgtgtacagcttcgactacagaggccagggcaccctggtcacagtctcttctggtaccggcggaggcggatctggcggcggaggtagcggtggcggaggatctgaattcgacattcagatgacacagagccctagcagcctgagcgcctctgtgggagacagagtgaccatcacatgcaagagcagccagagcgtgctgtactccagcaatcagaagaactacctggcctggttccagcagaagcctggcaaggctcctaagctgctgatctactgggccagcaccagagaaagcggcgtgccaagcagattttctggcagcggctctggcaccgacttcaccctgacaatatccagcctccagcctgaggacttcgccacctacttttgccaccagtacctgagcagctacacattcggacagggcaccaaggtggaaatcaagcggctcgaggacctgaagaacgtgttcccacctgaggtggccgtgttcgagcctagcgaggccgagatcagccacacccagaaagccaccctcgtgtgcctggctaccggcttctaccccgaccatgtggaactgtcttggtgggtcaacggcaaagaggtgcacagcggcgtgtgtaccgacccccagccactgaaagaacagcccgccctgaacgacagccggtactgcctgagcagcagactgagagtgtccgccaccttctggcagaacccccggaaccacttcagatgccaggtgcagttctacggcctgagcgagaacgacgagtggacccaggacagagccaagcccgtgacccagatcgtgtctgccgaagcctggggcagagccgattgcgacgtgaagctggtggaaaagagcttcgagacagacaccaacctgaacttccagaacctgagcgtgatcggcttcagaatcctgctgctgaaagtggccggctttaacctgctgatgaccctgcggctgtggtccagcagggccaagcgatctggatctggagcaacaaacttctcactactcaaacaagcaggtgacgtggaggagaatcccgggcctactagtatggactggatttggcgcatccttttccttgtcggcgctgctaccggcgcgcattccgggccccagctccagctgcaagagtctggacctggcctggtcaagcctagcgagacactgagcctgacctgtaccgtgtccggcgatagcatcagcagcggcgattactactggggctggatcagacagcctcctggcaaaggactggaatggatcggccacatctactacagcggcgtgacctactacaaccccagcctgaagtccagagtgaccatcagcgtggacaccagccggaaccagttctccctgaagctgtctagcgtgacagccgccgataccgccgtgtactactgcaccagagaggacagcagcaactggcggagtagaggccagggaacactggtcacagttagctctggatccggcggaggcggaagtggaggcggaggatctggcggcggaggctctttcgaagaggtgcagctggttgaatctggcggaggactggttcagcctggcggatctctgagactgtcttgtgccgccagcggctacaccttcaccacctattggatgcactgggtccgacaggcccctggcaaaggacttgagtgggtcggatatatcaggcccagcaccggctacacagagtacaaccagaagttcaaggaccgcttcaccatcagcgccgacaccagcaagaataccgcctacctccagatgaacagcctgagagccgaggacaccgccgtgtactactgtgccagatccagatggctgctggactattggggccagggcacactggttacagtttctacgcgtatccagaaccctgatcctgccgtgtaccagctgcgggatagcaagagcagcgacaagagcgtgtgtctgttcaccgacttcgacagccagaccaacgtgtcccagagcaaggactccgacgtgtacatcaccgataagtgcgtgctggacatgcggagcatggacttcaagagcaactccgccgtggcctggtccaacaagtccgatttcgcctgcgccaacgccttcaacaacagcattatccccgaggacacattcttcccaagccccgagagcagctgcggctttaccagcgagagctaccagcagggcgtgctgagcgccaccatcctgtacgagatcctgctgggcaaggccaccctgtacgccgtgctggtgtctgccctggtgctgatggctatggtcaagcggaaggacagccgggga

SEQ ID NO: 4755 - DNA, 2670 bp, synthetic construct
  source 1..2670: mol_type = other DNA
atggccttaccagtgaccgccttgctcctgccgctggccttgctgctccacgccgccaggccggaagtgcagctggttgaatctggcggaggactggttcagcctggcggatctctgagactgtcttgtgccgccagcggcttcagcttcagcgacttttggatgagctgggtccgacaggcccctggcaaaggacttgaatgggtcgccacaatcagccaggccggcagcgagaaggactacgtggactctgtgaagggcagattcaccatcagccgggacaacgccaagaagtccctgtacctccagatgaacagcctgagagccgaggacaccgccgtgtactattgtgcctctggcgtgtacagcttcgactacagaggccagggcaccctggtcacagtctcttctggtaccggcggaggcggatctggcggcggaggtagcggtggcggaggatctgaattcgacatccagatgacacagagccctagcagcctgtctgccagcgtgggagacagagtgaccatcacctgtagagccagccaggacatcagcaactacctgaactggtatcagcagaagcccggcaaggcccctaagctgctgatctactacaccagcagactgcacagcggcgtgcccagcagattttctggctctggcagcggcaccgacttcaccctgacaatatctagcctccagcctgaggacttcgccacctactattgccagcagggcaacaccctgccttacacatttggacagggcaccaaggtggaaatcaagagactcgaggacctgaagaacgtgttcccacctgaggtggccgtgttcgagcctagcgaggccgagatcagccacacccagaaagccaccctcgtgtgcctggctaccggcttctaccccgaccatgtggaactgtcttggtgggtcaacggcaaagaggtgcacagcggcgtgtgtaccgacccccagccactgaaagaacagcccgccctgaacgacagccggtactgcctgagcagcagactgagagtgtccgccaccttctggcagaacccccggaaccacttcagatgccaggtgcagttctacggcctgagcgagaacgacgagtggacccaggacagagccaagcccgtgacccagatcgtgtctgccgaagcctggggcagagccgattgcgacgtgaagctggtggaaaagagcttcgagacagacaccaacctgaacttccagaacctgagcgtgatcggcttcagaatcctgctgctgaaagtggccggctttaacctgctgatgaccctgcggctgtggtccagcagggccaagcgatctggatctggagcaacaaacttctcactactcaaacaagcaggtgacgtggaggagaatcccgggcctactagtatggactggatttggcgcatccttttccttgtcggcgctgctaccggcgcgcattccgggccccagctccagctgcaagagtctggacctggcctggtcaagcctagcgagacactgagcctgacctgtaccgtgtccggcgatagcatcagcagcggcgattactactggggctggatcagacagcctcctggcaaaggactggaatggatcggccacatctactacagcggcgtgacctactacaaccccagcctgaagtccagagtgaccatcagcgtggacaccagccggaaccagttctccctgaagctgtctagcgtgacagccgccgataccgccgtgtactactgcaccagagaggacagcagcaactggcggagtagaggccagggaacactggtcacagttagctctggatccggcggaggcggaagtggaggcggaggatctggcggcggaggctctttcgaagaagtgcagctggttgaatcaggtggcggcctggttcaacctggcggatctctgagactgagctgtgccgccagcggcttcaccttcagcgactactttatgagctgggtccgacaggcccctggcaaaggacttgaatgggtcgccaccatcagcaatggcggcacctacacttactaccccgacagcgtgaagggcagattcaccatctccagagacaacagcaagaacaccctgtacctccagatgaactccctgagagccgaggacaccgccgtgtactactgcgccagattcgacggctacatcttcgactattggggccagggcaccctggtcacagtctcttctacgcgtatccagaaccctgatcctgccgtgtaccagctgcgggatagcaagagcagcgacaagagcgtgtgtctgttcaccgacttcgacagccagaccaacgtgtcccagagcaaggactccgacgtgtacatcaccgataagtgcgtgctggacatgcggagcatggacttcaagagcaactccgccgtggcctggtccaacaagtccgatttcgcctgcgccaacgccttcaacaacagcattatccccgaggacacattcttcccaagccccgagagcagctgcggctttaccagcgagagctaccagcagggcgtgctgagcgccaccatcctgtacgagatcctgctgggcaaggccaccctgtacgccgtgctggtgtctgccctggtgctgatggctatggtcaagcggaaggacagccgggga

SEQ ID NO: 4756 - DNA, 2685 bp, synthetic construct
  source 1..2685: mol_type = other DNA
atggccttaccagtgaccgccttgctcctgccgctggccttgctgctccacgccgccaggccggaagtgcagctggttgaatctggcggaggactggttcagcctggcggatctctgagactgtcttgtgccgccagcggcttcagcttcagcgacttttggatgagctgggtccgacaggcccctggcaaaggacttgaatgggtcgccacaatcagccaggccggcagcgagaaggactacgtggactctgtgaagggcagattcaccatcagccgggacaacgccaagaagtccctgtacctccagatgaacagcctgagagccgaggacaccgccgtgtactattgtgcctctggcgtgtacagcttcgactacagaggccagggcaccctggtcacagtctcttctggtaccggcggaggcggatctggcggcggaggtagcggtggcggaggatctgaattcgacatccagatgacacagactacatcctccctgtctgcctctctgggagacagagtcaccatcagttgcagggcaagtcaggacattagtaagtacctgaactggtatcagcagaaaccagatggaactgttaaactcctgatctaccatacatcaagattacactcaggagtcccatcaaggttcagtggcagtgggtctggaacagattattctctcaccattagcaacctggagcaagaagatattgccacttacttttgccaacagggtaatacgcttccgtacacgttcggaggggggaccaagctggagatcacactcgagatccagaaccctgatcctgccgtgtaccagctgcgggatagcaagagcagcgacaagagcgtgtgtctgttcaccgacttcgacagccagaccaacgtgtcccagagcaaggactccgacgtgtacatcaccgataagtgcgtgctggacatgcggagcatggacttcaagagcaactccgccgtggcctggtccaacaagtccgatttcgcctgcgccaacgccttcaacaacagcattatccccgaggacacattcttcccaagccccgagagcagctgcggctttaccagcgagagctaccagcagggcgtgctgagcgccaccatcctgtacgagatcctgctgggcaaggccaccctgtacgccgtgctggtgtctgccctggtgctgatggctatggtcaagcggaaggacagccggggacgcgccaagagaagcggatctggcgtgaagcagaccctgaatttcgacctgctgaagctggctggcgacgtggaatccaacccaggccctactagtatggactggatttggcgcatccttttccttgtcggcgctgctaccggcgcgcattccgggccccagctccagctgcaagagtctggacctggcctggtcaagcctagcgagacactgagcctgacctgtaccgtgtccggcgatagcatcagcagcggcgattactactggggctggatcagacagcctcctggcaaaggactggaatggatcggccacatctactacagcggcgtgacctactacaaccccagcctgaagtccagagtgaccatcagcgtggacaccagccggaaccagttctccctgaagctgtctagcgtgacagccgccgataccgccgtgtactactgcaccagagaggacagcagcaactggcggagtagaggccagggaacactggtcacagttagctctggatccggcggaggcggaagtggaggcggaggatctggcggcggaggctctttcgaagtgaaactgcaggagtcaggacctggcctggtggcgccctcacagagcctgtccgtcacatgcactgtctcaggggtctcattacccgactatggtgtaagctggattcgccagcctccacgaaagggtctggagtggctgggagtaatatggggtagtgaaaccacatactataattcagctctcaaatccagactgaccatcatcaaggacaactccaagagccaagttttcttaaaaatgaacagtctgcaaactgatgacacagccatttactactgtgccaaacattattactacggtggtagctatgctatggactactggggccaaggaacctcagtcaccgtctcctcaacgcgtgaggacctgaagaacgtgttcccacctgaggtggccgtgttcgagcctagcgaggccgagatcagccacacccagaaagccaccctcgtgtgcctggctaccggcttctaccccgaccatgtggaactgtcttggtgggtcaacggcaaagaggtgcacagcggcgtgtgtaccgacccccagccactgaaagaacagcccgccctgaacgacagccggtactgcctgagcagcagactgagagtgtccgccaccttctggcagaacccccggaaccacttcagatgccaggtgcagttctacggcctgagcgagaacgacgagtggacccaggacagagccaagcccgtgacccagatcgtgtctgccgaagcctggggcagagccgattgcgacgtgaagctggtggaaaagagcttcgagacagacaccaacctgaacttccagaacctgagcgtgatcggcttcagaatcctgctgctgaaagtggccggctttaacctgctgatgaccctgcggctgtggtccagc

SEQ ID NO: 4757 - DNA, 2688 bp, synthetic construct
  source 1..2688: mol_type = other DNA
atggccttaccagtgaccgccttgctcctgccgctggccttgctgctccacgccgccaggccggaagtgcagctggttgaatctggcggaggactggttcagcctggcggatctctgagactgtcttgtgccgccagcggcttcagcttcagcgacttttggatgagctgggtccgacaggcccctggcaaaggacttgaatgggtcgccacaatcagccaggccggcagcgagaaggactacgtggactctgtgaagggcagattcaccatcagccgggacaacgccaagaagtccctgtacctccagatgaacagcctgagagccgaggacaccgccgtgtactattgtgcctctggcgtgtacagcttcgactacagaggccagggcaccctggtcacagtctcttctggtaccggcggaggcggatctggcggcggaggtagcggtggcggaggatctgaattcgagatcgtgatgacccagagccctgccaccctgtctctgagccctggcgaaagagccaccctgagctgtagagccagccaggacatcagcaagtacctgaactggtatcagcagaagcccggccaggcccccagactgctgatctaccacaccagcagactgcacagcggcatccccgccagattttctggctctggcagcggcaccgactacaccctgacaatcagcagcctccagcccgaggacttcgccgtgtacttctgtcagcaaggcaacaccctgccctacaccttcggccagggcaccaagctggaaatcaagctcgagatccagaaccctgatcctgccgtgtaccagctgcgggatagcaagagcagcgacaagagcgtgtgtctgttcaccgacttcgacagccagaccaacgtgtcccagagcaaggactccgacgtgtacatcaccgataagtgcgtgctggacatgcggagcatggacttcaagagcaactccgccgtggcctggtccaacaagtccgatttcgcctgcgccaacgccttcaacaacagcattatccccgaggacacattcttcccaagccccgagagcagctgcggctttaccagcgagagctaccagcagggcgtgctgagcgccaccatcctgtacgagatcctgctgggcaaggccaccctgtacgccgtgctggtgtctgccctggtgctgatggctatggtcaagcggaaggacagccggggacgcgccaagagaagcggatctggcgtgaagcagaccctgaatttcgacctgctgaagctggctggcgacgtggaatccaacccaggccctactagtatggactggatttggcgcatccttttccttgtcggcgctgctaccggcgcgcattccgggccccagctccagctgcaagagtctggacctggcctggtcaagcctagcgagacactgagcctgacctgtaccgtgtccggcgatagcatcagcagcggcgattactactggggctggatcagacagcctcctggcaaaggactggaatggatcggccacatctactacagcggcgtgacctactacaaccccagcctgaagtccagagtgaccatcagcgtggacaccagccggaaccagttctccctgaagctgtctagcgtgacagccgccgataccgccgtgtactactgcaccagagaggacagcagcaactggcggagtagaggccagggaacactggtcacagttagctctggatccggcggaggcggaagtggaggcggaggatctggcggcggaggctctttcgaacaggtgcaactccaggaatctggccctggcctcgtgaagcccagcgagacactgagcctgacctgtaccgtgtccggcgtgtccctgcctgactatggcgtgtcctggatcagacagccccctggcaagggcctggaatggatcggagtgatttggggcagcgaaaccacctactacaacagctccctgaagtccagagtgaccatctccaaggacaactccaagaaccaggtgtccctgaagctgagcagcgtgacagccgccgacaccgccgtgtattactgcgccaagcactactactacggcggcagctacgctatggactactggggccagggaaccctcgtgaccgtgtctagtacgcgtgaggacctgaagaacgtgttcccacctgaggtggccgtgttcgagcctagcgaggccgagatcagccacacccagaaagccaccctcgtgtgcctggctaccggcttctaccccgaccatgtggaactgtcttggtgggtcaacggcaaagaggtgcacagcggcgtgtgtaccgacccccagccactgaaagaacagcccgccctgaacgacagccggtactgcctgagcagcagactgagagtgtccgccaccttctggcagaacccccggaaccacttcagatgccaggtgcagttctacggcctgagcgagaacgacgagtggacccaggacagagccaagcccgtgacccagatcgtgtctgccgaagcctggggcagagccgattgcgacgtgaagctggtggaaaagagcttcgagacagacaccaacctgaacttccagaacctgagcgtgatcggcttcagaatcctgctgctgaaagtggccggctttaacctgctgatgaccctgcggctgtggtccagc

SEQ ID NO: 4758 - DNA, 2691 bp, synthetic construct
  source 1..2691: mol_type = other DNA
atggccttaccagtgaccgccttgctcctgccgctggccttgctgctccacgccgccaggccggaagtgcagctggttgaatctggcggaggactggttcagcctggcggatctctgagactgtcttgtgccgccagcggcttcagcttcagcgacttttggatgagctgggtccgacaggcccctggcaaaggacttgaatgggtcgccacaatcagccaggccggcagcgagaaggactacgtggactctgtgaagggcagattcaccatcagccgggacaacgccaagaagtccctgtacctccagatgaacagcctgagagccgaggacaccgccgtgtactattgtgcctctggcgtgtacagcttcgactacagaggccagggcaccctggtcacagtctcttctggtaccggcggaggcggatctggcggcggaggtagcggtggcggaggatctgaattcgacgagatcgtgctgacacagagccccgccaccctgtcactgtctccaggcgaaagagccaccctgagctgtagcgccagcagcagcgtgtcctacatgcactggtatcagcagaagcccggccaggcccccagactgctgatctacgataccagcaagctggcctccggcatccccgccagattttctggcagcggctccggcaccgacttcaccctgacaatcagcagcctggaacccgaggacgtggccgtgtactactgttttcaaggcagcgtgtaccccttcaccttcggccagggcaccaagctggaaatcaagagactcgagatccagaaccctgatcctgccgtgtaccagctgcgggatagcaagagcagcgacaagagcgtgtgtctgttcaccgacttcgacagccagaccaacgtgtcccagagcaaggactccgacgtgtacatcaccgataagtgcgtgctggacatgcggagcatggacttcaagagcaactccgccgtggcctggtccaacaagtccgatttcgcctgcgccaacgccttcaacaacagcattatccccgaggacacattcttcccaagccccgagagcagctgcggctttaccagcgagagctaccagcagggcgtgctgagcgccaccatcctgtacgagatcctgctgggcaaggccaccctgtacgccgtgctggtgtctgccctggtgctgatggctatggtcaagcggaaggacagccggggacgcgccaagagaagcggatctggcgtgaagcagaccctgaatttcgacctgctgaagctggctggcgacgtggaatccaacccaggccctactagtatggactggatttggcgcatccttttccttgtcggcgctgctaccggcgcgcattccgggccccagctccagctgcaagagtctggacctggcctggtcaagcctagcgagacactgagcctgacctgtaccgtgtccggcgatagcatcagcagcggcgattactactggggctggatcagacagcctcctggcaaaggactggaatggatcggccacatctactacagcggcgtgacctactacaaccccagcctgaagtccagagtgaccatcagcgtggacaccagccggaaccagttctccctgaagctgtctagcgtgacagccgccgataccgccgtgtactactgcaccagagaggacagcagcaactggcggagtagaggccagggaacactggtcacagttagctctggatccggcggaggcggaagtggaggcggaggatctggcggcggaggctctttcgaacaggtgcagctccaggaatctggccctggcctcgtgaagcctagccagaccctgagcctgacctgtaccgtgtctggcggcagcatcagcacaagcggcatgggcgtgggctggatcagacagcaccctggcaagggcctggaatggatcggccacatttggtgggacgacgacaagcggtacaaccccgccctgaagtccagagtgaccatcagcgtggacaccagcaagaaccagttcagcctgaagctgagcagcgtgacagccgccgataccgccgtgtattattgcgcccggatggaactgtggtcctactacttcgactactggggccagggaaccctcgtgaccgtgtctagtacgcgtgaggacctgaagaacgtgttcccacctgaggtggccgtgttcgagcctagcgaggccgagatcagccacacccagaaagccaccctcgtgtgcctggctaccggcttctaccccgaccatgtggaactgtcttggtgggtcaacggcaaagaggtgcacagcggcgtgtgtaccgacccccagccactgaaagaacagcccgccctgaacgacagccggtactgcctgagcagcagactgagagtgtccgccaccttctggcagaacccccggaaccacttcagatgccaggtgcagttctacggcctgagcgagaacgacgagtggacccaggacagagccaagcccgtgacccagatcgtgtctgccgaagcctggggcagagccgattgcgacgtgaagctggtggaaaagagcttcgagacagacaccaacctgaacttccagaacctgagcgtgatcggcttcagaatcctgctgctgaaagtggccggctttaacctgctgatgaccctgcggctgtggtccagc

SEQ ID NO: 4759 - DNA, 2685 bp, synthetic construct
  source 1..2685: mol_type = other DNA
atggccttaccagtgaccgccttgctcctgccgctggccttgctgctccacgccgccaggccggaagtgcagctggttgaatctggcggaggactggttcagcctggcggatctctgagactgtcttgtgccgccagcggcttcagcttcagcgacttttggatgagctgggtccgacaggcccctggcaaaggacttgaatgggtcgccacaatcagccaggccggcagcgagaaggactacgtggactctgtgaagggcagattcaccatcagccgggacaacgccaagaagtccctgtacctccagatgaacagcctgagagccgaggacaccgccgtgtactattgtgcctctggcgtgtacagcttcgactacagaggccagggcaccctggtcacagtctcttctggtaccggcggaggcggatctggcggcggaggtagcggtggcggaggatctgaattcgactacatccacgtgacacagagccctagcagcctgtccgtgtccatcggcgatagagtgaccatcaactgccagacctctcaaggcgtgggcagcgacctgcactggtatcagcacaaacctggcagagcccctaagctgctgatccaccatgccagctctgtggaagatggcgtgcccagcagattttccggcaccggatttcacaccagcttcaacctgacaatcaacgacctccaggccgacgacatcggcacctactactgtcaagtgctccagagcttcggcagaggcagcagactggatacaaaactcgagatccagaaccctgatcctgccgtgtaccagctgcgggatagcaagagcagcgacaagagcgtgtgtctgttcaccgacttcgacagccagaccaacgtgtcccagagcaaggactccgacgtgtacatcaccgataagtgcgtgctggacatgcggagcatggacttcaagagcaactccgccgtggcctggtccaacaagtccgatttcgcctgcgccaacgccttcaacaacagcattatccccgaggacacattcttcccaagccccgagagcagctgcggctttaccagcgagagctaccagcagggcgtgctgagcgccaccatcctgtacgagatcctgctgggcaaggccaccctgtacgccgtgctggtgtctgccctggtgctgatggctatggtcaagcggaaggacagccggggacgcgccaagagaagcggatctggcgtgaagcagaccctgaatttcgacctgctgaagctggctggcgacgtggaatccaacccaggccctactagtatggactggatttggcgcatccttttccttgtcggcgctgctaccggcgcgcattccgggccccagctccagctgcaagagtctggacctggcctggtcaagcctagcgagacactgagcctgacctgtaccgtgtccggcgatagcatcagcagcggcgattactactggggctggatcagacagcctcctggcaaaggactggaatggatcggccacatctactacagcggcgtgacctactacaaccccagcctgaagtccagagtgaccatcagcgtggacaccagccggaaccagttctccctgaagctgtctagcgtgacagccgccgataccgccgtgtactactgcaccagagaggacagcagcaactggcggagtagaggccagggaacactggtcacagttagctctggatccggcggaggcggaagtggaggcggaggatctggcggcggaggctctttcgaaagggcacacctggtgcagtctggcaccgccatgaagaaacctggcgcttccgtcagagtgtcctgtcagacaagcggctacaccttcacagcccacatcctgttctggttcagacaggccccaggcagaggactggaatgggtcggatggatcaagccccagtacggggccgtgaatttcggcggaggcttcagagacagagtgaccctgaccagggacgtgtaccgggaaatcgcctacatggacatccggggcctgaagcctgatgacaccgccgtgtactactgcgccagggatagaagctacggcgacagctcttgggctctcgatgcttggggacagggcacaacagtggtggtgtctgctacgcgtgaggacctgaagaacgtgttcccacctgaggtggccgtgttcgagcctagcgaggccgagatcagccacacccagaaagccaccctcgtgtgcctggctaccggcttctaccccgaccatgtggaactgtcttggtgggtcaacggcaaagaggtgcacagcggcgtgtgtaccgacccccagccactgaaagaacagcccgccctgaacgacagccggtactgcctgagcagcagactgagagtgtccgccaccttctggcagaacccccggaaccacttcagatgccaggtgcagttctacggcctgagcgagaacgacgagtggacccaggacagagccaagcccgtgacccagatcgtgtctgccgaagcctggggcagagccgattgcgacgtgaagctggtggaaaagagcttcgagacagacaccaacctgaacttccagaacctgagcgtgatcggcttcagaatcctgctgctgaaagtggccggctttaacctgctgatgaccctgcggctgtggtccagc

SEQ ID NO: 4760 - DNA, 2715 bp, synthetic construct
  source 1..2715: mol_type = other DNA
atggccttaccagtgaccgccttgctcctgccgctggccttgctgctccacgccgccaggccggaagtgcagctggttgaatctggcggaggactggttcagcctggcggatctctgagactgtcttgtgccgccagcggcttcagcttcagcgacttttggatgagctgggtccgacaggcccctggcaaaggacttgaatgggtcgccacaatcagccaggccggcagcgagaaggactacgtggactctgtgaagggcagattcaccatcagccgggacaacgccaagaagtccctgtacctccagatgaacagcctgagagccgaggacaccgccgtgtactattgtgcctctggcgtgtacagcttcgactacagaggccagggcaccctggtcacagtctcttctggtaccggcggaggcggatctggcggcggaggtagcggtggcggaggatctgaattcgacgtgcagatgatccagacccccgatagcctggccgtgtccctgggacagagagccaccatctcttgcagagccagcgagagcgtggacaactacggcatcagcttcatgcactggtatcagcagaagcccggccagagccccaagctgctgatctacagagcctccaacctggaaagcggcatccccgccagattttccggcagcggcagcagaaccgacttcaccctgaccatcaaccccgtggaaaccgacgacgtggcaacctactactgccagcagaacaacaaggacccccccacctttggcggaggcaccaagctggaaatcaagctcgagatccagaaccctgatcctgccgtgtaccagctgcgggatagcaagagcagcgacaagagcgtgtgtctgttcaccgacttcgacagccagaccaacgtgtcccagagcaaggactccgacgtgtacatcaccgataagtgcgtgctggacatgcggagcatggacttcaagagcaactccgccgtggcctggtccaacaagtccgatttcgcctgcgccaacgccttcaacaacagcattatccccgaggacacattcttcccaagccccgagagcagctgcggctttaccagcgagagctaccagcagggcgtgctgagcgccaccatcctgtacgagatcctgctgggcaaggccaccctgtacgccgtgctggtgtctgccctggtgctgatggctatggtcaagcggaaggacagccggggacgcgccaagagaagcggatctggcgtgaagcagaccctgaatttcgacctgctgaagctggctggcgacgtggaatccaacccaggccctactagtatggactggatttggcgcatccttttccttgtcggcgctgctaccggcgcgcattccgggccccagctccagctgcaagagtctggacctggcctggtcaagcctagcgagacactgagcctgacctgtaccgtgtccggcgatagcatcagcagcggcgattactactggggctggatcagacagcctcctggcaaaggactggaatggatcggccacatctactacagcggcgtgacctactacaaccccagcctgaagtccagagtgaccatcagcgtggacaccagccggaaccagttctccctgaagctgtctagcgtgacagccgccgataccgccgtgtactactgcaccagagaggacagcagcaactggcggagtagaggccagggaacactggtcacagttagctctggatccggcggaggcggaagtggaggcggaggatctggcggcggaggctctttcgaagggggaggcggctctcaggtgcaactccagcagtctggcgctgagcttgtgaagcctggggccagcgtgaagattagctgcaaggccagcggctacgccttcagcagctactggatgaactgggtcaagcagcggcctggcaagggcctggaatggatcggccaaatctaccccggcgacggcgacaccacctacaacggcaagttcaagggcaaggccaccctgacagccgacaagagcagcagcaccgtgtacatgcaactgaacagcctgaccagcgaggacagcgccgtgtacttctgcgtgcggtactactacggcagctccggctacttcgactattggggccagggcaccacactgaccgtgtcctctacgcgtgaggacctgaagaacgtgttcccacctgaggtggccgtgttcgagcctagcgaggccgagatcagccacacccagaaagccaccctcgtgtgcctggctaccggcttctaccccgaccatgtggaactgtcttggtgggtcaacggcaaagaggtgcacagcggcgtgtgtaccgacccccagccactgaaagaacagcccgccctgaacgacagccggtactgcctgagcagcagactgagagtgtccgccaccttctggcagaacccccggaaccacttcagatgccaggtgcagttctacggcctgagcgagaacgacgagtggacccaggacagagccaagcccgtgacccagatcgtgtctgccgaagcctggggcagagccgattgcgacgtgaagctggtggaaaagagcttcgagacagacaccaacctgaacttccagaacctgagcgtgatcggcttcagaatcctgctgctgaaagtggccggctttaacctgctgatgaccctgcggctgtggtccagc

SEQ ID NO: 4761 - DNA, 2688 bp, synthetic construct
  source 1..2688: mol_type = other DNA
atggccttaccagtgaccgccttgctcctgccgctggccttgctgctccacgccgccaggccggaagtgcagctggttgaatctggcggaggactggttcagcctggcggatctctgagactgtcttgtgccgccagcggcttcagcttcagcgacttttggatgagctgggtccgacaggcccctggcaaaggacttgaatgggtcgccacaatcagccaggccggcagcgagaaggactacgtggactctgtgaagggcagattcaccatcagccgggacaacgccaagaagtccctgtacctccagatgaacagcctgagagccgaggacaccgccgtgtactattgtgcctctggcgtgtacagcttcgactacagaggccagggcaccctggtcacagtctcttctggtaccggcggaggcggatctggcggcggaggtagcggtggcggaggatctgaattcgacgtgcagatgatccagacccccagcagcctgtctgccagcctgggcgatagagtgaccatcagctgtcgggccagccaggacatcggcaactacctgaactggtatcagcagaaacccgacggcaccgtgaagctgctgatctactacaccagcagactgcacagcggcgtgcccagcagattttctggcagcggctctggcaccgagtacagcctgaccatctccaacctggaacaggaagatattgctacctacttctgtcagcaaggcagcgccctgccccctacatttggcggcggaacaaagctggaaatcaacctcgagatccagaaccctgatcctgccgtgtaccagctgcgggatagcaagagcagcgacaagagcgtgtgtctgttcaccgacttcgacagccagaccaacgtgtcccagagcaaggactccgacgtgtacatcaccgataagtgcgtgctggacatgcggagcatggacttcaagagcaactccgccgtggcctggtccaacaagtccgatttcgcctgcgccaacgccttcaacaacagcattatccccgaggacacattcttcccaagccccgagagcagctgcggctttaccagcgagagctaccagcagggcgtgctgagcgccaccatcctgtacgagatcctgctgggcaaggccaccctgtacgccgtgctggtgtctgccctggtgctgatggctatggtcaagcggaaggacagccggggacgcgccaagagaagcggatctggcgtgaagcagaccctgaatttcgacctgctgaagctggctggcgacgtggaatccaacccaggccctactagtatggactggatttggcgcatccttttccttgtcggcgctgctaccggcgcgcattccgggccccagctccagctgcaagagtctggacctggcctggtcaagcctagcgagacactgagcctgacctgtaccgtgtccggcgatagcatcagcagcggcgattactactggggctggatcagacagcctcctggcaaaggactggaatggatcggccacatctactacagcggcgtgacctactacaaccccagcctgaagtccagagtgaccatcagcgtggacaccagccggaaccagttctccctgaagctgtctagcgtgacagccgccgataccgccgtgtactactgcaccagagaggacagcagcaactggcggagtagaggccagggaacactggtcacagttagctctggatccggcggaggcggaagtggaggcggaggatctggcggcggaggctctttcgaagctctccagctccagcagtctggcgcagaactcgtgcggcctggcgcttctgtgaccctgagctgtaaagccagcggctacaccttcaccgactacgagatgcactgggtcaagcagacccctgtgcacggcctggaatggatcggagccatcgaccctgagacaggcggcaccgcctacaaccagaagttcgagggcaaggccatcctgaccgccgacaagagcagcagcacagcctacatggaactgcggagcctgacctccgaggacagccccgtgtactactgtgccagacggcggtactacggcagcagctccttcgactattggggccagggcaccaccctgaccgtgtctagtacgcgtgaggacctgaagaacgtgttcccacctgaggtggccgtgttcgagcctagcgaggccgagatcagccacacccagaaagccaccctcgtgtgcctggctaccggcttctaccccgaccatgtggaactgtcttggtgggtcaacggcaaagaggtgcacagcggcgtgtgtaccgacccccagccactgaaagaacagcccgccctgaacgacagccggtactgcctgagcagcagactgagagtgtccgccaccttctggcagaacccccggaaccacttcagatgccaggtgcagttctacggcctgagcgagaacgacgagtggacccaggacagagccaagcccgtgacccagatcgtgtctgccgaagcctggggcagagccgattgcgacgtgaagctggtggaaaagagcttcgagacagacaccaacctgaacttccagaacctgagcgtgatcggcttcagaatcctgctgctgaaagtggccggctttaacctgctgatgaccctgcggctgtggtccagc

SEQ ID NO: 4762 - DNA, 2700 bp, synthetic construct
  source 1..2700: mol_type = other DNA
atggccttaccagtgaccgccttgctcctgccgctggccttgctgctccacgccgccaggccggaagtgcagctggttgaatctggcggaggactggttcagcctggcggatctctgagactgtcttgtgccgccagcggcttcagcttcagcgacttttggatgagctgggtccgacaggcccctggcaaaggacttgaatgggtcgccacaatcagccaggccggcagcgagaaggactacgtggactctgtgaagggcagattcaccatcagccgggacaacgccaagaagtccctgtacctccagatgaacagcctgagagccgaggacaccgccgtgtactattgtgcctctggcgtgtacagcttcgactacagaggccagggcaccctggtcacagtctcttctggtaccggcggaggcggatctggcggcggaggtagcggtggcggaggatctgaattcgacatcgtcctgacccagtccccagccagcctggcggtgtccctgggtcaacgagctaccatttcctgcagagcctctaagtccgtatccacttccggctatagttacctgcattggtaccaacagaaaccagggcagccacccaagctgctcatctatctggcctcaaacctggagtccggcgtgcccgccagattctccggaagtgggagcggcaccgactttacattgaacatccacccagtcgaagaggaagatgctgccacttattactgtcagcactccagggagctgccatttacatttggctctggcacaaaactggagatcaaactcgagatccagaaccctgatcctgccgtgtaccagctgcgggatagcaagagcagcgacaagagcgtgtgtctgttcaccgacttcgacagccagaccaacgtgtcccagagcaaggactccgacgtgtacatcaccgataagtgcgtgctggacatgcggagcatggacttcaagagcaactccgccgtggcctggtccaacaagtccgatttcgcctgcgccaacgccttcaacaacagcattatccccgaggacacattcttcccaagccccgagagcagctgcggctttaccagcgagagctaccagcagggcgtgctgagcgccaccatcctgtacgagatcctgctgggcaaggccaccctgtacgccgtgctggtgtctgccctggtgctgatggctatggtcaagcggaaggacagccggggacgcgccaagagaagcggatctggcgtgaagcagaccctgaatttcgacctgctgaagctggctggcgacgtggaatccaacccaggccctactagtatggactggatttggcgcatccttttccttgtcggcgctgctaccggcgcgcattccgggccccagctccagctgcaagagtctggacctggcctggtcaagcctagcgagacactgagcctgacctgtaccgtgtccggcgatagcatcagcagcggcgattactactggggctggatcagacagcctcctggcaaaggactggaatggatcggccacatctactacagcggcgtgacctactacaaccccagcctgaagtccagagtgaccatcagcgtggacaccagccggaaccagttctccctgaagctgtctagcgtgacagccgccgataccgccgtgtactactgcaccagagaggacagcagcaactggcggagtagaggccagggaacactggtcacagttagctctggatccggcggaggcggaagtggaggcggaggatctggcggcggaggctctttcgaacaggttcagctggtcgagtccgggggaggtctggtacagccgggtggcagcctcaagctgtcatgtgccgcatctggttttgactttagcaggtattggatgagctgggtccgccaggccccgggcaagggacttgagtggattggagaaataaaccctacttccagcacaatcaacttcacaccttctttgaaagataaggtttttatctctcgggataacgctaaaaacacactgtacttgcagatgtctaaggtgcgaagcgaagacaccgccctctattattgcgcccggggtaattactaccgctatggggatgcgatggactattgggggcaaggtacctccgtcacggtctcaacgcgtgaggacctgaagaacgtgttcccacctgaggtggccgtgttcgagcctagcgaggccgagatcagccacacccagaaagccaccctcgtgtgcctggctaccggcttctaccccgaccatgtggaactgtcttggtgggtcaacggcaaagaggtgcacagcggcgtgtgtaccgacccccagccactgaaagaacagcccgccctgaacgacagccggtactgcctgagcagcagactgagagtgtccgccaccttctggcagaacccccggaaccacttcagatgccaggtgcagttctacggcctgagcgagaacgacgagtggacccaggacagagccaagcccgtgacccagatcgtgtctgccgaagcctggggcagagccgattgcgacgtgaagctggtggaaaagagcttcgagacagacaccaacctgaacttccagaacctgagcgtgatcggcttcagaatcctgctgctgaaagtggccggctttaacctgctgatgaccctgcggctgtggtccagc

SEQ ID NO: 4763 - DNA, 2694 bp, synthetic construct
  source 1..2694: mol_type = other DNA
atggccttaccagtgaccgccttgctcctgccgctggccttgctgctccacgccgccaggccggaagtgcagctggttgaatctggcggaggactggttcagcctggcggatctctgagactgtcttgtgccgccagcggcttcagcttcagcgacttttggatgagctgggtccgacaggcccctggcaaaggacttgaatgggtcgccacaatcagccaggccggcagcgagaaggactacgtggactctgtgaagggcagattcaccatcagccgggacaacgccaagaagtccctgtacctccagatgaacagcctgagagccgaggacaccgccgtgtactattgtgcctctggcgtgtacagcttcgactacagaggccagggcaccctggtcacagtctcttctggtaccggcggaggcggatctggcggcggaggtagcggtggcggaggatctgaattcgacatccagatgacccagagccctagctcactgagcgccagcgtgggcgacagggtgaccattacctgctccgccagccaggacatcagcaactacctgaactggtaccagcagaagcccggcaaggcccccaagctgctgatctactacacctccaacctgcactccggcgtgcccagcaggttcagcggaagcggcagcggcaccgatttcaccctgaccatctccagcctgcagcccgaggacttcgccacctactactgccagcagtacaggaagctcccctggactttcggccagggcaccaaactggagatcaagcgtctcgagatccagaaccctgatcctgccgtgtaccagctgcgggatagcaagagcagcgacaagagcgtgtgtctgttcaccgacttcgacagccagaccaacgtgtcccagagcaaggactccgacgtgtacatcaccgataagtgcgtgctggacatgcggagcatggacttcaagagcaactccgccgtggcctggtccaacaagtccgatttcgcctgcgccaacgccttcaacaacagcattatccccgaggacacattcttcccaagccccgagagcagctgcggctttaccagcgagagctaccagcagggcgtgctgagcgccaccatcctgtacgagatcctgctgggcaaggccaccctgtacgccgtgctggtgtctgccctggtgctgatggctatggtcaagcggaaggacagccggggacgcgccaagagaagcggatctggcgtgaagcagaccctgaatttcgacctgctgaagctggctggcgacgtggaatccaacccaggccctactagtatggactggatttggcgcatccttttccttgtcggcgctgctaccggcgcgcattccgggccccagctccagctgcaagagtctggacctggcctggtcaagcctagcgagacactgagcctgacctgtaccgtgtccggcgatagcatcagcagcggcgattactactggggctggatcagacagcctcctggcaaaggactggaatggatcggccacatctactacagcggcgtgacctactacaaccccagcctgaagtccagagtgaccatcagcgtggacaccagccggaaccagttctccctgaagctgtctagcgtgacagccgccgataccgccgtgtactactgcaccagagaggacagcagcaactggcggagtagaggccagggaacactggtcacagttagctctggatccggcggaggcggaagtggaggcggaggatctggcggcggaggctctttcgaacaggtgcagctggtccagagcggcgccgaagtgaagaagcccggcagctccgtgaaagtgagctgcaaggccagcggcggcaccttcagcaactactggatgcactgggtgaggcaggcccccggacagggcctggagtggatgggcgccacctacaggggccacagcgacacctactacaaccagaagttcaagggccgggtgaccatcaccgccgacaagagcaccagcaccgcctacatggaactgagcagcctcaggagcgaggacaccgctgtgtattactgcgccaggggcgccatctacgacggctacgacgtgctggacaactggggccagggcacactggtgaccgtgtccagcacgcgtgaggacctgaagaacgtgttcccacctgaggtggccgtgttcgagcctagcgaggccgagatcagccacacccagaaagccaccctcgtgtgcctggctaccggcttctaccccgaccatgtggaactgtcttggtgggtcaacggcaaagaggtgcacagcggcgtgtgtaccgacccccagccactgaaagaacagcccgccctgaacgacagccggtactgcctgagcagcagactgagagtgtccgccaccttctggcagaacccccggaaccacttcagatgccaggtgcagttctacggcctgagcgagaacgacgagtggacccaggacagagccaagcccgtgacccagatcgtgtctgccgaagcctggggcagagccgattgcgacgtgaagctggtggaaaagagcttcgagacagacaccaacctgaacttccagaacctgagcgtgatcggcttcagaatcctgctgctgaaagtggccggctttaacctgctgatgaccctgcggctgtggtccagc

SEQ ID NO: 4764 - DNA, 2694 bp, synthetic construct
  source 1..2694: mol_type = other DNA
atggccttaccagtgaccgccttgctcctgccgctggccttgctgctccacgccgccaggccggaagtgcagctggttgaatctggcggaggactggttcagcctggcggatctctgagactgtcttgtgccgccagcggcttcagcttcagcgacttttggatgagctgggtccgacaggcccctggcaaaggacttgaatgggtcgccacaatcagccaggccggcagcgagaaggactacgtggactctgtgaagggcagattcaccatcagccgggacaacgccaagaagtccctgtacctccagatgaacagcctgagagccgaggacaccgccgtgtactattgtgcctctggcgtgtacagcttcgactacagaggccagggcaccctggtcacagtctcttctggtaccggcggaggcggatctggcggcggaggtagcggtggcggaggatctgaattcgacatcgtgctgacacagagccctgccaccctgtctctgagccctggcgatagagccaccatcagctgtagagccagcgagagcgtgaccatcctgggcagccacctgatctactggtatcagcagaagcccggccagccccccagactgctgattcagctggcctccaatgtgcagaccggcgtgccagccagattttccggcagcggcagcagaaccgacttcaccctgaccatcagcagcgtggaacccgaggacttcgccgtgtactactgcctccagagccggaccatccccagaacattcggccagggcaccaagctggaaatcaagagactcgagatccagaaccctgatcctgccgtgtaccagctgcgggatagcaagagcagcgacaagagcgtgtgtctgttcaccgacttcgacagccagaccaacgtgtcccagagcaaggactccgacgtgtacatcaccgataagtgcgtgctggacatgcggagcatggacttcaagagcaactccgccgtggcctggtccaacaagtccgatttcgcctgcgccaacgccttcaacaacagcattatccccgaggacacattcttcccaagccccgagagcagctgcggctttaccagcgagagctaccagcagggcgtgctgagcgccaccatcctgtacgagatcctgctgggcaaggccaccctgtacgccgtgctggtgtctgccctggtgctgatggctatggtcaagcggaaggacagccggggacgcgccaagagaagcggatctggcgtgaagcagaccctgaatttcgacctgctgaagctggctggcgacgtggaatccaacccaggccctactagtatggactggatttggcgcatccttttccttgtcggcgctgctaccggcgcgcattccgggccccagctccagctgcaagagtctggacctggcctggtcaagcctagcgagacactgagcctgacctgtaccgtgtccggcgatagcatcagcagcggcgattactactggggctggatcagacagcctcctggcaaaggactggaatggatcggccacatctactacagcggcgtgacctactacaaccccagcctgaagtccagagtgaccatcagcgtggacaccagccggaaccagttctccctgaagctgtctagcgtgacagccgccgataccgccgtgtactactgcaccagagaggacagcagcaactggcggagtagaggccagggaacactggtcacagttagctctggatccggcggaggcggaagtggaggcggaggatctggcggcggaggctctttcgaacaggtgcagctggtgcagtctggccccgaagtgaagaaacccggcgagtccgtgaagatcagctgcaaggccagcggctacaccttccggcactacagcatgaactgggtcaagcaggccccaggccagggcctgaagtggatgggcagaatcaacaccgagagcggcgtgcccatctacgccgacgacttcaagggccggttcagcttcaccgtggacaccagcgccagcaccgcctacctggaaatctccagcctgaccagcgaggataccgccgtgtatttctgctccaacgactacctgtacagcctggatttctggggccagggaaccaccctgacagtgtcctctacgcgtgaggacctgaagaacgtgttcccacctgaggtggccgtgttcgagcctagcgaggccgagatcagccacacccagaaagccaccctcgtgtgcctggctaccggcttctaccccgaccatgtggaactgtcttggtgggtcaacggcaaagaggtgcacagcggcgtgtgtaccgacccccagccactgaaagaacagcccgccctgaacgacagccggtactgcctgagcagcagactgagagtgtccgccaccttctggcagaacccccggaaccacttcagatgccaggtgcagttctacggcctgagcgagaacgacgagtggacccaggacagagccaagcccgtgacccagatcgtgtctgccgaagcctggggcagagccgattgcgacgtgaagctggtggaaaagagcttcgagacagacaccaacctgaacttccagaacctgagcgtgatcggcttcagaatcctgctgctgaaagtggccggctttaacctgctgatgaccctgcggctgtggtccagc

SEQ ID NO: 4765 - DNA, 2697 bp, synthetic construct
  source 1..2697: mol_type = other DNA
atggccttaccagtgaccgccttgctcctgccgctggccttgctgctccacgccgccaggccggaagtgcagctggttgaatctggcggaggactggttcagcctggcggatctctgagactgtcttgtgccgccagcggcttcagcttcagcgacttttggatgagctgggtccgacaggcccctggcaaaggacttgaatgggtcgccacaatcagccaggccggcagcgagaaggactacgtggactctgtgaagggcagattcaccatcagccgggacaacgccaagaagtccctgtacctccagatgaacagcctgagagccgaggacaccgccgtgtactattgtgcctctggcgtgtacagcttcgactacagaggccagggcaccctggtcacagtctcttctggtaccggcggaggcggatctggcggcggaggtagcggtggcggaggatctgaattccagtctgtgctgacacagcctcctagtgtgtctggcgctcctggacagagagtgaccatcagctgtacaggcagcagcagcaatatcggagccggctttgacgtgcactggtatcagcagctgcctggcacagcccctaaactgctgatctacggcaacagcaacagacccagcggcgtgcccgatagattttccggctctaagagcggcacaagcgccagcctggctattactggactccaggccgaggacgaggccgactactactgtcagagctacgacagcagcctgagcggctacgttttcggcaccggcaccaaagtgacagtgcttggtctcgagatccagaaccctgatcctgccgtgtaccagctgcgggatagcaagagcagcgacaagagcgtgtgtctgttcaccgacttcgacagccagaccaacgtgtcccagagcaaggactccgacgtgtacatcaccgataagtgcgtgctggacatgcggagcatggacttcaagagcaactccgccgtggcctggtccaacaagtccgatttcgcctgcgccaacgccttcaacaacagcattatccccgaggacacattcttcccaagccccgagagcagctgcggctttaccagcgagagctaccagcagggcgtgctgagcgccaccatcctgtacgagatcctgctgggcaaggccaccctgtacgccgtgctggtgtctgccctggtgctgatggctatggtcaagcggaaggacagccggggacgcgccaagagaagcggatctggcgtgaagcagaccctgaatttcgacctgctgaagctggctggcgacgtggaatccaacccaggccctactagtatggactggatttggcgcatccttttccttgtcggcgctgctaccggcgcgcattccgggccccagctccagctgcaagagtctggacctggcctggtcaagcctagcgagacactgagcctgacctgtaccgtgtccggcgatagcatcagcagcggcgattactactggggctggatcagacagcctcctggcaaaggactggaatggatcggccacatctactacagcggcgtgacctactacaaccccagcctgaagtccagagtgaccatcagcgtggacaccagccggaaccagttctccctgaagctgtctagcgtgacagccgccgataccgccgtgtactactgcaccagagaggacagcagcaactggcggagtagaggccagggaacactggtcacagttagctctggatccggcggaggcggaagtggaggcggaggatctggcggcggaggctctttcgaacaagttcagctggttcagagcggagccgaagtgaagaaacctggggcctctgtgaaggtgtcctgcaaggcttccggctacacctttaccgattactacatgcactgggtccgacaggctcccggccaaagacttgaatggatgggctggatcaaccccaacagcggcggcacaaattacgcccagaagttccaggaccggatcaccgtgaccagagacaccagctccaacaccggctacatggaactgacccggctgagatccgatgacaccgccgtgtactactgcgctagaagcccttactccggcgtgctggataagtggggacagggcacactggtcaccgtgtcatctacgcgtgaggacctgaagaacgtgttcccacctgaggtggccgtgttcgagcctagcgaggccgagatcagccacacccagaaagccaccctcgtgtgcctggctaccggcttctaccccgaccatgtggaactgtcttggtgggtcaacggcaaagaggtgcacagcggcgtgtgtaccgacccccagccactgaaagaacagcccgccctgaacgacagccggtactgcctgagcagcagactgagagtgtccgccaccttctggcagaacccccggaaccacttcagatgccaggtgcagttctacggcctgagcgagaacgacgagtggacccaggacagagccaagcccgtgacccagatcgtgtctgccgaagcctggggcagagccgattgcgacgtgaagctggtggaaaagagcttcgagacagacaccaacctgaacttccagaacctgagcgtgatcggcttcagaatcctgctgctgaaagtggccggctttaacctgctgatgaccctgcggctgtggtccagc

SEQ ID NO: 4766 - DNA, 2688 bp, synthetic construct
  source 1..2688: mol_type = other DNA
atggccttaccagtgaccgccttgctcctgccgctggccttgctgctccacgccgccaggccggaagtgcagctggttgaatctggcggaggactggttcagcctggcggatctctgagactgtcttgtgccgccagcggcttcagcttcagcgacttttggatgagctgggtccgacaggcccctggcaaaggacttgaatgggtcgccacaatcagccaggccggcagcgagaaggactacgtggactctgtgaagggcagattcaccatcagccgggacaacgccaagaagtccctgtacctccagatgaacagcctgagagccgaggacaccgccgtgtactattgtgcctctggcgtgtacagcttcgactacagaggccagggcaccctggtcacagtctcttctggtaccggcggaggcggatctggcggcggaggtagcggtggcggaggatctgaattccaggctgttctgacacagcctccatctgcctctggcacacctggacagagagtgaccatctcctgtagcggcagcagcagcaacatcggcagctacaccgtgtcctggtatcagcagctccctggaacagcccctaagttcctgatctacagcaacaaccagcggcctagcggcgtgcccgatagattttctggcagcaagagcggcacaagcgccagcctggctatttctggactccagtctgaggacgaggccgactactattgtgccgcctgggacgatagcctgaacggctatgtgtttggcaccggcaccaaagtgacagtgcttggtctcgagatccagaaccctgatcctgccgtgtaccagctgcgggatagcaagagcagcgacaagagcgtgtgtctgttcaccgacttcgacagccagaccaacgtgtcccagagcaaggactccgacgtgtacatcaccgataagtgcgtgctggacatgcggagcatggacttcaagagcaactccgccgtggcctggtccaacaagtccgatttcgcctgcgccaacgccttcaacaacagcattatccccgaggacacattcttcccaagccccgagagcagctgcggctttaccagcgagagctaccagcagggcgtgctgagcgccaccatcctgtacgagatcctgctgggcaaggccaccctgtacgccgtgctggtgtctgccctggtgctgatggctatggtcaagcggaaggacagccggggacgcgccaagagaagcggatctggcgtgaagcagaccctgaatttcgacctgctgaagctggctggcgacgtggaatccaacccaggccctactagtatggactggatttggcgcatccttttccttgtcggcgctgctaccggcgcgcattccgggccccagctccagctgcaagagtctggacctggcctggtcaagcctagcgagacactgagcctgacctgtaccgtgtccggcgatagcatcagcagcggcgattactactggggctggatcagacagcctcctggcaaaggactggaatggatcggccacatctactacagcggcgtgacctactacaaccccagcctgaagtccagagtgaccatcagcgtggacaccagccggaaccagttctccctgaagctgtctagcgtgacagccgccgataccgccgtgtactactgcaccagagaggacagcagcaactggcggagtagaggccagggaacactggtcacagttagctctggatccggcggaggcggaagtggaggcggaggatctggcggcggaggctctttcgaagttcaactggttcagagcggagccgaagtgaagaagcctggcgagagcctgaagattagctgcaaaggcagcggctacgacttcaccacctactggatcggctgggtccgacagatgcctggcaaaggactggaatggatgggcatcatctaccccggcgacagcgacaccagatacagccctagcgttagaggccgcgtgaccatcagcgccgacaagtctatcaacaccgcctacctccagtggtccagcctggaagcctctgacaccgccatgtactactgcgccagaatgtggaccttcagccaggatggatggggccagggaacactggtcacagtgtcatctacgcgtgaggacctgaagaacgtgttcccacctgaggtggccgtgttcgagcctagcgaggccgagatcagccacacccagaaagccaccctcgtgtgcctggctaccggcttctaccccgaccatgtggaactgtcttggtgggtcaacggcaaagaggtgcacagcggcgtgtgtaccgacccccagccactgaaagaacagcccgccctgaacgacagccggtactgcctgagcagcagactgagagtgtccgccaccttctggcagaacccccggaaccacttcagatgccaggtgcagttctacggcctgagcgagaacgacgagtggacccaggacagagccaagcccgtgacccagatcgtgtctgccgaagcctggggcagagccgattgcgacgtgaagctggtggaaaagagcttcgagacagacaccaacctgaacttccagaacctgagcgtgatcggcttcagaatcctgctgctgaaagtggccggctttaacctgctgatgaccctgcggctgtggtccagc

SEQ ID NO: 4767 - DNA, 2697 bp, synthetic construct
  source 1..2697: mol_type = other DNA
atggccttaccagtgaccgccttgctcctgccgctggccttgctgctccacgccgccaggccggaagtgcagctggttgaatctggcggaggactggttcagcctggcggatctctgagactgtcttgtgccgccagcggcttcagcttcagcgacttttggatgagctgggtccgacaggcccctggcaaaggacttgaatgggtcgccacaatcagccaggccggcagcgagaaggactacgtggactctgtgaagggcagattcaccatcagccgggacaacgccaagaagtccctgtacctccagatgaacagcctgagagccgaggacaccgccgtgtactattgtgcctctggcgtgtacagcttcgactacagaggccagggcaccctggtcacagtctcttctggtaccggcggaggcggatctggcggcggaggtagcggtggcggaggatctgaattcgacatcgtgatgacccagagccccgatagcctggccgtgtctctgggagagagagccaccatcaactgcaagagcagccagagcatcctgtacagcagcaaccagaagaactacctggcctggtatcagcagaagcccggccagagccctaagctgctgatctactgggccagcaccagagaaagcggcgtgcccgatagattcagcggcagcggctctggcaccgacttcaccctgaccatcagttctcttcaggccgaggacgtggccgtgtactactgccaccagtacatcagctcctacaccttcggccagggcaccaagctggaaatcaagctcgagatccagaaccctgatcctgccgtgtaccagctgcgggatagcaagagcagcgacaagagcgtgtgtctgttcaccgacttcgacagccagaccaacgtgtcccagagcaaggactccgacgtgtacatcaccgataagtgcgtgctggacatgcggagcatggacttcaagagcaactccgccgtggcctggtccaacaagtccgatttcgcctgcgccaacgccttcaacaacagcattatccccgaggacacattcttcccaagccccgagagcagctgcggctttaccagcgagagctaccagcagggcgtgctgagcgccaccatcctgtacgagatcctgctgggcaaggccaccctgtacgccgtgctggtgtctgccctggtgctgatggctatggtcaagcggaaggacagccggggacgcgccaagagaagcggatctggcgtgaagcagaccctgaatttcgacctgctgaagctggctggcgacgtggaatccaacccaggccctactagtatggactggatttggcgcatccttttccttgtcggcgctgctaccggcgcgcattccgggccccagctccagctgcaagagtctggacctggcctggtcaagcctagcgagacactgagcctgacctgtaccgtgtccggcgatagcatcagcagcggcgattactactggggctggatcagacagcctcctggcaaaggactggaatggatcggccacatctactacagcggcgtgacctactacaaccccagcctgaagtccagagtgaccatcagcgtggacaccagccggaaccagttctccctgaagctgtctagcgtgacagccgccgataccgccgtgtactactgcaccagagaggacagcagcaactggcggagtagaggccagggaacactggtcacagttagctctggatccggcggaggcggaagtggaggcggaggatctggcggcggaggctctttcgaacaggtgcagctggtgcagtctggcgctgaagtgaagaaacctggggccagcgtgaaggtgtcctgcaaggccagcggctacacctttgccagccagtggatgcactggatgagacaggcccctggacagggcctggaatggatcggctggatcaaccccggcaacgtgaacaccaagtacaacgagaagttcaagggcagagccaccctgacagtggacaccagcaccaacaccgcctacatggaactgagcagcctgcggagcgaggacaccgccgtgtattattgcgccagaagcacctggtacagacccctggattattggggccagggaacccttgtgaccgtgtcctctacgcgtgaggacctgaagaacgtgttcccacctgaggtggccgtgttcgagcctagcgaggccgagatcagccacacccagaaagccaccctcgtgtgcctggctaccggcttctaccccgaccatgtggaactgtcttggtgggtcaacggcaaagaggtgcacagcggcgtgtgtaccgacccccagccactgaaagaacagcccgccctgaacgacagccggtactgcctgagcagcagactgagagtgtccgccaccttctggcagaacccccggaaccacttcagatgccaggtgcagttctacggcctgagcgagaacgacgagtggacccaggacagagccaagcccgtgacccagatcgtgtctgccgaagcctggggcagagccgattgcgacgtgaagctggtggaaaagagcttcgagacagacaccaacctgaacttccagaacctgagcgtgatcggcttcagaatcctgctgctgaaagtggccggctttaacctgctgatgaccctgcggctgtggtccagc

SEQ ID NO: 4768 - DNA, 2697 bp, synthetic construct
  source 1..2697: mol_type = other DNA
atggccttaccagtgaccgccttgctcctgccgctggccttgctgctccacgccgccaggccggaagtgcagctggttgaatctggcggaggactggttcagcctggcggatctctgagactgtcttgtgccgccagcggcttcagcttcagcgacttttggatgagctgggtccgacaggcccctggcaaaggacttgaatgggtcgccacaatcagccaggccggcagcgagaaggactacgtggactctgtgaagggcagattcaccatcagccgggacaacgccaagaagtccctgtacctccagatgaacagcctgagagccgaggacaccgccgtgtactattgtgcctctggcgtgtacagcttcgactacagaggccagggcaccctggtcacagtctcttctggtaccggcggaggcggatctggcggcggaggtagcggtggcggaggatctgaattcgaccacatcgtgctgacccagagccctagcagcctgtctgccagcctgggcgacagagtgaccatcagctgtagagccagccaggacatcagcacctacctgaactggtatcagcagaaacccgacggcaccgtgaagctgctgatcttctacaccagcagactgcacgccggggtgcccagcagattttctggcagcggctctggcacccaccacagcctgaccatctccaacctggaacaggaagatattgctacctacttctgtcagcaaggcaacagcctgcccttcaccttcggcagcggcaccaagctggaaatcaagagactcgagatccagaaccctgatcctgccgtgtaccagctgcgggatagcaagagcagcgacaagagcgtgtgtctgttcaccgacttcgacagccagaccaacgtgtcccagagcaaggactccgacgtgtacatcaccgataagtgcgtgctggacatgcggagcatggacttcaagagcaactccgccgtggcctggtccaacaagtccgatttcgcctgcgccaacgccttcaacaacagcattatccccgaggacacattcttcccaagccccgagagcagctgcggctttaccagcgagagctaccagcagggcgtgctgagcgccaccatcctgtacgagatcctgctgggcaaggccaccctgtacgccgtgctggtgtctgccctggtgctgatggctatggtcaagcggaaggacagccggggacgcgccaagagaagcggatctggcgtgaagcagaccctgaatttcgacctgctgaagctggctggcgacgtggaatccaacccaggccctactagtatggactggatttggcgcatccttttccttgtcggcgctgctaccggcgcgcattccgggccccagctccagctgcaagagtctggacctggcctggtcaagcctagcgagacactgagcctgacctgtaccgtgtccggcgatagcatcagcagcggcgattactactggggctggatcagacagcctcctggcaaaggactggaatggatcggccacatctactacagcggcgtgacctactacaaccccagcctgaagtccagagtgaccatcagcgtggacaccagccggaaccagttctccctgaagctgtctagcgtgacagccgccgataccgccgtgtactactgcaccagagaggacagcagcaactggcggagtagaggccagggaacactggtcacagttagctctggatccggcggaggcggaagtggaggcggaggatctggcggcggaggctctttcgaacaggtgcagctgaaagagagcggccctgagctggaaaagcctggggccagcgtgaagattagctgcaaggccagcggctacagcttcaccgcctacagcatgaactgggtcaagcagaacaacggcatgagcctggaatggatcggcagcatcgacccctactacggcgacaccaaatacgcccagaagttcaagggcaaggccaccctgaccgtggataaggccagcagcaccgcctacctccagctgaagtctctgaccagcgaggacagcgccgtgtactactgcgccagacggatgattaccaccggcgactggtacttcgacgtgtggggagccggaaccaccgtgacagtgtctagcacgcgtgaggacctgaagaacgtgttcccacctgaggtggccgtgttcgagcctagcgaggccgagatcagccacacccagaaagccaccctcgtgtgcctggctaccggcttctaccccgaccatgtggaactgtcttggtgggtcaacggcaaagaggtgcacagcggcgtgtgtaccgacccccagccactgaaagaacagcccgccctgaacgacagccggtactgcctgagcagcagactgagagtgtccgccaccttctggcagaacccccggaaccacttcagatgccaggtgcagttctacggcctgagcgagaacgacgagtggacccaggacagagccaagcccgtgacccagatcgtgtctgccgaagcctggggcagagccgattgcgacgtgaagctggtggaaaagagcttcgagacagacaccaacctgaacttccagaacctgagcgtgatcggcttcagaatcctgctgctgaaagtggccggctttaacctgctgatgaccctgcggctgtggtccagc

SEQ ID NO: 4769 - DNA, 2697 bp, synthetic construct; identical to SEQ ID NO: 4768
  source 1..2697: mol_type = other DNA

SEQ ID NO: 4770 - DNA, 2697 bp, synthetic construct
  source 1..2697: mol_type = other DNA
atggccttaccagtgaccgccttgctcctgccgctggccttgctgctccacgccgccaggccggaagtgcagctggttgaatctggcggaggactggttcagcctggcggatctctgagactgtcttgtgccgccagcggcttcagcttcagcgacttttggatgagctgggtccgacaggcccctggcaaaggacttgaatgggtcgccacaatcagccaggccggcagcgagaaggactacgtggactctgtgaagggcagattcaccatcagccgggacaacgccaagaagtccctgtacctccagatgaacagcctgagagccgaggacaccgccgtgtactattgtgcctctggcgtgtacagcttcgactacagaggccagggcaccctggtcacagtctcttctggtaccggcggaggcggatctggcggcggaggtagcggtggcggaggatctgaattcgacgagatcgtgctgacacagagccctgccaccctgtctctgagccctggcgaaagagccaccctgagctgtagagccagccagagcgtgtccagctacctggcctggtatcagcagaagcccggccaggctccccggctgctgatctacgatgccagcaatagagccaccggcatccccgccagattttccggctctggcagcggcaccgacttcaccctgaccatcagctccctggaacccgaggacttcgccgtgtactactgccagcagcggagcaactggcccatcacattcggccagggcacccggctggaaatcaaactcgagatccagaaccctgatcctgccgtgtaccagctgcgggatagcaagagcagcgacaagagcgtgtgtctgttcaccgacttcgacagccagaccaacgtgtcccagagcaaggactccgacgtgtacatcaccgataagtgcgtgctggacatgcggagcatggacttcaagagcaactccgccgtggcctggtccaacaagtccgatttcgcctgcgccaacgccttcaacaacagcattatccccgaggacacattcttcccaagccccgagagcagctgcggctttaccagcgagagctaccagcagggcgtgctgagcgccaccatcctgtacgagatcctgctgggcaaggccaccctgtacgccgtgctggtgtctgccctggtgctgatggctatggtcaagcggaaggacagccggggacgcgccaagagaagcggatctggcgtgaagcagaccctgaatttcgacctgctgaagctggctggcgacgtggaatccaacccaggccctactagtatggactggatttggcgcatccttttccttgtcggcgctgctaccggcgcgcattccgggccccagctccagctgcaagagtctggacctggcctggtcaagcctagcgagacactgagcctgacctgtaccgtgtccggcgatagcatcagcagcggcgattactactggggctggatcagacagcctcctggcaaaggactggaatggatcggccacatctactacagcggcgtgacctactacaaccccagcctgaagtccagagtgaccatcagcgtggacaccagccggaaccagttctccctgaagctgtctagcgtgacagccgccgataccgccgtgtactactgcaccagagaggacagcagcaactggcggagtagaggccagggaacactggtcacagttagctctggatccggcggaggcggaagtggaggcggaggatctggcggcggaggctctttcgaagaagtgcagctggtggaatcaggcggcggactggtgcagcctggcagaagcctgagactgagctgtgccgccagcggcttcaccttcaacgactacgccatgcactgggtgcgccaggcccctggaaaaggactggaatgggtgtccacaatcagctggaacagcggcagcatcggctacgccgatagcgtgaagggccggttcaccatcagccgggacaacgccaagaagtccctgtacctccagatgaacagcctgcgggccgaggacacagccctgtactattgcgccaaggacatccagtacggcaactactactacggcatggacgtgtggggccagggaaccaccgtgaccgtgtcatctacgcgtgaggacctgaagaacgtgttcccacctgaggtggccgtgttcgagcctagcgaggccgagatcagccacacccagaaagccaccctcgtgtgcctggctaccggcttctaccccgaccatgtggaactgtcttggtgggtcaacggcaaagaggtgcacagcggcgtgtgtaccgacccccagccactgaaagaacagcccgccctgaacgacagccggtactgcctgagcagcagactgagagtgtccgccaccttctggcagaacccccggaaccacttcagatgccaggtgcagttctacggcctgagcgagaacgacgagtggacccaggacagagccaagcccgtgacccagatcgtgtctgccgaagcctggggcagagccgattgcgacgtgaagctggtggaaaagagcttcgagacagacaccaacctgaacttccagaacctgagcgtgatcggcttcagaatcctgctgctgaaagtggccggctttaacctgctgatgaccctgcggctgtggtccagc

SEQ ID NO: 4771 - DNA, 2703 bp, synthetic construct
  source 1..2703: mol_type = other DNA
atggccttaccagtgaccgccttgctcctgccgctggccttgctgctccacgccgccaggccggaagtgcagctggttgaatctggcggaggactggttcagcctggcggatctctgagactgtcttgtgccgccagcggcttcagcttcagcgacttttggatgagctgggtccgacaggcccctggcaaaggacttgaatgggtcgccacaatcagccaggccggcagcgagaaggactacgtggactctgtgaagggcagattcaccatcagccgggacaacgccaagaagtccctgtacctccagatgaacagcctgagagccgaggacaccgccgtgtactattgtgcctctggcgtgtacagcttcgactacagaggccagggcaccctggtcacagtctcttctggtaccggcggaggcggatctggcggcggaggtagcggtggcggaggatctgaattcgacatcgtgatgacccagacccccctgagcctgcctgtgacacctggcgagcctgccagcatctcctgcagaagcagcaagagcctgctgcacagcaacggcatcacctacctgtactggtatctgcagaaacccggccagagcccccaactgctgatctaccagatgagcaacctggtgtccggcgtgcccgacagattttctggcagcggctccggcaccgacttcaccctgaagatcagccgggtggaagccgaggacgtgggcgtgtactactgcgcccagaacctggaactgccctacacctttggcggcggaacaaaggtggaaatcaagcggctcgagatccagaaccctgatcctgccgtgtaccagctgcgggatagcaagagcagcgacaagagcgtgtgtctgttcaccgacttcgacagccagaccaacgtgtcccagagcaaggactccgacgtgtacatcaccgataagtgcgtgctggacatgcggagcatggacttcaagagcaactccgccgtggcctggtccaacaagtccgatttcgcctgcgccaacgccttcaacaacagcattatccccgaggacacattcttcccaagccccgagagcagctgcggctttaccagcgagagctaccagcagggcgtgctgagcgccaccatcctgtacgagatcctgctgggcaaggccaccctgtacgccgtgctggtgtctgccctggtgctgatggctatggtcaagcggaaggacagccggggacgcgccaagagaagcggatctggcgtgaagcagaccctgaatttcgacctgctgaagctggctggcgacgtggaatccaacccaggccctactagtatggactggatttggcgcatccttttccttgtcggcgctgctaccggcgcgcattccgggccccagctccagctgcaagagtctggacctggcctggtcaagcctagcgagacactgagcctgacctgtaccgtgtccggcgatagcatcagcagcggcgattactactggggctggatcagacagcctcctggcaaaggactggaatggatcggccacatctactacagcggcgtgacctactacaaccccagcctgaagtccagagtgaccatcagcgtggacaccagccggaaccagttctccctgaagctgtctagcgtgacagccgccgataccgccgtgtactactgcaccagagaggacagcagcaactggcggagtagaggccagggaacactggtcacagttagctctggatccggcggaggcggaagtggaggcggaggatctggcggcggaggctctttcgaacaggtgcaactggtgcagagcggagccgaagtgaaaaagcccggcagcagcgtgaaggtgtcctgcaaggccagcggctacgccttcagctactcctggatcaactgggtgcgccaggcccctggacagggcctggaatggatgggcagaatcttccccggcgacggcgacaccgactacaacggcaagttcaagggcagagtgaccatcaccgccgacaagagcaccagcaccgcctacatggaactgagcagcctgcggagcgaggataccgccgtgtactattgtgccagaaacgtgttcgacggctactggctggtgtactggggccagggaacacttgtgaccgtgtccagcacgcgtgaggacctgaagaacgtgttcccacctgaggtggccgtgttcgagcctagcgaggccgagatcagccacacccagaaagccaccctcgtgtgcctggctaccggcttctaccccgaccatgtggaactgtcttggtgggtcaacggcaaagaggtgcacagcggcgtgtgtaccgacccccagccactgaaagaacagcccgccctgaacgacagccggtactgcctgagcagcagactgagagtgtccgccaccttctggcagaacccccggaaccacttcagatgccaggtgcagttctacggcctgagcgagaacgacgagtggacccaggacagagccaagcccgtgacccagatcgtgtctgccgaagcctggggcagagccgattgcgacgtgaagctggtggaaaagagcttcgagacagacaccaacctgaacttccagaacctgagcgtgatcggcttcagaatcctgctgctgaaagtggccggctttaacctgctgatgaccctgcggctgtggtccagc

SEQ ID NO: 4772 - DNA, 2706 bp, synthetic construct
  source 1..2706: mol_type = other DNA
atggccttaccagtgaccgccttgctcctgccgctggccttgctgctccacgccgccaggccggaagtgcagctggttgaatctggcggaggactggttcagcctggcggatctctgagactgtcttgtgccgccagcggcttcagcttcagcgacttttggatgagctgggtccgacaggcccctggcaaaggacttgaatgggtcgccacaatcagccaggccggcagcgagaaggactacgtggactctgtgaagggcagattcaccatcagccgggacaacgccaagaagtccctgtacctccagatgaacagcctgagagccgaggacaccgccgtgtactattgtgcctctggcgtgtacagcttcgactacagaggccagggcaccctggtcacagtctcttctggtaccggcggaggcggatctggcggcggaggtagcggtggcggaggatctgaattcgacatccagatgacccagagccccagcagcctgtctgccagcgtgggcgacagagtgaccatcacctgtcggagcagccagagcatcgtgcactccgtgggcaacaccttcctggaatggtatcagcagaagcccggcaaggcccccaagctgctgatctacaaggtgtccaacagattcagcggcgtgcccagcaggtttagcggctctggcagcggcaccgacttcaccctgaccatctctagcctccagcccgaggacttcgccacctactactgttttcaaggcagccagttcccctacaccttcggccagggaacaaaggtggaaatcaagcggctcgagatccagaaccctgatcctgccgtgtaccagctgcgggatagcaagagcagcgacaagagcgtgtgtctgttcaccgacttcgacagccagaccaacgtgtcccagagcaaggactccgacgtgtacatcaccgataagtgcgtgctggacatgcggagcatggacttcaagagcaactccgccgtggcctggtccaacaagtccgatttcgcctgcgccaacgccttcaacaacagcattatccccgaggacacattcttcccaagccccgagagcagctgcggctttaccagcgagagctaccagcagggcgtgctgagcgccaccatcctgtacgagatcctgctgggcaaggccaccctgtacgccgtgctggtgtctgccctggtgctgatggctatggtcaagcggaaggacagccggggacgcgccaagagaagcggatctggcgtgaagcagaccctgaatttcgacctgctgaagctggctggcgacgtggaatccaacccaggccctactagtatggactggatttggcgcatccttttccttgtcggcgctgctaccggcgcgcattccgggccccagctccagctgcaagagtctggacctggcctggtcaagcctagcgagacactgagcctgacctgtaccgtgtccggcgatagcatcagcagcggcgattactactggggctggatcagacagcctcctggcaaaggactggaatggatcggccacatctactacagcggcgtgacctactacaaccccagcctgaagtccagagtgaccatcagcgtggacaccagccggaaccagttctccctgaagctgtctagcgtgacagccgccgataccgccgtgtactactgcaccagagaggacagcagcaactggcggagtagaggccagggaacactggtcacagttagctctggatccggcggaggcggaagtggaggcggaggatctggcggcggaggctctttcgaagaagtgcaactggtggaaagcggaggcggcctggtgcagcctggcggatctctgagactgagctgtgccgccagcggctacgagttcagccggtcctggatgaactgggtgcgccaggcccctggcaagggactggaatgggtgggaagaatctaccccggcgacggcgacaccaactacagcggcaagttcaagggccggttcaccatcagcgccgacaccagcaagaacaccgcctacctccagatgaacagcctgcgggccgaggataccgccgtgtactactgtgccagagatggcagctcctgggactggtacttcgacgtgtggggacagggaacccttgtgaccgtgtccagcacgcgtgaggacctgaagaacgtgttcccacctgaggtggccgtgttcgagcctagcgaggccgagatcagccacacccagaaagccaccctcgtgtgcctggctaccggcttctaccccgaccatgtggaactgtcttggtgggtcaacggcaaagaggtgcacagcggcgtgtgtaccgacccccagccactgaaagaacagcccgccctgaacgacagccggtactgcctgagcagcagactgagagtgtccgccaccttctggcagaacccccggaaccacttcagatgccaggtgcagttctacggcctgagcgagaacgacgagtggacccaggacagagccaagcccgtgacccagatcgtgtctgccgaagcctggggcagagccgattgcgacgtgaagctggtggaaaagagcttcgagacagacaccaacctgaacttccagaacctgagcgtgatcggcttcagaatcctgctgctgaaagtggccggctttaacctgctgatgaccctgcggctgtggtccagc

SEQ ID NO: 4773 - DNA, 2700 bp, synthetic construct
  source 1..2700: mol_type = other DNA
atggccttaccagtgaccgccttgctcctgccgctggccttgctgctccacgccgccaggccggaagtgcagctggttgaatctggcggaggactggttcagcctggcggatctctgagactgtcttgtgccgccagcggcttcagcttcagcgacttttggatgagctgggtccgacaggcccctggcaaaggacttgaatgggtcgccacaatcagccaggccggcagcgagaaggactacgtggactctgtgaagggcagattcaccatcagccgggacaacgccaagaagtccctgtacctccagatgaacagcctgagagccgaggacaccgccgtgtactattgtgcctctggcgtgtacagcttcgactacagaggccagggcaccctggtcacagtctcttctggtaccggcggaggcggatctggcggcggaggtagcggtggcggaggatctgaattcgacatccagatgacccagagccccagcagcctgtctgccagcgtgggcgacagagtgaccatcacctgtagagccagccagaccatctggtcctacctgaactggtatcagcagaggcccggcaaggcccccaacctgctgatctatgccgccagctctctccagagcggcgtgcccagcagattttccggcagaggcagcggcaccgacttcaccctgaccatcagttccttgcaggccgaggacttcgccacctactactgccagcagagctacagcatcccccagattttcggccagggcaccaagctggaaatcaagctcgagatccagaaccctgatcctgccgtgtaccagctgcgggatagcaagagcagcgacaagagcgtgtgtctgttcaccgacttcgacagccagaccaacgtgtcccagagcaaggactccgacgtgtacatcaccgataagtgcgtgctggacatgcggagcatggacttcaagagcaactccgccgtggcctggtccaacaagtccgatttcgcctgcgccaacgccttcaacaacagcattatccccgaggacacattcttcccaagccccgagagcagctgcggctttaccagcgagagctaccagcagggcgtgctgagcgccaccatcctgtacgagatcctgctgggcaaggccaccctgtacgccgtgctggtgtctgccctggtgctgatggctatggtcaagcggaaggacagccggggacgcgccaagagaagcggatctggcgtgaagcagaccctgaatttcgacctgctgaagctggctggcgacgtggaatccaacccaggccctactagtatggactggatttggcgcatccttttccttgtcggcgctgctaccggcgcgcattccgggccccagctccagctgcaagagtctggacctggcctggtcaagcctagcgagacactgagcctgacctgtaccgtgtccggcgatagcatcagcagcggcgattactactggggctggatcagacagcctcctggcaaaggactggaatggatcggccacatctactacagcggcgtgacctactacaaccccagcctgaagtccagagtgaccatcagcgtggacaccagccggaaccagttctccctgaagctgtctagcgtgacagccgccgataccgccgtgtactactgcaccagagaggacagcagcaactggcggagtagaggccagggaacactggtcacagttagctctggatccggcggaggcggaagtggaggcggaggatctggcggcggaggctctttcgaacaggtgcagctccagcagtctggacccggcctcgtgaagcctagccagacactgagcctgacctgcgccatcagcggcgatagcgtgtccagcaatagcgccgcctggaactggatcagacagtccccctctcggggcctggaatggctgggccggacctactaccgcagcaagtggtacaacgactacgccgtgtccgtgaagtcccggatcaccatcaaccccgacaccagcaagaaccagttctccttgcaactgaacagcgtgacccccgaggacaccgccgtgtactactgcgccagagaagtgaccggcgacctggaagatgccttcgacatctggggccagggaacaatggtcacagtgtccagcacgcgtgaggacctgaagaacgtgttcccacctgaggtggccgtgttcgagcctagcgaggccgagatcagccacacccagaaagccaccctcgtgtgcctggctaccggcttctaccccgaccatgtggaactgtcttggtgggtcaacggcaaagaggtgcacagcggcgtgtgtaccgacccccagccactgaaagaacagcccgccctgaacgacagccggtactgcctgagcagcagactgagagtgtccgccaccttctggcagaacccccggaaccacttcagatgccaggtgcagttctacggcctgagcgagaacgacgagtggacccaggacagagccaagcccgtgacccagatcgtgtctgccgaagcctggggcagagccgattgcgacgtgaagctggtggaaaagagcttcgagacagacaccaacctgaacttccagaacctgagcgtgatcggcttcagaatcctgctgctgaaagtggccggctttaacctgctgatgaccctgcggctgtggtccagc

SEQ ID NO: 4774 - DNA, 2679 bp, synthetic construct
  source 1..2679: mol_type = other DNA
atggccttaccagtgaccgccttgctcctgccgctggccttgctgctccacgccgccaggccggaagtgcagctggttgaatctggcggaggactggttcagcctggcggatctctgagactgtcttgtgccgccagcggcttcagcttcagcgacttttggatgagctgggtccgacaggcccctggcaaaggacttgaatgggtcgccacaatcagccaggccggcagcgagaaggactacgtggactctgtgaagggcagattcaccatcagccgggacaacgccaagaagtccctgtacctccagatgaacagcctgagagccgaggacaccgccgtgtactattgtgcctctggcgtgtacagcttcgactacagaggccagggcaccctggtcacagtctcttctggtaccggcggaggcggatctggcggcggaggtagcggtggcggaggatctgaattcgacatccagatgacccagagccccgccaccatcgagaacacaagcctgtctgccagcgtgggcgacagagtgaccatcacctgtagagccagccagggcatcagctcttggctgacctggtatcagcagaagcccgagaaggcccccaagagcctgatctacgccgccagctctctgcagtctggcgtgcccagcagattttccggcagcggctctggcaccgacttcaccctgacaatcagcagcctgcagcccgaggacttcgccacctactactgccagcagtacgacagctaccccatcaccttcggccagggcacccggctggaaatcaagctcgagatccagaaccctgatcctgccgtgtaccagctgcgggatagcaagagcagcgacaagagcgtgtgtctgttcaccgacttcgacagccagaccaacgtgtcccagagcaaggactccgacgtgtacatcaccgataagtgcgtgctggacatgcggagcatggacttcaagagcaactccgccgtggcctggtccaacaagtccgatttcgcctgcgccaacgccttcaacaacagcattatccccgaggacacattcttcccaagccccgagagcagctgcggctttaccagcgagagctaccagcagggcgtgctgagcgccaccatcctgtacgagatcctgctgggcaaggccaccctgtacgccgtgctggtgtctgccctggtgctgatggctatggtcaagcggaaggacagccggggacgcgccaagagaagcggatctggcgtgaagcagaccctgaatttcgacctgctgaagctggctggcgacgtggaatccaacccaggccctactagtatggactggatttggcgcatccttttccttgtcggcgctgctaccggcgcgcattccgggccccagctccagctgcaagagtctggacctggcctggtcaagcctagcgagacactgagcctgacctgtaccgtgtccggcgatagcatcagcagcggcgattactactggggctggatcagacagcctcctggcaaaggactggaatggatcggccacatctactacagcggcgtgacctactacaaccccagcctgaagtccagagtgaccatcagcgtggacaccagccggaaccagttctccctgaagctgtctagcgtgacagccgccgataccgccgtgtactactgcaccagagaggacagcagcaactggcggagtagaggccagggaacactggtcacagttagctctggatccggcggaggcggaagtggaggcggaggatctggcggcggaggctctttcgaacaggtgcaactgcagcagtggggagccggactgctgaagcctagcgagacactgagcctgacctgcgccgtgtacggcggcagcttcagcgcctactattggagctggatcagacagccccctggcaagggcctggaatggatcggcgacatcaatcacggcggaggcaccaactacaaccccagcctgaagtcccgcgtgaccatctccgtggacaccagcaagaaccagttctccctgaagctgaacagcgtgacagccgccgacacagccgtgtactactgtgccagcctgaccgcctattggggccagggatctcttgtgaccgtgtccagcacgcgtgaggacctgaagaacgtgttcccacctgaggtggccgtgttcgagcctagcgaggccgagatcagccacacccagaaagccaccctcgtgtgcctggctaccggcttctaccccgaccatgtggaactgtcttggtgggtcaacggcaaagaggtgcacagcggcgtgtgtaccgacccccagccactgaaagaacagcccgccctgaacgacagccggtactgcctgagcagcagactgagagtgtccgccaccttctggcagaacccccggaaccacttcagatgccaggtgcagttctacggcctgagcgagaacgacgagtggacccaggacagagccaagcccgtgacccagatcgtgtctgccgaagcctggggcagagccgattgcgacgtgaagctggtggaaaagagcttcgagacagacaccaacctgaacttccagaacctgagcgtgatcggcttcagaatcctgctgctgaaagtggccggctttaacctgctgatgaccctgcggctgtggtccagc

SEQ ID NO: 4775 - DNA, 2694 bp, synthetic construct
  source 1..2694: mol_type = other DNA
atggccttaccagtgaccgccttgctcctgccgctggccttgctgctccacgccgccaggccggaagtgcagctggttgaatctggcggaggactggttcagcctggcggatctctgagactgtcttgtgccgccagcggcttcagcttcagcgacttttggatgagctgggtccgacaggcccctggcaaaggacttgaatgggtcgccacaatcagccaggccggcagcgagaaggactacgtggactctgtgaagggcagattcaccatcagccgggacaacgccaagaagtccctgtacctccagatgaacagcctgagagccgaggacaccgccgtgtactattgtgcctctggcgtgtacagcttcgactacagaggccagggcaccctggtcacagtctcttctggtaccggcggaggcggatctggcggcggaggtagcggtggcggaggatctgaattcgacgagatcgtgctgacccagagccctgatagcctggccgtgtctctgggcgagagagccaccatcaactgcaaggccagccagagcgtggacttcgacggcgacagctacctgaactggtatcagcagaagcccggccagccccccaaggtgctgatctatgccgccagcacactgcagagcggcgtgcccagcagattttctggcagcggctccggcaccgacttcaccctgaccatcaacagcctggaagccgaggacgccgccacctactactgccagcagagcaacgaggacccctggacctttggcggcggaacaaaggtggaaatcaagctcgagatccagaaccctgatcctgccgtgtaccagctgcgggatagcaagagcagcgacaagagcgtgtgtctgttcaccgacttcgacagccagaccaacgtgtcccagagcaaggactccgacgtgtacatcaccgataagtgcgtgctggacatgcggagcatggacttcaagagcaactccgccgtggcctggtccaacaagtccgatttcgcctgcgccaacgccttcaacaacagcattatccccgaggacacattcttcccaagccccgagagcagctgcggctttaccagcgagagctaccagcagggcgtgctgagcgccaccatcctgtacgagatcctgctgggcaaggccaccctgtacgccgtgctggtgtctgccctggtgctgatggctatggtcaagcggaaggacagccggggacgcgccaagagaagcggatctggcgtgaagcagaccctgaatttcgacctgctgaagctggctggcgacgtggaatccaacccaggccctactagtatggactggatttggcgcatccttttccttgtcggcgctgctaccggcgcgcattccgggccccagctccagctgcaagagtctggacctggcctggtcaagcctagcgagacactgagcctgacctgtaccgtgtccggcgatagcatcagcagcggcgattactactggggctggatcagacagcctcctggcaaaggactggaatggatcggccacatctactacagcggcgtgacctactacaaccccagcctgaagtccagagtgaccatcagcgtggacaccagccggaaccagttctccctgaagctgtctagcgtgacagccgccgataccgccgtgtactactgcaccagagaggacagcagcaactggcggagtagaggccagggaacactggtcacagttagctctggatccggcggaggcggaagtggaggcggaggatctggcggcggaggctctttcgaacaggtgcaactggtgcagtccggcgctgaagtgaagaaacctggggccagcgtgaaggtgtcctgcaaggtgtccggctacacctttaccgactactacattacctgggtgcgccaggcccctggacaggccctggaatggatgggctggatctaccccggcagcggcaacaccaagtacagccagaagttccagggcagattcgtgttcagcgtggacaccagcgccagcaccgcctacctgcaactgtctagcctgaaggccgaagataccgccgtgtactactgcgccaactacggcaactattggttcgcctattggggccagggaacccttgtgaccgtgtcctctacgcgtgaggacctgaagaacgtgttcccacctgaggtggccgtgttcgagcctagcgaggccgagatcagccacacccagaaagccaccctcgtgtgcctggctaccggcttctaccccgaccatgtggaactgtcttggtgggtcaacggcaaagaggtgcacagcggcgtgtgtaccgacccccagccactgaaagaacagcccgccctgaacgacagccggtactgcctgagcagcagactgagagtgtccgccaccttctggcagaacccccggaaccacttcagatgccaggtgcagttctacggcctgagcgagaacgacgagtggacccaggacagagccaagcccgtgacccagatcgtgtctgccgaagcctggggcagagccgattgcgacgtgaagctggtggaaaagagcttcgagacagacaccaacctgaacttccagaacctgagcgtgatcggcttcagaatcctgctgctgaaagtggccggctttaacctgctgatgaccctgcggctgtggtccagc

SEQ ID NO: 4776 - DNA, 2685 bp, synthetic construct
  source 1..2685: mol_type = other DNA
atggccttaccagtgaccgccttgctcctgccgctggccttgctgctccacgccgccaggccggaagtgcagctggttgaatctggcggaggactggttcagcctggcggatctctgagactgtcttgtgccgccagcggcttcagcttcagcgacttttggatgagctgggtccgacaggcccctggcaaaggacttgaatgggtcgccacaatcagccaggccggcagcgagaaggactacgtggactctgtgaagggcagattcaccatcagccgggacaacgccaagaagtccctgtacctccagatgaacagcctgagagccgaggacaccgccgtgtactattgtgcctctggcgtgtacagcttcgactacagaggccagggcaccctggtcacagtctcttctggtaccggcggaggcggatctggcggcggaggtagcggtggcggaggatctgaattcgacatccagatgacccagagccccagcagcctgtctgccagcgtgggcgacagagtgaccatcacctgtagagccagccagggcatcagctcttggctggcctggtatcagcagaagcccgagaaggcccccaagagcctgatctacgccgcctctagtctccagagcggcgtgcccagcagattttctggcagcggctccggcaccgacttcaccctgacaatcagctccctccagcccgaggacttcgccacctactactgccagcagtacaacagctaccctcccacctttggcggaggcaccaaggtggaaatcaagctcgagatccagaaccctgatcctgccgtgtaccagctgcgggatagcaagagcagcgacaagagcgtgtgtctgttcaccgacttcgacagccagaccaacgtgtcccagagcaaggactccgacgtgtacatcaccgataagtgcgtgctggacatgcggagcatggacttcaagagcaactccgccgtggcctggtccaacaagtccgatttcgcctgcgccaacgccttcaacaacagcattatccccgaggacacattcttcccaagccccgagagcagctgcggctttaccagcgagagctaccagcagggcgtgctgagcgccaccatcctgtacgagatcctgctgggcaaggccaccctgtacgccgtgctggtgtctgccctggtgctgatggctatggtcaagcggaaggacagccggggacgcgccaagagaagcggatctggcgtgaagcagaccctgaatttcgacctgctgaagctggctggcgacgtggaatccaacccaggccctactagtatggactggatttggcgcatccttttccttgtcggcgctgctaccggcgcgcattccgggccccagctccagctgcaagagtctggacctggcctggtcaagcctagcgagacactgagcctgacctgtaccgtgtccggcgatagcatcagcagcggcgattactactggggctggatcagacagcctcctggcaaaggactggaatggatcggccacatctactacagcggcgtgacctactacaaccccagcctgaagtccagagtgaccatcagcgtggacaccagccggaaccagttctccctgaagctgtctagcgtgacagccgccgataccgccgtgtactactgcaccagagaggacagcagcaactggcggagtagaggccagggaacactggtcacagttagctctggatccggcggaggcggaagtggaggcggaggatctggcggcggaggctctttcgaagaagtgcaactggtgcagtctggcggagggctggtgcatcctgggggaagcctgagactgagctgtgccggctctggcttcgccttcagcagcagcaccatgcactggatcagacaggcccctggcaagggcctggaatggatcagcctgatcggaagcggagggggcatctactacggcgacagcgtgaagggccggttcaccatcagccgggacaacgccaagaacagcctgtacctccagatgaactccctgcgggccgaggacatggccgtgtactattgtgtgcggggctacttcgactgggtggactacttcgattactggggccagggcaccctcgtgaccgtgtcatctacgcgtgaggacctgaagaacgtgttcccacctgaggtggccgtgttcgagcctagcgaggccgagatcagccacacccagaaagccaccctcgtgtgcctggctaccggcttctaccccgaccatgtggaactgtcttggtgggtcaacggcaaagaggtgcacagcggcgtgtgtaccgacccccagccactgaaagaacagcccgccctgaacgacagccggtactgcctgagcagcagactgagagtgtccgccaccttctggcagaacccccggaaccacttcagatgccaggtgcagttctacggcctgagcgagaacgacgagtggacccaggacagagccaagcccgtgacccagatcgtgtctgccgaagcctggggcagagccgattgcgacgtgaagctggtggaaaagagcttcgagacagacaccaacctgaacttccagaacctgagcgtgatcggcttcagaatcctgctgctgaaagtggccggctttaacctgctgatgaccctgcggctgtggtccagc

SEQ ID NO: 4777 - DNA, 2715 bp, synthetic construct
  source 1..2715: mol_type = other DNA
atggccttaccagtgaccgccttgctcctgccgctggccttgctgctccacgccgccaggccggaagtgcagctggttgaatctggcggaggactggttcagcctggcggatctctgagactgtcttgtgccgccagcggcttcagcttcagcgacttttggatgagctgggtccgacaggcccctggcaaaggacttgaatgggtcgccacaatcagccaggccggcagcgagaaggactacgtggactctgtgaagggcagattcaccatcagccgggacaacgccaagaagtccctgtacctccagatgaacagcctgagagccgaggacaccgccgtgtactattgtgcctctggcgtgtacagcttcgactacagaggccagggcaccctggtcacagtctcttctggtaccggcggaggcggatctggcggcggaggtagcggtggcggaggatctgaattcgacgacatcgtgatgacacagtcaccagatagcctcaccgtctccctgggggagcggaccaccattaattgtaaatccagccaaagcgtgctggactcaagcaagaacaagaatagcctcgcctggtatcagcagaagcccggtcagcctccaaagctgctgctttcttgggcctccaccagagagtccgggattcctgataggtttagtggttcaggctccggcacagattttactctgaccattgattctctccagccagaggattctgcaacttattactgccagcaaagcgcccactttcctataacttttggccagggaacccgacttgaaatcaagctcgagatccagaaccctgatcctgccgtgtaccagctgcgggatagcaagagcagcgacaagagcgtgtgtctgttcaccgacttcgacagccagaccaacgtgtcccagagcaaggactccgacgtgtacatcaccgataagtgcgtgctggacatgcggagcatggacttcaagagcaactccgccgtggcctggtccaacaagtccgatttcgcctgcgccaacgccttcaacaacagcattatccccgaggacacattcttcccaagccccgagagcagctgcggctttaccagcgagagctaccagcagggcgtgctgagcgccaccatcctgtacgagatcctgctgggcaaggccaccctgtacgccgtgctggtgtctgccctggtgctgatggctatggtcaagcggaaggacagccggggacgcgccaagagaagcggatctggcgtgaagcagaccctgaatttcgacctgctgaagctggctggcgacgtggaatccaacccaggccctactagtatggactggatttggcgcatccttttccttgtcggcgctgctaccggcgcgcattccgggccccagctccagctgcaagagtctggacctggcctggtcaagcctagcgagacactgagcctgacctgtaccgtgtccggcgatagcatcagcagcggcgattactactggggctggatcagacagcctcctggcaaaggactggaatggatcggccacatctactacagcggcgtgacctactacaaccccagcctgaagtccagagtgaccatcagcgtggacaccagccggaaccagttctccctgaagctgtctagcgtgacagccgccgataccgccgtgtactactgcaccagagaggacagcagcaactggcggagtagaggccagggaacactggtcacagttagctctggatccggcggaggcggaagtggaggcggaggatctggcggcggaggctctttcgaacaggtgcagctggtgcagagcggtgccgaagtgaagaaaccaggtgcatccgttaaagtttcatgtaaggctagtggatataccttcaccaattacggaatgaactgggtgaaacaggcccctggccagggactgaagtggatggggtggattaacacctacaccggggagccgacttatgcagacgactttaaggggcgggtcacgatgacctccgacacctccaccagtaccgcctacctggagctgcacaaccttaggtcagacgataccgccgtgtattactgtgcccgatggtcttggtccgacggatactatgtctacttcgactattggggccaggggaccacagttaccgtgtcctctacgcgtgaggacctgaagaacgtgttcccacctgaggtggccgtgttcgagcctagcgaggccgagatcagccacacccagaaagccaccctcgtgtgcctggctaccggcttctaccccgaccatgtggaactgtcttggtgggtcaacggcaaagaggtgcacagcggcgtgtgtaccgacccccagccactgaaagaacagcccgccctgaacgacagccggtactgcctgagcagcagactgagagtgtccgccaccttctggcagaacccccggaaccacttcagatgccaggtgcagttctacggcctgagcgagaacgacgagtggacccaggacagagccaagcccgtgacccagatcgtgtctgccgaagcctggggcagagccgattgcgacgtgaagctggtggaaaagagcttcgagacagacaccaacctgaacttccagaacctgagcgtgatcggcttcagaatcctgctgctgaaagtggccggctttaacctgctgatgaccctgcggctgtggtccagc

SEQ ID NO: 4778 - DNA, 2703 bp, synthetic construct
  source 1..2703: mol_type = other DNA
atggccttaccagtgaccgccttgctcctgccgctggccttgctgctccacgccgccaggccggaagtgcagctggttgaatctggcggaggactggttcagcctggcggatctctgagactgtcttgtgccgccagcggcttcagcttcagcgacttttggatgagctgggtccgacaggcccctggcaaaggacttgaatgggtcgccacaatcagccaggccggcagcgagaaggactacgtggactctgtgaagggcagattcaccatcagccgggacaacgccaagaagtccctgtacctccagatgaacagcctgagagccgaggacaccgccgtgtactattgtgcctctggcgtgtacagcttcgactacagaggccagggcaccctggtcacagtctcttctggtaccggcggaggcggatctggcggcggaggtagcggtggcggaggatctgaattcgacgagatcgtgctgacacagagccctggaagcctggccgtgtctcctggcgagcgcgtgacaatgagctgcaagagcagccagagcgtgttcttcagcagctcccagaagaactacctggcctggtatcagcagatccccggccagagccccagactgctgatctactgggccagcaccagagaaagcggcgtgcccgatagattcaccggcagcggctctggcaccgacttcaccctgacaatcagcagcgtgcagcccgaggacctggctatctactactgccaccagtacctgagcagccggaccttcggccagggcaccaagctggaaatcaagagactcgagatccagaaccctgatcctgccgtgtaccagctgcgggatagcaagagcagcgacaagagcgtgtgtctgttcaccgacttcgacagccagaccaacgtgtcccagagcaaggactccgacgtgtacatcaccgataagtgcgtgctggacatgcggagcatggacttcaagagcaactccgccgtggcctggtccaacaagtccgatttcgcctgcgccaacgccttcaacaacagcattatccccgaggacacattcttcccaagccccgagagcagctgcggctttaccagcgagagctaccagcagggcgtgctgagcgccaccatcctgtacgagatcctgctgggcaaggccaccctgtacgccgtgctggtgtctgccctggtgctgatggctatggtcaagcggaaggacagccggggacgcgccaagagaagcggatctggcgtgaagcagaccctgaatttcgacctgctgaagctggctggcgacgtggaatccaacccaggccctactagtatggactggatttggcgcatccttttccttgtcggcgctgctaccggcgcgcattccgggccccagctccagctgcaagagtctggacctggcctggtcaagcctagcgagacactgagcctgacctgtaccgtgtccggcgatagcatcagcagcggcgattactactggggctggatcagacagcctcctggcaaaggactggaatggatcggccacatctactacagcggcgtgacctactacaaccccagcctgaagtccagagtgaccatcagcgtggacaccagccggaaccagttctccctgaagctgtctagcgtgacagccgccgataccgccgtgtactactgcaccagagaggacagcagcaactggcggagtagaggccagggaacactggtcacagttagctctggatccggcggaggcggaagtggaggcggaggatctggcggcggaggctctttcgaacaggtgcaactgcagcagcctggcgctgaggtcgtgaagccaggcgcttccgtgaagatgtcctgcaaggccagcggctacaccttcaccagctactacatccactggatcaagcagacccctggacagggcctggaatgggtgggagtgatctaccccggcaacgacgacatcagctacaaccagaagttccagggcaaggccaccctgaccgccgacaagtctagcaccaccgcctacatgcaactgtccagcctgaccagcgaggacagcgccgtgtactactgcgccagagaagtgcggctgcggtacttcgatgtgtggggccagggaaccaccgtgaccgtgtcatctacgcgtgaggacctgaagaacgtgttcccacctgaggtggccgtgttcgagcctagcgaggccgagatcagccacacccagaaagccaccctcgtgtgcctggctaccggcttctaccccgaccatgtggaactgtcttggtgggtcaacggcaaagaggtgcacagcggcgtgtgtaccgacccccagccactgaaagaacagcccgccctgaacgacagccggtactgcctgagcagcagactgagagtgtccgccaccttctggcagaacccccggaaccacttcagatgccaggtgcagttctacggcctgagcgagaacgacgagtggacccaggacagagccaagcccgtgacccagatcgtgtctgccgaagcctggggcagagccgattgcgacgtgaagctggtggaaaagagcttcgagacagacaccaacctgaacttccagaacctgagcgtgatcggcttcagaatcctgctgctgaaagtggccggctttaacctgctgatgaccctgcggctgtggtccagc

SEQ ID NO: 4779 - DNA, 2715 bp, synthetic construct
  source 1..2715: mol_type = other DNA
atggccttaccagtgaccgccttgctcctgccgctggccttgctgctccacgccgccaggccggaagtgcagctggttgaatctggcggaggactggttcagcctggcggatctctgagactgtcttgtgccgccagcggcttcagcttcagcgacttttggatgagctgggtccgacaggcccctggcaaaggacttgaatgggtcgccacaatcagccaggccggcagcgagaaggactacgtggactctgtgaagggcagattcaccatcagccgggacaacgccaagaagtccctgtacctccagatgaacagcctgagagccgaggacaccgccgtgtactattgtgcctctggcgtgtacagcttcgactacagaggccagggcaccctggtcacagtctcttctggtaccggcggaggcggatctggcggcggaggtagcggtggcggaggatctgaattcgatgtgctgctgacccagagccctctgagcctgcctgtgacactgggacagcctgccagcatctcctgtcggagcagccagaccatcgtgcacagcaacggcaacacctacctggaatggttccagcagcggccaggccagagccccagactgctgatctaccaggtgtccaacagattcagcggcgtgcccgacagattctccggcagcggctctggcaccgacttcaccctgaagatcagccgggtggaagccgaggacgtgggcgtgtactactgttttcaaggcagccacgtgccccggacctttggcggaggaacaaaggtggaaatcaagagagccctcgagatccagaaccctgatcctgccgtgtaccagctgcgggatagcaagagcagcgacaagagcgtgtgtctgttcaccgacttcgacagccagaccaacgtgtcccagagcaaggactccgacgtgtacatcaccgataagtgcgtgctggacatgcggagcatggacttcaagagcaactccgccgtggcctggtccaacaagtccgatttcgcctgcgccaacgccttcaacaacagcattatccccgaggacacattcttcccaagccccgagagcagctgcggctttaccagcgagagctaccagcagggcgtgctgagcgccaccatcctgtacgagatcctgctgggcaaggccaccctgtacgccgtgctggtgtctgccctggtgctgatggctatggtcaagcggaaggacagccggggacgcgccaagagaagcggatctggcgtgaagcagaccctgaatttcgacctgctgaagctggctggcgacgtggaatccaacccaggccctactagtatggactggatttggcgcatccttttccttgtcggcgctgctaccggcgcgcattccgggccccagctccagctgcaagagtctggacctggcctggtcaagcctagcgagacactgagcctgacctgtaccgtgtccggcgatagcatcagcagcggcgattactactggggctggatcagacagcctcctggcaaaggactggaatggatcggccacatctactacagcggcgtgacctactacaaccccagcctgaagtccagagtgaccatcagcgtggacaccagccggaaccagttctccctgaagctgtctagcgtgacagccgccgataccgccgtgtactactgcaccagagaggacagcagcaactggcggagtagaggccagggaacactggtcacagttagctctggatccggcggaggcggaagtggaggcggaggatctggcggcggaggctctttcgaacagatccaactggtgcagagcggcagcgagctgaagaaacctggggccagcgtgaaggtgtcctgcaaggccagcggctacacctttaccaactacggcatgaactgggtgcgccaggcccctggacagggcctgaaatggatgggctggatcaacaccaacaccggcgagcctaagtacgccgaagagttcaagggcagattcgccctgagcctggacaccagcgtgtccacagcctacctccagatcaacagcctgaaggccgaggataccgccgtgtacttctgcgccagaggctacggcaactacgccagaggggcttggctggcctattggggccagggaacactcgtgaccgtgtcctctacgcgtgaggacctgaagaacgtgttcccacctgaggtggccgtgttcgagcctagcgaggccgagatcagccacacccagaaagccaccctcgtgtgcctggctaccggcttctaccccgaccatgtggaactgtcttggtgggtcaacggcaaagaggtgcacagcggcgtgtgtaccgacccccagccactgaaagaacagcccgccctgaacgacagccggtactgcctgagcagcagactgagagtgtccgccaccttctggcagaacccccggaaccacttcagatgccaggtgcagttctacggcctgagcgagaacgacgagtggacccaggacagagccaagcccgtgacccagatcgtgtctgccgaagcctggggcagagccgattgcgacgtgaagctggtggaaaagagcttcgagacagacaccaacctgaacttccagaacctgagcgtgatcggcttcagaatcctgctgctgaaagtggccggctttaacctgctgatgaccctgcggctgtggtccagc

SEQ ID NO: 4780 - DNA, 2670 bp, synthetic construct
  source 1..2670: mol_type = other DNA
atggccttaccagtgaccgccttgctcctgccgctggccttgctgctccacgccgccaggccggaagtgcagctggttgaatctggcggaggactggttcagcctggcggatctctgagactgtcttgtgccgccagcggcttcagcttcagcgacttttggatgagctgggtccgacaggcccctggcaaaggacttgaatgggtcgccacaatcagccaggccggcagcgagaaggactacgtggactctgtgaagggcagattcaccatcagccgggacaacgccaagaagtccctgtacctccagatgaacagcctgagagccgaggacaccgccgtgtactattgtgcctctggcgtgtacagcttcgactacagaggccagggcaccctggtcacagtctcttctggtaccggcggaggcggatctggcggcggaggtagcggtggcggaggatctgaattcgacgagatcgtgctgacacagagccctgccacactctctctgagccctggcgaaagagccaccctgagctgtagcgccagcagcagcatcaactacatctactggctccagcagaagcccggccaggcccccagaatcctgatctacctgaccagcaacctggcctccggcgtgccagccagattttctggcagcggctccggcaccgacttcaccctgacaatcagcagcctggaacccgaggacttcgccgtgtactactgcctccagtggtccagcaaccccctgacctttggcggaggcaccaaggtggaaatcaagctcgagatccagaaccctgatcctgccgtgtaccagctgcgggatagcaagagcagcgacaagagcgtgtgtctgttcaccgacttcgacagccagaccaacgtgtcccagagcaaggactccgacgtgtacatcaccgataagtgcgtgctggacatgcggagcatggacttcaagagcaactccgccgtggcctggtccaacaagtccgatttcgcctgcgccaacgccttcaacaacagcattatccccgaggacacattcttcccaagccccgagagcagctgcggctttaccagcgagagctaccagcagggcgtgctgagcgccaccatcctgtacgagatcctgctgggcaaggccaccctgtacgccgtgctggtgtctgccctggtgctgatggctatggtcaagcggaaggacagccggggacgcgccaagagaagcggatctggcgtgaagcagaccctgaatttcgacctgctgaagctggctggcgacgtggaatccaacccaggccctactagtatggactggatttggcgcatccttttccttgtcggcgctgctaccggcgcgcattccgggccccagctccagctgcaagagtctggacctggcctggtcaagcctagcgagacactgagcctgacctgtaccgtgtccggcgatagcatcagcagcggcgattactactggggctggatcagacagcctcctggcaaaggactggaatggatcggccacatctactacagcggcgtgacctactacaaccccagcctgaagtccagagtgaccatcagcgtggacaccagccggaaccagttctccctgaagctgtctagcgtgacagccgccgataccgccgtgtactactgcaccagagaggacagcagcaactggcggagtagaggccagggaacactggtcacagttagctctggatccggcggaggcggaagtggaggcggaggatctggcggcggaggctctttcgaagaagtgcaactggtggaaagcgggggaggacttgtgaagcctggcggctctctgagactgagctgtgccgcctctggcttcaccttcagcagctacgacatgagctgggtgcgccaggctcctggcaagggactggaatgggtgtccaccatcagcagcggcggcagctacacctactacctggacagcatcaagggccggttcaccatctccagagacaacgccaagaacagcctgtacctccagatgaactccctgcgggccgaggacacagccgtgtattattgcgccagacagggcctggattactggggcagaggcacccttgtgaccgtgtcctctacgcgtgaggacctgaagaacgtgttcccacctgaggtggccgtgttcgagcctagcgaggccgagatcagccacacccagaaagccaccctcgtgtgcctggctaccggcttctaccccgaccatgtggaactgtcttggtgggtcaacggcaaagaggtgcacagcggcgtgtgtaccgacccccagccactgaaagaacagcccgccctgaacgacagccggtactgcctgagcagcagactgagagtgtccgccaccttctggcagaacccccggaaccacttcagatgccaggtgcagttctacggcctgagcgagaacgacgagtggacccaggacagagccaagcccgtgacccagatcgtgtctgccgaagcctggggcagagccgattgcgacgtgaagctggtggaaaagagcttcgagacagacaccaacctgaacttccagaacctgagcgtgatcggcttcagaatcctgctgctgaaagtggccggctttaacctgctgatgaccctgcggctgtggtccagc

SEQ ID NO: 4781 - DNA, 2697 bp, synthetic construct
  source 1..2697: mol_type = other DNA
atggccttaccagtgaccgccttgctcctgccgctggccttgctgctccacgccgccaggccggaagtgcagctggttgaatctggcggaggactggttcagcctggcggatctctgagactgtcttgtgccgccagcggcttcagcttcagcgacttttggatgagctgggtccgacaggcccctggcaaaggacttgaatgggtcgccacaatcagccaggccggcagcgagaaggactacgtggactctgtgaagggcagattcaccatcagccgggacaacgccaagaagtccctgtacctccagatgaacagcctgagagccgaggacaccgccgtgtactattgtgcctctggcgtgtacagcttcgactacagaggccagggcaccctggtcacagtctcttctggtaccggcggaggcggatctggcggcggaggtagcggtggcggaggatctgaattcgacatcgtgatgacccagagccccgatagcctggccgtgtctctgggagagagagccaccatcaactgccgggccagcaagagcgtgtccaccagcggctacagcttcatgcactggtatcagcagaagcccggccagccccccaagctgctgatctacctggcctccaacctggaaagcggcgtgcccgatagattcagcggcagcggctctggcaccgacttcaccctgaccatcagttctcttcaggccgaggacgtggccgtgtactactgccagcacagcagagaggtgccctggacattcggccagggcacaaaggtggaaatcaagcggctcgagatccagaaccctgatcctgccgtgtaccagctgcgggatagcaagagcagcgacaagagcgtgtgtctgttcaccgacttcgacagccagaccaacgtgtcccagagcaaggactccgacgtgtacatcaccgataagtgcgtgctggacatgcggagcatggacttcaagagcaactccgccgtggcctggtccaacaagtccgatttcgcctgcgccaacgccttcaacaacagcattatccccgaggacacattcttcccaagccccgagagcagctgcggctttaccagcgagagctaccagcagggcgtgctgagcgccaccatcctgtacgagatcctgctgggcaaggccaccctgtacgccgtgctggtgtctgccctggtgctgatggctatggtcaagcggaaggacagccggggacgcgccaagagaagcggatctggcgtgaagcagaccctgaatttcgacctgctgaagctggctggcgacgtggaatccaacccaggccctactagtatggactggatttggcgcatccttttccttgtcggcgctgctaccggcgcgcattccgggccccagctccagctgcaagagtctggacctggcctggtcaagcctagcgagacactgagcctgacctgtaccgtgtccggcgatagcatcagcagcggcgattactactggggctggatcagacagcctcctggcaaaggactggaatggatcggccacatctactacagcggcgtgacctactacaaccccagcctgaagtccagagtgaccatcagcgtggacaccagccggaaccagttctccctgaagctgtctagcgtgacagccgccgataccgccgtgtactactgcaccagagaggacagcagcaactggcggagtagaggccagggaacactggtcacagttagctctggatccggcggaggcggaagtggaggcggaggatctggcggcggaggctctttcgaacaggtgcagctggtgcagtctggggccgaagtgaagaaacctggggccagcgtgaaggtgtcctgcaaggccagcggatacacctttaccaactacggcatgaactgggtgcgccaggcccctggacagggcctggaatggatgggctggatcaacacctacaccggcgagcccacatacgccgacgccttcaagggcagattcgccttcagcctggacaccagcacctccaccgcctacctccagatcaacagcctgcggagcgacgacaccgccgtgtattattgcgccagagattacggcgactacgggatggactattggggccagggaaccaccgtgaccgtgtcctctacgcgtgaggacctgaagaacgtgttcccacctgaggtggccgtgttcgagcctagcgaggccgagatcagccacacccagaaagccaccctcgtgtgcctggctaccggcttctaccccgaccatgtggaactgtcttggtgggtcaacggcaaagaggtgcacagcggcgtgtgtaccgacccccagccactgaaagaacagcccgccctgaacgacagccggtactgcctgagcagcagactgagagtgtccgccaccttctggcagaacccccggaaccacttcagatgccaggtgcagttctacggcctgagcgagaacgacgagtggacccaggacagagccaagcccgtgacccagatcgtgtctgccgaagcctggggcagagccgattgcgacgtgaagctggtggaaaagagcttcgagacagacaccaacctgaacttccagaacctgagcgtgatcggcttcagaatcctgctgctgaaagtggccggctttaacctgctgatgaccctgcggctgtggtccagc

SEQ ID NO: 4782 - DNA, 2685 bp, synthetic construct
  source 1..2685: mol_type = other DNA
atggccttaccagtgaccgccttgctcctgccgctggccttgctgctccacgccgccaggccggaagtgcagctggttgaatctggcggaggactggttcagcctggcggatctctgagactgtcttgtgccgccagcggcttcagcttcagcgacttttggatgagctgggtccgacaggcccctggcaaaggacttgaatgggtcgccacaatcagccaggccggcagcgagaaggactacgtggactctgtgaagggcagattcaccatcagccgggacaacgccaagaagtccctgtacctccagatgaacagcctgagagccgaggacaccgccgtgtactattgtgcctctggcgtgtacagcttcgactacagaggccagggcaccctggtcacagtctcttctggtaccggcggaggcggatctggcggcggaggtagcggtggcggaggatctgaattcgacatcgtgatgacccagacccccctgaccctgagcgtgacaatcggacagcctgccagcatctcctgcaagagcagccagagcctgctggacagcgacggcaagacctacctgaactggctgctgcagaggccaggccagagccccgagagactgatctacctggtgtccaagctggactccggcgtgcccgatagattcacaggcagcggctccggcaccgacttcaccctgaagatcagccgggtggaagccgaggacctgggcgtgtactgttgttggcagggcacccacttcccttacaccttcggcggagggaccaaggtggaaatcaagggcctcgagatccagaaccctgatcctgccgtgtaccagctgcgggatagcaagagcagcgacaagagcgtgtgtctgttcaccgacttcgacagccagaccaacgtgtcccagagcaaggactccgacgtgtacatcaccgataagtgcgtgctggacatgcggagcatggacttcaagagcaactccgccgtggcctggtccaacaagtccgatttcgcctgcgccaacgccttcaacaacagcattatccccgaggacacattcttcccaagccccgagagcagctgcggctttaccagcgagagctaccagcagggcgtgctgagcgccaccatcctgtacgagatcctgctgggcaaggccaccctgtacgccgtgctggtgtctgccctggtgctgatggctatggtcaagcggaaggacagccggggacgcgccaagagaagcggatctggcgtgaagcagaccctgaatttcgacctgctgaagctggctggcgacgtggaatccaacccaggccctactagtatggactggatttggcgcatccttttccttgtcggcgctgctaccggcgcgcattccgggccccagctccagctgcaagagtctggacctggcctggtcaagcctagcgagacactgagcctgacctgtaccgtgtccggcgatagcatcagcagcggcgattactactggggctggatcagacagcctcctggcaaaggactggaatggatcggccacatctactacagcggcgtgacctactacaaccccagcctgaagtccagagtgaccatcagcgtggacaccagccggaaccagttctccctgaagctgtctagcgtgacagccgccgataccgccgtgtactactgcaccagagaggacagcagcaactggcggagtagaggccagggaacactggtcacagttagctctggatccggcggaggcggaagtggaggcggaggatctggcggcggaggctctttcgaacaggtgcaactgcagcagcctggcgctgaacttgtgcggccaggcgcctctgtgaagctgagctgtaaagccagcggctacaccttcaccagctactggatgaactgggtcaagcagcgcccaggccagggcctggaatggatcggaatgatcgaccccagcgacagcgagacacactacaaccacatcttcaaggacaaggccaccctgaccgtggacaagtccagcagcacagcctacctgcaactgtccagcctgaccagcgaggacagcgccgtgtactactgcgcccggaacctgtatctgtggggccagggaacaagcgtgaccgtgtctagcacgcgtgaggacctgaagaacgtgttcccacctgaggtggccgtgttcgagcctagcgaggccgagatcagccacacccagaaagccaccctcgtgtgcctggctaccggcttctaccccgaccatgtggaactgtcttggtgggtcaacggcaaagaggtgcacagcggcgtgtgtaccgacccccagccactgaaagaacagcccgccctgaacgacagccggtactgcctgagcagcagactgagagtgtccgccaccttctggcagaacccccggaaccacttcagatgccaggtgcagttctacggcctgagcgagaacgacgagtggacccaggacagagccaagcccgtgacccagatcgtgtctgccgaagcctggggcagagccgattgcgacgtgaagctggtggaaaagagcttcgagacagacaccaacctgaacttccagaacctgagcgtgatcggcttcagaatcctgctgctgaaagtggccggctttaacctgctgatgaccctgcggctgtggtccagc

SEQ ID NO: 4783 - DNA, 2709 bp, synthetic construct
  source 1..2709: mol_type = other DNA
atggccttaccagtgaccgccttgctcctgccgctggccttgctgctccacgccgccaggccggaagtgcagctggttgaatctggcggaggactggttcagcctggcggatctctgagactgtcttgtgccgccagcggcttcagcttcagcgacttttggatgagctgggtccgacaggcccctggcaaaggacttgaatgggtcgccacaatcagccaggccggcagcgagaaggactacgtggactctgtgaagggcagattcaccatcagccgggacaacgccaagaagtccctgtacctccagatgaacagcctgagagccgaggacaccgccgtgtactattgtgcctctggcgtgtacagcttcgactacagaggccagggcaccctggtcacagtctcttctggtaccggcggaggcggatctggcggcggaggtagcggtggcggaggatctgaattcgacatcgtgatgacccagagccccgatagcctggccgtgtctctgggagagagagccaccatcaactgcgagagcagccagagcctgctgaacagcggcaaccagaagaactacctgacctggtatcagcagaagcccggccagccccccaagcccctgatctattgggccagcaccagagaaagcggcgtgcccgatagattcagcggcagcggaagcggcaccgacttcaccctgaccatcagttctcttcaggccgaggacgtggccgtgtactactgccagaacgactacagctacccctacaccttcggccagggcaccaagctggaaatcaagagactcgagatccagaaccctgatcctgccgtgtaccagctgcgggatagcaagagcagcgacaagagcgtgtgtctgttcaccgacttcgacagccagaccaacgtgtcccagagcaaggactccgacgtgtacatcaccgataagtgcgtgctggacatgcggagcatggacttcaagagcaactccgccgtggcctggtccaacaagtccgatttcgcctgcgccaacgccttcaacaacagcattatccccgaggacacattcttcccaagccccgagagcagctgcggctttaccagcgagagctaccagcagggcgtgctgagcgccaccatcctgtacgagatcctgctgggcaaggccaccctgtacgccgtgctggtgtctgccctggtgctgatggctatggtcaagcggaaggacagccggggacgcgccaagagaagcggatctggcgtgaagcagaccctgaatttcgacctgctgaagctggctggcgacgtggaatccaacccaggccctactagtatggactggatttggcgcatccttttccttgtcggcgctgctaccggcgcgcattccgggccccagctccagctgcaagagtctggacctggcctggtcaagcctagcgagacactgagcctgacctgtaccgtgtccggcgatagcatcagcagcggcgattactactggggctggatcagacagcctcctggcaaaggactggaatggatcggccacatctactacagcggcgtgacctactacaaccccagcctgaagtccagagtgaccatcagcgtggacaccagccggaaccagttctccctgaagctgtctagcgtgacagccgccgataccgccgtgtactactgcaccagagaggacagcagcaactggcggagtagaggccagggaacactggtcacagttagctctggatccggcggaggcggaagtggaggcggaggatctggcggcggaggctctttcgaagaagtgcagctggtgcagtctggggccgaagtgaagaagcctggcgagagcctgaagatcagctgcaagggcagcggctacagcttcaccgactactacatgaagtgggccagacagatgcccggcaagggcctggaatggatgggcgacatcatccccagcaacggggccaccttctacaaccagaaattcaagggccaagtgaccatctccgccgacaagagcatcagcaccacctacctccagtggtccagcctgaaggccagcgacaccgccatgtactattgcgccagaagccatctgctgcgggccagttggttcgcctattggggccagggaacaatggtcacagtgtccagcacgcgtgaggacctgaagaacgtgttcccacctgaggtggccgtgttcgagcctagcgaggccgagatcagccacacccagaaagccaccctcgtgtgcctggctaccggcttctaccccgaccatgtggaactgtcttggtgggtcaacggcaaagaggtgcacagcggcgtgtgtaccgacccccagccactgaaagaacagcccgccctgaacgacagccggtactgcctgagcagcagactgagagtgtccgccaccttctggcagaacccccggaaccacttcagatgccaggtgcagttctacggcctgagcgagaacgacgagtggacccaggacagagccaagcccgtgacccagatcgtgtctgccgaagcctggggcagagccgattgcgacgtgaagctggtggaaaagagcttcgagacagacaccaacctgaacttccagaacctgagcgtgatcggcttcagaatcctgctgctgaaagtggccggctttaacctgctgatgaccctgcggctgtggtccagc

SEQ ID NO: 4784 - DNA, 2694 bp, synthetic construct
  source 1..2694: mol_type = other DNA
atggccttaccagtgaccgccttgctcctgccgctggccttgctgctccacgccgccaggccggaagtgcagctggttgaatctggcggaggactggttcagcctggcggatctctgagactgtcttgtgccgccagcggcttcagcttcagcgacttttggatgagctgggtccgacaggcccctggcaaaggacttgaatgggtcgccacaatcagccaggccggcagcgagaaggactacgtggactctgtgaagggcagattcaccatcagccgggacaacgccaagaagtccctgtacctccagatgaacagcctgagagccgaggacaccgccgtgtactattgtgcctctggcgtgtacagcttcgactacagaggccagggcaccctggtcacagtctcttctggtaccggcggaggcggatctggcggcggaggtagcggtggcggaggatctgaattcgacatccagatgacccagtctaccagttccctgagtgcatccctcggagacagggtgacgatcagttgcagcgcaagccaagggatcaataactatctgaactggtatcagcagaaaccggacggaacagtcgaactcctgatttattacaccagcacccttcagagtggcgtcccttcccggttcagtggctccggaagcgggaccgattactccctgaccatttctaatctggagccagaggacataggaacgtattattgccagcagtatagtaaactgccacgaacttttggaggggggacgaaactggagatcaaactcgagatccagaaccctgatcctgccgtgtaccagctgcgggatagcaagagcagcgacaagagcgtgtgtctgttcaccgacttcgacagccagaccaacgtgtcccagagcaaggactccgacgtgtacatcaccgataagtgcgtgctggacatgcggagcatggacttcaagagcaactccgccgtggcctggtccaacaagtccgatttcgcctgcgccaacgccttcaacaacagcattatccccgaggacacattcttcccaagccccgagagcagctgcggctttaccagcgagagctaccagcagggcgtgctgagcgccaccatcctgtacgagatcctgctgggcaaggccaccctgtacgccgtgctggtgtctgccctggtgctgatggctatggtcaagcggaaggacagccggggacgcgccaagagaagcggatctggcgtgaagcagaccctgaatttcgacctgctgaagctggctggcgacgtggaatccaacccaggccctactagtatggactggatttggcgcatccttttccttgtcggcgctgctaccggcgcgcattccgggccccagctccagctgcaagagtctggacctggcctggtcaagcctagcgagacactgagcctgacctgtaccgtgtccggcgatagcatcagcagcggcgattactactggggctggatcagacagcctcctggcaaaggactggaatggatcggccacatctactacagcggcgtgacctactacaaccccagcctgaagtccagagtgaccatcagcgtggacaccagccggaaccagttctccctgaagctgtctagcgtgacagccgccgataccgccgtgtactactgcaccagagaggacagcagcaactggcggagtagaggccagggaacactggtcacagttagctctggatccggcggaggcggaagtggaggcggaggatctggcggcggaggctctttcgaacaggtgcaactccagcagtccggaagcgagcttatgatgccaggggcatcagtgaagatcagctgcaaggctactggctacaccttctctaattactggatagagtgggttaaacaaaggccagggcacggcctggaatggatcggcgagatcctgcctgggacaggccgaaccatttataacgagaagttcaaaggcaaggctactttcaccgcagatataagctctaatacagtgcaaatgcagctctcttccctgacaagtgaggatagtgccgtgtattattgcgcacgaagagattactatggaaatttttattacgctatggattattggggtcaaggaacaagtgtgaccgttagcagcacgcgtgaggacctgaagaacgtgttcccacctgaggtggccgtgttcgagcctagcgaggccgagatcagccacacccagaaagccaccctcgtgtgcctggctaccggcttctaccccgaccatgtggaactgtcttggtgggtcaacggcaaagaggtgcacagcggcgtgtgtaccgacccccagccactgaaagaacagcccgccctgaacgacagccggtactgcctgagcagcagactgagagtgtccgccaccttctggcagaacccccggaaccacttcagatgccaggtgcagttctacggcctgagcgagaacgacgagtggacccaggacagagccaagcccgtgacccagatcgtgtctgccgaagcctggggcagagccgattgcgacgtgaagctggtggaaaagagcttcgagacagacaccaacctgaacttccagaacctgagcgtgatcggcttcagaatcctgctgctgaaagtggccggctttaacctgctgatgaccctgcggctgtggtccagc

SEQ ID NO: 4785 - DNA, 2679 bp, synthetic construct
  source 1..2679: mol_type = other DNA
atggccttaccagtgaccgccttgctcctgccgctggccttgctgctccacgccgccaggccggaagtgcagctggttgaatctggcggaggactggttcagcctggcggatctctgagactgtcttgtgccgccagcggcttcagcttcagcgacttttggatgagctgggtccgacaggcccctggcaaaggacttgaatgggtcgccacaatcagccaggccggcagcgagaaggactacgtggactctgtgaagggcagattcaccatcagccgggacaacgccaagaagtccctgtacctccagatgaacagcctgagagccgaggacaccgccgtgtactattgtgcctctggcgtgtacagcttcgactacagaggccagggcaccctggtcacagtctcttctggtaccggcggaggcggatctggcggcggaggtagcggtggcggaggatctgaattcgacatccagatgacccagagccctgccagcctgtccgtgtctgtgggcgagacagtgaccatcacctgtcgggccagcgagaacatctacagcaacctggcctggtatcagcagaagcagggcaagagcccccaactgctggtgtacgccgccaccaatctggccgatggcgtgcccagcagattttccggctctggcagcggcacccagtacagcctgaagatcaacagcctccagagcgaggacttcggcagctactactgccagcacttctggggcacctggacctttggaggaggcaccaccctggaaatcaagctcgagatccagaaccctgatcctgccgtgtaccagctgcgggatagcaagagcagcgacaagagcgtgtgtctgttcaccgacttcgacagccagaccaacgtgtcccagagcaaggactccgacgtgtacatcaccgataagtgcgtgctggacatgcggagcatggacttcaagagcaactccgccgtggcctggtccaacaagtccgatttcgcctgcgccaacgccttcaacaacagcattatccccgaggacacattcttcccaagccccgagagcagctgcggctttaccagcgagagctaccagcagggcgtgctgagcgccaccatcctgtacgagatcctgctgggcaaggccaccctgtacgccgtgctggtgtctgccctggtgctgatggctatggtcaagcggaaggacagccggggacgcgccaagagaagcggatctggcgtgaagcagaccctgaatttcgacctgctgaagctggctggcgacgtggaatccaacccaggccctactagtatggactggatttggcgcatccttttccttgtcggcgctgctaccggcgcgcattccgggccccagctccagctgcaagagtctggacctggcctggtcaagcctagcgagacactgagcctgacctgtaccgtgtccggcgatagcatcagcagcggcgattactactggggctggatcagacagcctcctggcaaaggactggaatggatcggccacatctactacagcggcgtgacctactacaaccccagcctgaagtccagagtgaccatcagcgtggacaccagccggaaccagttctccctgaagctgtctagcgtgacagccgccgataccgccgtgtactactgcaccagagaggacagcagcaactggcggagtagaggccagggaacactggtcacagttagctctggatccggcggaggcggaagtggaggcggaggatctggcggcggaggctctttcgaagaagtgcaactccagcagagcggccctgagcttgtgaagcctggcgcttccgtgaagatgagctgcaaggccagcggctacaccttcaccgactactacatgaagtggatgaagcagagccacggcaagtccctggaatggatcggcgacatcaaccccaacaacggcggcaccacctacaaccagaagttcaagggcaaggccaccctgaccgtggacaagagcagcagcaccgcctacatgcaactgaacagcctgaccagcgaggacagcgccgtgtactactgcgccagagactacggctacggctatttcgactactggggccagggcacaaccctgacagtgtcctctacgcgtgaggacctgaagaacgtgttcccacctgaggtggccgtgttcgagcctagcgaggccgagatcagccacacccagaaagccaccctcgtgtgcctggctaccggcttctaccccgaccatgtggaactgtcttggtgggtcaacggcaaagaggtgcacagcggcgtgtgtaccgacccccagccactgaaagaacagcccgccctgaacgacagccggtactgcctgagcagcagactgagagtgtccgccaccttctggcagaacccccggaaccacttcagatgccaggtgcagttctacggcctgagcgagaacgacgagtggacccaggacagagccaagcccgtgacccagatcgtgtctgccgaagcctggggcagagccgattgcgacgtgaagctggtggaaaagagcttcgagacagacaccaacctgaacttccagaacctgagcgtgatcggcttcagaatcctgctgctgaaagtggccggctttaacctgctgatgaccctgcggctgtggtccagc

SEQ ID NO: 4786 - DNA, 2688 bp, synthetic construct
  source 1..2688: mol_type = other DNA
atggccttaccagtgaccgccttgctcctgccgctggccttgctgctccacgccgccaggccggaagtgcagctggttgaatctggcggaggactggttcagcctggcggatctctgagactgtcttgtgccgccagcggcttcagcttcagcgacttttggatgagctgggtccgacaggcccctggcaaaggacttgaatgggtcgccacaatcagccaggccggcagcgagaaggactacgtggactctgtgaagggcagattcaccatcagccgggacaacgccaagaagtccctgtacctccagatgaacagcctgagagccgaggacaccgccgtgtactattgtgcctctggcgtgtacagcttcgactacagaggccagggcaccctggtcacagtctcttctggtaccggcggaggcggatctggcggcggaggtagcggtggcggaggatctgaattcgagatcgtgctgacacagagccctggcaccctgagcctgtctccaggcgaaagagccacactgagctgtcgggcctctcagagcgtgggaggctacctggcttggtatcagcagaagccaggccaggcccccagactgctgatctacgacgccagcaatcgggccacaggcatccccgccagattttctggcagcggctccggcaccgacttcaccctgacaatcagcagcctggaacccgaggacttcgccgtgtactactgccagcagcggaacaactggccccccatgtacacattcggccagggcaccaagctggaaatcaagagactcgagatccagaaccctgatcctgccgtgtaccagctgcgggatagcaagagcagcgacaagagcgtgtgtctgttcaccgacttcgacagccagaccaacgtgtcccagagcaaggactccgacgtgtacatcaccgataagtgcgtgctggacatgcggagcatggacttcaagagcaactccgccgtggcctggtccaacaagtccgatttcgcctgcgccaacgccttcaacaacagcattatccccgaggacacattcttcccaagccccgagagcagctgcggctttaccagcgagagctaccagcagggcgtgctgagcgccaccatcctgtacgagatcctgctgggcaaggccaccctgtacgccgtgctggtgtctgccctggtgctgatggctatggtcaagcggaaggacagccggggacgcgccaagagaagcggatctggcgtgaagcagaccctgaatttcgacctgctgaagctggctggcgacgtggaatccaacccaggccctactagtatggactggatttggcgcatccttttccttgtcggcgctgctaccggcgcgcattccgggccccagctccagctgcaagagtctggacctggcctggtcaagcctagcgagacactgagcctgacctgtaccgtgtccggcgatagcatcagcagcggcgattactactggggctggatcagacagcctcctggcaaaggactggaatggatcggccacatctactacagcggcgtgacctactacaaccccagcctgaagtccagagtgaccatcagcgtggacaccagccggaaccagttctccctgaagctgtctagcgtgacagccgccgataccgccgtgtactactgcaccagagaggacagcagcaactggcggagtagaggccagggaacactggtcacagttagctctggatccggcggaggcggaagtggaggcggaggatctggcggcggaggctctttcgaacaggtgcaactggtgcagagcggagccgaagtgaagaaacccggcagcagcgtgaaggtgtcctgcaaggcttccggcggcaccttcagcagctacgccatttcttgggtgcgccaggctcctggacagggcctggaatggatgggcggcatcatccctatcctgggcaccgccaactacgcccagaaattccagggcagagtgaccatcaccgccgacgagagcaccagcaccgcctacatggaactgagcagcctgcggagcgaggacacagccgtgtattattgcgccagatggggcggaggggccttcgacatttggggccagggaacaatggtcaccgtgtccagcacgcgtgaggacctgaagaacgtgttcccacctgaggtggccgtgttcgagcctagcgaggccgagatcagccacacccagaaagccaccctcgtgtgcctggctaccggcttctaccccgaccatgtggaactgtcttggtgggtcaacggcaaagaggtgcacagcggcgtgtgtaccgacccccagccactgaaagaacagcccgccctgaacgacagccggtactgcctgagcagcagactgagagtgtccgccaccttctggcagaacccccggaaccacttcagatgccaggtgcagttctacggcctgagcgagaacgacgagtggacccaggacagagccaagcccgtgacccagatcgtgtctgccgaagcctggggcagagccgattgcgacgtgaagctggtggaaaagagcttcgagacagacaccaacctgaacttccagaacctgagcgtgatcggcttcagaatcctgctgctgaaagtggccggctttaacctgctgatgaccctgcggctgtggtccagc

SEQ ID NO: 4787 - DNA, 2673 bp, synthetic construct
  source 1..2673: mol_type = other DNA
atggccttaccagtgaccgccttgctcctgccgctggccttgctgctccacgccgccaggccggaagtgcagctggttgaatctggcggaggactggttcagcctggcggatctctgagactgtcttgtgccgccagcggcttcagcttcagcgacttttggatgagctgggtccgacaggcccctggcaaaggacttgaatgggtcgccacaatcagccaggccggcagcgagaaggactacgtggactctgtgaagggcagattcaccatcagccgggacaacgccaagaagtccctgtacctccagatgaacagcctgagagccgaggacaccgccgtgtactattgtgcctctggcgtgtacagcttcgactacagaggccagggcaccctggtcacagtctcttctggtaccggcggaggcggatctggcggcggaggtagcggtggcggaggatctgaattccagatcgtgctgacacagagccctgccctgatgagcgccagccctggcgagaaagtgaccatgacctgtagcgccagcagcagcgtgcgctacatgtactggtatcagcagaagcccagaagcagccccaagccctggattcacctgaccagcaatctggcctctggcgtgcccgctagattttccggctctggcagcggcaccagctacagcctgaccatcagcagcatggaagccgaggacgccgccacctactactgccagcagtggtccagccaccccttcacatttggctccggcaccaagctggaaatcaagctcgagatccagaaccctgatcctgccgtgtaccagctgcgggatagcaagagcagcgacaagagcgtgtgtctgttcaccgacttcgacagccagaccaacgtgtcccagagcaaggactccgacgtgtacatcaccgataagtgcgtgctggacatgcggagcatggacttcaagagcaactccgccgtggcctggtccaacaagtccgatttcgcctgcgccaacgccttcaacaacagcattatccccgaggacacattcttcccaagccccgagagcagctgcggctttaccagcgagagctaccagcagggcgtgctgagcgccaccatcctgtacgagatcctgctgggcaaggccaccctgtacgccgtgctggtgtctgccctggtgctgatggctatggtcaagcggaaggacagccggggacgcgccaagagaagcggatctggcgtgaagcagaccctgaatttcgacctgctgaagctggctggcgacgtggaatccaacccaggccctactagtatggactggatttggcgcatccttttccttgtcggcgctgctaccggcgcgcattccgggccccagctccagctgcaagagtctggacctggcctggtcaagcctagcgagacactgagcctgacctgtaccgtgtccggcgatagcatcagcagcggcgattactactggggctggatcagacagcctcctggcaaaggactggaatggatcggccacatctactacagcggcgtgacctactacaaccccagcctgaagtccagagtgaccatcagcgtggacaccagccggaaccagttctccctgaagctgtctagcgtgacagccgccgataccgccgtgtactactgcaccagagaggacagcagcaactggcggagtagaggccagggaacactggtcacagttagctctggatccggcggaggcggaagtggaggcggaggatctggcggcggaggctctttcgaagatgtgcaactccaggaaagcggccctggccttgtgaagcctagccagagcctgtccctgacctgtaccgtgaccggcttcagcatcaccagcgactactcttggaactggatcagacagttccctggcaacaaactggaatggatgggctacatcagctactccggccacacctcctacaaccccagcctggaaagccggatctccatcaccagagacaccagcaagaaccagttcttcttgcaactgaacagcgtgaccaccgaggataccgccacatattactgtaccagaggcaactgggacgtggtgtactggggccagggcacacttgtgaccgtgtctgctacgcgtgaggacctgaagaacgtgttcccacctgaggtggccgtgttcgagcctagcgaggccgagatcagccacacccagaaagccaccctcgtgtgcctggctaccggcttctaccccgaccatgtggaactgtcttggtgggtcaacggcaaagaggtgcacagcggcgtgtgtaccgacccccagccactgaaagaacagcccgccctgaacgacagccggtactgcctgagcagcagactgagagtgtccgccaccttctggcagaacccccggaaccacttcagatgccaggtgcagttctacggcctgagcgagaacgacgagtggacccaggacagagccaagcccgtgacccagatcgtgtctgccgaagcctggggcagagccgattgcgacgtgaagctggtggaaaagagcttcgagacagacaccaacctgaacttccagaacctgagcgtgatcggcttcagaatcctgctgctgaaagtggccggctttaacctgctgatgaccctgcggctgtggtccagc

SEQ ID NO: 4788 - DNA, 2703 bp, synthetic construct
  source 1..2703: mol_type = other DNA
atggccttaccagtgaccgccttgctcctgccgctggccttgctgctccacgccgccaggccggaagtgcagctggttgaatctggcggaggactggttcagcctggcggatctctgagactgtcttgtgccgccagcggcttcagcttcagcgacttttggatgagctgggtccgacaggcccctggcaaaggacttgaatgggtcgccacaatcagccaggccggcagcgagaaggactacgtggactctgtgaagggcagattcaccatcagccgggacaacgccaagaagtccctgtacctccagatgaacagcctgagagccgaggacaccgccgtgtactattgtgcctctggcgtgtacagcttcgactacagaggccagggcaccctggtcacagtctcttctggtaccggcggaggcggatctggcggcggaggtagcggtggcggaggatctgaattcgacgtcgtgatgacccagagccctctgagcctgcctgtgacactgggacagcctgccagcatctcctgtcggagcagccagagcatcgtgcacagcgacggcaacacctacctggaatggtatcagcagcggccaggccagagccccagacggctgatctacaaggtgtccaacagattcagcggcgtgcccgacagattctccggcagcggctctggcaccgacttcaccctgaagatcagcagagtggaagccgaggacgtgggcgtgtactactgttttcaaggcagccacgccccctggacctttggcggaggaacaaaggtggaaatcaagctcgagatccagaaccctgatcctgccgtgtaccagctgcgggatagcaagagcagcgacaagagcgtgtgtctgttcaccgacttcgacagccagaccaacgtgtcccagagcaaggactccgacgtgtacatcaccgataagtgcgtgctggacatgcggagcatggacttcaagagcaactccgccgtggcctggtccaacaagtccgatttcgcctgcgccaacgccttcaacaacagcattatccccgaggacacattcttcccaagccccgagagcagctgcggctttaccagcgagagctaccagcagggcgtgctgagcgccaccatcctgtacgagatcctgctgggcaaggccaccctgtacgccgtgctggtgtctgccctggtgctgatggctatggtcaagcggaaggacagccggggacgcgccaagagaagcggatctggcgtgaagcagaccctgaatttcgacctgctgaagctggctggcgacgtggaatccaacccaggccctactagtatggactggatttggcgcatccttttccttgtcggcgctgctaccggcgcgcattccgggccccagctccagctgcaagagtctggacctggcctggtcaagcctagcgagacactgagcctgacctgtaccgtgtccggcgatagcatcagcagcggcgattactactggggctggatcagacagcctcctggcaaaggactggaatggatcggccacatctactacagcggcgtgacctactacaaccccagcctgaagtccagagtgaccatcagcgtggacaccagccggaaccagttctccctgaagctgtctagcgtgacagccgccgataccgccgtgtactactgcaccagagaggacagcagcaactggcggagtagaggccagggaacactggtcacagttagctctggatccggcggaggcggaagtggaggcggaggatctggcggcggaggctctttcgaagaagtgcaactggtggaatcaggcggcggactggtgcagcctggcggatctctgagactgagctgtgccgccagcggcttcaccttcagcagctacggaatgcactgggtgcgccaggcccctggcaaaggactggaatgggtggcctacatcaccaccagaagcagcaccatctactacgccgacagcgtgaagggccggttcaccatctccagagacaacgccaagaacagcctgtacctccagatgaactccctgcgggccgaggacaccgccgtgtactattgcaccagagagcccctgaccggctactacgctatggactattggggccagggcaccagcgtgaccgtgtctagtacgcgtgaggacctgaagaacgtgttcccacctgaggtggccgtgttcgagcctagcgaggccgagatcagccacacccagaaagccaccctcgtgtgcctggctaccggcttctaccccgaccatgtggaactgtcttggtgggtcaacggcaaagaggtgcacagcggcgtgtgtaccgacccccagccactgaaagaacagcccgccctgaacgacagccggtactgcctgagcagcagactgagagtgtccgccaccttctggcagaacccccggaaccacttcagatgccaggtgcagttctacggcctgagcgagaacgacgagtggacccaggacagagccaagcccgtgacccagatcgtgtctgccgaagcctggggcagagccgattgcgacgtgaagctggtggaaaagagcttcgagacagacaccaacctgaacttccagaacctgagcgtgatcggcttcagaatcctgctgctgaaagtggccggctttaacctgctgatgaccctgcggctgtggtccagc

SEQ ID NO: 4789 - DNA, 2679 bp, synthetic construct
  source 1..2679: mol_type = other DNA
atggccttaccagtgaccgccttgctcctgccgctggccttgctgctccacgccgccaggccggaagtgcagctggttgaatctggcggaggactggttcagcctggcggatctctgagactgtcttgtgccgccagcggcttcagcttcagcgacttttggatgagctgggtccgacaggcccctggcaaaggacttgaatgggtcgccacaatcagccaggccggcagcgagaaggactacgtggactctgtgaagggcagattcaccatcagccgggacaacgccaagaagtccctgtacctccagatgaacagcctgagagccgaggacaccgccgtgtactattgtgcctctggcgtgtacagcttcgactacagaggccagggcaccctggtcacagtctcttctggtaccggcggaggcggatctggcggcggaggtagcggtggcggaggatctgaattcgacatccagatgacccagagccccagcagcctgtctgccagcgtgggcgacagagtgaccatcacctgtagagccagccagagcatcagcctgtggctgaactggtatcagcagaagcccggcaaggcccccaagctgctgatctacgccgccagcacactccagagcggcgtgccaagcagattttccggcagcggctccggcaccgacttcaccctgacaatcagctccctccagcccgaggacttcgccacctactactgccagcagtactacaccagcccctacaccttcggccagggcaccaaggtggaaatcaagagactcgagatccagaaccctgatcctgccgtgtaccagctgcgggatagcaagagcagcgacaagagcgtgtgtctgttcaccgacttcgacagccagaccaacgtgtcccagagcaaggactccgacgtgtacatcaccgataagtgcgtgctggacatgcggagcatggacttcaagagcaactccgccgtggcctggtccaacaagtccgatttcgcctgcgccaacgccttcaacaacagcattatccccgaggacacattcttcccaagccccgagagcagctgcggctttaccagcgagagctaccagcagggcgtgctgagcgccaccatcctgtacgagatcctgctgggcaaggccaccctgtacgccgtgctggtgtctgccctggtgctgatggctatggtcaagcggaaggacagccggggacgcgccaagagaagcggatctggcgtgaagcagaccctgaatttcgacctgctgaagctggctggcgacgtggaatccaacccaggccctactagtatggactggatttggcgcatccttttccttgtcggcgctgctaccggcgcgcattccgggccccagctccagctgcaagagtctggacctggcctggtcaagcctagcgagacactgagcctgacctgtaccgtgtccggcgatagcatcagcagcggcgattactactggggctggatcagacagcctcctggcaaaggactggaatggatcggccacatctactacagcggcgtgacctactacaaccccagcctgaagtccagagtgaccatcagcgtggacaccagccggaaccagttctccctgaagctgtctagcgtgacagccgccgataccgccgtgtactactgcaccagagaggacagcagcaactggcggagtagaggccagggaacactggtcacagttagctctggatccggcggaggcggaagtggaggcggaggatctggcggcggaggctctttcgaacaggtgcaactgctggaatctggcggcggactggtgcagcctggcggatctctgagactgagctgtgccgccagcggcttcaccttcagcagctacgccatgagctgggtgcgccaggcccctggaaaaggactggaatgggtgtccgtgatccggtccagcggcagcagcacctattacgccgatagcgtgaagggccggttcaccatcagccgggacaacagcaagaacaccctgtacctccagatgaacagcctgcgggccgaggacaccgccgtgtactattgtgctaggggaggcggctacttcgactactggggccagggaacactcgtgaccgtgtcctctacgcgtgaggacctgaagaacgtgttcccacctgaggtggccgtgttcgagcctagcgaggccgagatcagccacacccagaaagccaccctcgtgtgcctggctaccggcttctaccccgaccatgtggaactgtcttggtgggtcaacggcaaagaggtgcacagcggcgtgtgtaccgacccccagccactgaaagaacagcccgccctgaacgacagccggtactgcctgagcagcagactgagagtgtccgccaccttctggcagaacccccggaaccacttcagatgccaggtgcagttctacggcctgagcgagaacgacgagtggacccaggacagagccaagcccgtgacccagatcgtgtctgccgaagcctggggcagagccgattgcgacgtgaagctggtggaaaagagcttcgagacagacaccaacctgaacttccagaacctgagcgtgatcggcttcagaatcctgctgctgaaagtggccggctttaacctgctgatgaccctgcggctgtggtccagc

SEQ ID NO: 4790 - DNA, 2688 bp, synthetic construct
  source 1..2688: mol_type = other DNA
atggccttaccagtgaccgccttgctcctgccgctggccttgctgctccacgccgccaggccggaagtgcagctggttgaatctggcggaggactggttcagcctggcggatctctgagactgtcttgtgccgccagcggcttcagcttcagcgacttttggatgagctgggtccgacaggcccctggcaaaggacttgaatgggtcgccacaatcagccaggccggcagcgagaaggactacgtggactctgtgaagggcagattcaccatcagccgggacaacgccaagaagtccctgtacctccagatgaacagcctgagagccgaggacaccgccgtgtactattgtgcctctggcgtgtacagcttcgactacagaggccagggcaccctggtcacagtctcttctggtaccggcggaggcggatctggcggcggaggtagcggtggcggaggatctgaattcgacatccagatgacccagagccccagcagcctgtctgccagcgtgggcgacagagtgaccatcacctgtagagccagccagagcatcagcagctacctgaactggtatcagcagaagcccggcaaggcccccaaactgctgatctacgccgtgtccacactccagagcggcgtgcccagcagattttctggcagcggctccggcaccgacttcaccctgacaatcagctccctccagcccgaggacttcgccacctactactgtcagcagagcggcaccttccctcccaccacatttggacagggcaccaaggtggaaatcaagagactcgagatccagaaccctgatcctgccgtgtaccagctgcgggatagcaagagcagcgacaagagcgtgtgtctgttcaccgacttcgacagccagaccaacgtgtcccagagcaaggactccgacgtgtacatcaccgataagtgcgtgctggacatgcggagcatggacttcaagagcaactccgccgtggcctggtccaacaagtccgatttcgcctgcgccaacgccttcaacaacagcattatccccgaggacacattcttcccaagccccgagagcagctgcggctttaccagcgagagctaccagcagggcgtgctgagcgccaccatcctgtacgagatcctgctgggcaaggccaccctgtacgccgtgctggtgtctgccctggtgctgatggctatggtcaagcggaaggacagccggggacgcgccaagagaagcggatctggcgtgaagcagaccctgaatttcgacctgctgaagctggctggcgacgtggaatccaacccaggccctactagtatggactggatttggcgcatccttttccttgtcggcgctgctaccggcgcgcattccgggccccagctccagctgcaagagtctggacctggcctggtcaagcctagcgagacactgagcctgacctgtaccgtgtccggcgatagcatcagcagcggcgattactactggggctggatcagacagcctcctggcaaaggactggaatggatcggccacatctactacagcggcgtgacctactacaaccccagcctgaagtccagagtgaccatcagcgtggacaccagccggaaccagttctccctgaagctgtctagcgtgacagccgccgataccgccgtgtactactgcaccagagaggacagcagcaactggcggagtagaggccagggaacactggtcacagttagctctggatccggcggaggcggaagtggaggcggaggatctggcggcggaggctctttcgaacaggtgcaactgctggaatctggcggcggactggtgcagcctggcggatctctgagactgagctgtgccgccagcggcttcaccttcagcagccacggaatgcactgggtgcgccaggcccctggaaagggactggaatgggtgtccgtgatctccggcagcggcagcaataccggctacgccgatagcgtgaagggccggttcaccatcagccgggacaacagcaagaacaccctgtacctccagatgaacagcctgcgggccgaggacaccgccgtgtactattgtgccagacagtggggcagctacgccttcgattcttggggccagggcaccctcgtgaccgtgtcatctacgcgtgaggacctgaagaacgtgttcccacctgaggtggccgtgttcgagcctagcgaggccgagatcagccacacccagaaagccaccctcgtgtgcctggctaccggcttctaccccgaccatgtggaactgtcttggtgggtcaacggcaaagaggtgcacagcggcgtgtgtaccgacccccagccactgaaagaacagcccgccctgaacgacagccggtactgcctgagcagcagactgagagtgtccgccaccttctggcagaacccccggaaccacttcagatgccaggtgcagttctacggcctgagcgagaacgacgagtggacccaggacagagccaagcccgtgacccagatcgtgtctgccgaagcctggggcagagccgattgcgacgtgaagctggtggaaaagagcttcgagacagacaccaacctgaacttccagaacctgagcgtgatcggcttcagaatcctgctgctgaaagtggccggctttaacctgctgatgaccctgcggctgtggtccagc

SEQ ID NO: 4791 - DNA, 2718 bp, synthetic construct
  source 1..2718: mol_type = other DNA
atggccttaccagtgaccgccttgctcctgccgctggccttgctgctccacgccgccaggccggaagtgcagctggttgaatctggcggaggactggttcagcctggcggatctctgagactgtcttgtgccgccagcggcttcagcttcagcgacttttggatgagctgggtccgacaggcccctggcaaaggacttgaatgggtcgccacaatcagccaggccggcagcgagaaggactacgtggactctgtgaagggcagattcaccatcagccgggacaacgccaagaagtccctgtacctccagatgaacagcctgagagccgaggacaccgccgtgtactattgtgcctctggcgtgtacagcttcgactacagaggccagggcaccctggtcacagtctcttctggtaccggcggaggcggatctggcggcggaggtagcggtggcggaggatctgaattcgacatcgtgatgagccagagccctagcagcctggccgtgtccgtgggcgagaaagtgaccatgagctgcaagagcagccagtccctgctgcacagcagcaaccagaagaactacctggcctggtatcagcagaagcccggccagtcccccaaggtgctgatctactgggccagcaccagagaaagcggcgtgcccgatagattcaccggcagcggctctggcaccgacttcaccctgaccatcaccagcgtgaagtccgaggacctggctgtgtactactgccagcagtattacagctacccctggaccttcggcggaggcacccggctggaaatcaaaagactcgagatccagaaccctgatcctgccgtgtaccagctgcgggatagcaagagcagcgacaagagcgtgtgtctgttcaccgacttcgacagccagaccaacgtgtcccagagcaaggactccgacgtgtacatcaccgataagtgcgtgctggacatgcggagcatggacttcaagagcaactccgccgtggcctggtccaacaagtccgatttcgcctgcgccaacgccttcaacaacagcattatccccgaggacacattcttcccaagccccgagagcagctgcggctttaccagcgagagctaccagcagggcgtgctgagcgccaccatcctgtacgagatcctgctgggcaaggccaccctgtacgccgtgctggtgtctgccctggtgctgatggctatggtcaagcggaaggacagccggggacgcgccaagagaagcggatctggcgtgaagcagaccctgaatttcgacctgctgaagctggctggcgacgtggaatccaacccaggccctactagtatggactggatttggcgcatccttttccttgtcggcgctgctaccggcgcgcattccgggccccagctccagctgcaagagtctggacctggcctggtcaagcctagcgagacactgagcctgacctgtaccgtgtccggcgatagcatcagcagcggcgattactactggggctggatcagacagcctcctggcaaaggactggaatggatcggccacatctactacagcggcgtgacctactacaaccccagcctgaagtccagagtgaccatcagcgtggacaccagccggaaccagttctccctgaagctgtctagcgtgacagccgccgataccgccgtgtactactgcaccagagaggacagcagcaactggcggagtagaggccagggaacactggtcacagttagctctggatccggcggaggcggaagtggaggcggaggatctggcggcggaggctctttcgaagaagtgcaactccagcagagcgtggccgagcttgtgaagcctggcgcttccgtgaagatgtcctgcaaggtgtccggctacaccctgacagaccacaccatccactggatgaagcagcggcctgagcagggcctggaatggatcggctacatctaccccagggacggcatcaccggctacaacgagaagttcaagggcaaggccacactgaccgccgacaccagcagcagcacagcctacatgcaactgaacagcctgaccagcgaggacagcgccgtgtacttctgtgccagatggggctacagctacagaaactacgcctactactacgactactggggccagggcacaaccctgaccgtgtctagtacgcgtgaggacctgaagaacgtgttcccacctgaggtggccgtgttcgagcctagcgaggccgagatcagccacacccagaaagccaccctcgtgtgcctggctaccggcttctaccccgaccatgtggaactgtcttggtgggtcaacggcaaagaggtgcacagcggcgtgtgtaccgacccccagccactgaaagaacagcccgccctgaacgacagccggtactgcctgagcagcagactgagagtgtccgccaccttctggcagaacccccggaaccacttcagatgccaggtgcagttctacggcctgagcgagaacgacgagtggacccaggacagagccaagcccgtgacccagatcgtgtctgccgaagcctggggcagagccgattgcgacgtgaagctggtggaaaagagcttcgagacagacaccaacctgaacttccagaacctgagcgtgatcggcttcagaatcctgctgctgaaagtggccggctttaacctgctgatgaccctgcggctgtggtccagc

SEQ ID NO: 4792 - DNA, 2709 bp, synthetic construct
  source 1..2709: mol_type = other DNA
atggccttaccagtgaccgccttgctcctgccgctggccttgctgctccacgccgccaggccggaagtgcagctggttgaatctggcggaggactggttcagcctggcggatctctgagactgtcttgtgccgccagcggcttcagcttcagcgacttttggatgagctgggtccgacaggcccctggcaaaggacttgaatgggtcgccacaatcagccaggccggcagcgagaaggactacgtggactctgtgaagggcagattcaccatcagccgggacaacgccaagaagtccctgtacctccagatgaacagcctgagagccgaggacaccgccgtgtactattgtgcctctggcgtgtacagcttcgactacagaggccagggcaccctggtcacagtctcttctggtaccggcggaggcggatctggcggcggaggtagcggtggcggaggatctgaattcgagatcgtgctgacacagagccctggcaccctgagcctgtctccaggcgaaagagccacactgagctgtcgggccagccagagcgtgtccagctcttacctggcctggtatcagcagaagcccggccaggctccccggctgctgatctacggaacaagcagcagagccaccggcatccccgacagattttctggcagcggctccggcaccgacttcaccctgacaatcagcagactggaacccgaggacttcgccgtgtactactgccagcagtacggcagcagccccttcacctttggcggaggcaccaaggtggaaatcaagagactcgagatccagaaccctgatcctgccgtgtaccagctgcgggatagcaagagcagcgacaagagcgtgtgtctgttcaccgacttcgacagccagaccaacgtgtcccagagcaaggactccgacgtgtacatcaccgataagtgcgtgctggacatgcggagcatggacttcaagagcaactccgccgtggcctggtccaacaagtccgatttcgcctgcgccaacgccttcaacaacagcattatccccgaggacacattcttcccaagccccgagagcagctgcggctttaccagcgagagctaccagcagggcgtgctgagcgccaccatcctgtacgagatcctgctgggcaaggccaccctgtacgccgtgctggtgtctgccctggtgctgatggctatggtcaagcggaaggacagccggggacgcgccaagagaagcggatctggcgtgaagcagaccctgaatttcgacctgctgaagctggctggcgacgtggaatccaacccaggccctactagtatggactggatttggcgcatccttttccttgtcggcgctgctaccggcgcgcattccgggccccagctccagctgcaagagtctggacctggcctggtcaagcctagcgagacactgagcctgacctgtaccgtgtccggcgatagcatcagcagcggcgattactactggggctggatcagacagcctcctggcaaaggactggaatggatcggccacatctactacagcggcgtgacctactacaaccccagcctgaagtccagagtgaccatcagcgtggacaccagccggaaccagttctccctgaagctgtctagcgtgacagccgccgataccgccgtgtactactgcaccagagaggacagcagcaactggcggagtagaggccagggaacactggtcacagttagctctggatccggcggaggcggaagtggaggcggaggatctggcggcggaggctctttcgaacaggtgcaactccaggaatctggccccggactggctaagcccagcgagacactgagcctgacctgtaccgtgtccggcgacagcatcaccagctactactggtcctggatcagacagccccctggcaagggcctggaatggatcggctacatctactacagcggcagcaccaactacaaccccagcctgaagtccagagtgaccatcagcgtggacaccagcaagaaccagttctccctgaagctgagcagcgtgacagccgccgacaccgccgtgtattattgcgccagagatcagcggagaatcgccgctgccggcacccacttttacggcatggatgtgtggggccagggcaccaccgtgaccgtgtcatctacgcgtgaggacctgaagaacgtgttcccacctgaggtggccgtgttcgagcctagcgaggccgagatcagccacacccagaaagccaccctcgtgtgcctggctaccggcttctaccccgaccatgtggaactgtcttggtgggtcaacggcaaagaggtgcacagcggcgtgtgtaccgacccccagccactgaaagaacagcccgccctgaacgacagccggtactgcctgagcagcagactgagagtgtccgccaccttctggcagaacccccggaaccacttcagatgccaggtgcagttctacggcctgagcgagaacgacgagtggacccaggacagagccaagcccgtgacccagatcgtgtctgccgaagcctggggcagagccgattgcgacgtgaagctggtggaaaagagcttcgagacagacaccaacctgaacttccagaacctgagcgtgatcggcttcagaatcctgctgctgaaagtggccggctttaacctgctgatgaccctgcggctgtggtccagc

SEQ ID NO: 4793 - DNA, 2685 bp, synthetic construct
  source 1..2685: mol_type = other DNA
atggccttaccagtgaccgccttgctcctgccgctggccttgctgctccacgccgccaggccggaagtgcagctggttgaatctggcggaggactggttcagcctggcggatctctgagactgtcttgtgccgccagcggcttcagcttcagcgacttttggatgagctgggtccgacaggcccctggcaaaggacttgaatgggtcgccacaatcagccaggccggcagcgagaaggactacgtggactctgtgaagggcagattcaccatcagccgggacaacgccaagaagtccctgtacctccagatgaacagcctgagagccgaggacaccgccgtgtactattgtgcctctggcgtgtacagcttcgactacagaggccagggcaccctggtcacagtctcttctggtaccggcggaggcggatctggcggcggaggtagcggtggcggaggatctgaattcgacatcctgctgacccagagccccgtgatcctgtccgtgtctcctggcgagagagtgtccttcagctgtcgggccagccagagcatcggcaccaacatccactggtatcagcagcggaccaacggcagccccagactgctgattaagtacgccagcgagtccatcagcggcatccccagcagattttccggcagcggctccggcaccgacttcaccctgagcatcaacagcgtggaaagcgaggacattgccgactactactgccagcagaacaacaactggcccaccaccttcggagccggcaccaagctggaactgaagctcgagatccagaaccctgatcctgccgtgtaccagctgcgggatagcaagagcagcgacaagagcgtgtgtctgttcaccgacttcgacagccagaccaacgtgtcccagagcaaggactccgacgtgtacatcaccgataagtgcgtgctggacatgcggagcatggacttcaagagcaactccgccgtggcctggtccaacaagtccgatttcgcctgcgccaacgccttcaacaacagcattatccccgaggacacattcttcccaagccccgagagcagctgcggctttaccagcgagagctaccagcagggcgtgctgagcgccaccatcctgtacgagatcctgctgggcaaggccaccctgtacgccgtgctggtgtctgccctggtgctgatggctatggtcaagcggaaggacagccggggacgcgccaagagaagcggatctggcgtgaagcagaccctgaatttcgacctgctgaagctggctggcgacgtggaatccaacccaggccctactagtatggactggatttggcgcatccttttccttgtcggcgctgctaccggcgcgcattccgggccccagctccagctgcaagagtctggacctggcctggtcaagcctagcgagacactgagcctgacctgtaccgtgtccggcgatagcatcagcagcggcgattactactggggctggatcagacagcctcctggcaaaggactggaatggatcggccacatctactacagcggcgtgacctactacaaccccagcctgaagtccagagtgaccatcagcgtggacaccagccggaaccagttctccctgaagctgtctagcgtgacagccgccgataccgccgtgtactactgcaccagagaggacagcagcaactggcggagtagaggccagggaacactggtcacagttagctctggatccggcggaggcggaagtggaggcggaggatctggcggcggaggctctttcgaacaggtgcagctgaagcagagcggacctggcctggtgcagcctagccagagcctgtccatcacctgtaccgtgtccggcttcagcctgaccaactacggcgtgcactgggtgcgccagagccctggaaaaggactggaatggctgggagtgatttggagcggcggcaacaccgactacaacacccccttcaccagcagactgtctatcaacaaggacaacagcaagagccaggtgttcttcaagatgaacagcctccagagcaacgacaccgccatctactactgtgctagagccctgacctactatgactacgagttcgcctactggggccagggcacactcgtgacagtgtctgctacgcgtgaggacctgaagaacgtgttcccacctgaggtggccgtgttcgagcctagcgaggccgagatcagccacacccagaaagccaccctcgtgtgcctggctaccggcttctaccccgaccatgtggaactgtcttggtgggtcaacggcaaagaggtgcacagcggcgtgtgtaccgacccccagccactgaaagaacagcccgccctgaacgacagccggtactgcctgagcagcagactgagagtgtccgccaccttctggcagaacccccggaaccacttcagatgccaggtgcagttctacggcctgagcgagaacgacgagtggacccaggacagagccaagcccgtgacccagatcgtgtctgccgaagcctggggcagagccgattgcgacgtgaagctggtggaaaagagcttcgagacagacaccaacctgaacttccagaacctgagcgtgatcggcttcagaatcctgctgctgaaagtggccggctttaacctgctgatgaccctgcggctgtggtccagc

SEQ ID NO: 4794 - DNA, 2664 bp, synthetic construct
  source 1..2664: mol_type = other DNA
atggccttaccagtgaccgccttgctcctgccgctggccttgctgctccacgccgccaggccggaagtgcagctggttgaatctggcggaggactggttcagcctggcggatctctgagactgtcttgtgccgccagcggcttcagcttcagcgacttttggatgagctgggtccgacaggcccctggcaaaggacttgaatgggtcgccacaatcagccaggccggcagcgagaaggactacgtggactctgtgaagggcagattcaccatcagccgggacaacgccaagaagtccctgtacctccagatgaacagcctgagagccgaggacaccgccgtgtactattgtgcctctggcgtgtacagcttcgactacagaggccagggcaccctggtcacagtctcttctggtaccggcggaggcggatctggcggcggaggtagcggtggcggaggatctgaattcatgacccagagccccaagttcctgctggtgtctgccggcgacagagtgaccctgacatgcaaggccagccagagcgtgaacaacgacgtgtactggtatcagcaggaacccggccagtcccccaagctgctgatctactgggccagcaccagagaaagcggcgtgcccgatagattcaccggcagcggctctggcaccgacttcaccctgacaatcagcagcgtgcaggccgaggacctggccgtgtactactgcaagcagagctacaacctgtacaccttcggcggaggcaccaagctggaaatcaagagactcgagatccagaaccctgatcctgccgtgtaccagctgcgggatagcaagagcagcgacaagagcgtgtgtctgttcaccgacttcgacagccagaccaacgtgtcccagagcaaggactccgacgtgtacatcaccgataagtgcgtgctggacatgcggagcatggacttcaagagcaactccgccgtggcctggtccaacaagtccgatttcgcctgcgccaacgccttcaacaacagcattatccccgaggacacattcttcccaagccccgagagcagctgcggctttaccagcgagagctaccagcagggcgtgctgagcgccaccatcctgtacgagatcctgctgggcaaggccaccctgtacgccgtgctggtgtctgccctggtgctgatggctatggtcaagcggaaggacagccggggacgcgccaagagaagcggatctggcgtgaagcagaccctgaatttcgacctgctgaagctggctggcgacgtggaatccaacccaggccctactagtatggactggatttggcgcatccttttccttgtcggcgctgctaccggcgcgcattccgggccccagctccagctgcaagagtctggacctggcctggtcaagcctagcgagacactgagcctgacctgtaccgtgtccggcgatagcatcagcagcggcgattactactggggctggatcagacagcctcctggcaaaggactggaatggatcggccacatctactacagcggcgtgacctactacaaccccagcctgaagtccagagtgaccatcagcgtggacaccagccggaaccagttctccctgaagctgtctagcgtgacagccgccgataccgccgtgtactactgcaccagagaggacagcagcaactggcggagtagaggccagggaacactggtcacagttagctctggatccggcggaggcggaagtggaggcggaggatctggcggcggaggctctttcgaagaatctggaagaggactggtgcagcctggcggcagcagaaagctgtcttgtgccgccagcggcttcaccttcagcaccagcggaatgcactgggtgcgccaggcccctgagaagggactggaatgggtggcctacatcagctccggcagcaccaccatctaccacgccgataccgtgaagggccggttcaccatcagccgggacaaccccaagaataccctgttcctccagatgaccagcctgcggagcgaggacaccgccatgtactattgctgcgccagaagcggccagttcggcaactacttcgactactggggccagggcaccaccctgaccgtgtcatctacgcgtgaggacctgaagaacgtgttcccacctgaggtggccgtgttcgagcctagcgaggccgagatcagccacacccagaaagccaccctcgtgtgcctggctaccggcttctaccccgaccatgtggaactgtcttggtgggtcaacggcaaagaggtgcacagcggcgtgtgtaccgacccccagccactgaaagaacagcccgccctgaacgacagccggtactgcctgagcagcagactgagagtgtccgccaccttctggcagaacccccggaaccacttcagatgccaggtgcagttctacggcctgagcgagaacgacgagtggacccaggacagagccaagcccgtgacccagatcgtgtctgccgaagcctggggcagagccgattgcgacgtgaagctggtggaaaagagcttcgagacagacaccaacctgaacttccagaacctgagcgtgatcggcttcagaatcctgctgctgaaagtggccggctttaacctgctgatgaccctgcggctgtggtccagc

SEQ ID NO: 4795 - DNA, 2679 bp, synthetic construct
  source 1..2679: mol_type = other DNA
atggccttaccagtgaccgccttgctcctgccgctggccttgctgctccacgccgccaggccggaagtgcagctggttgaatctggcggaggactggttcagcctggcggatctctgagactgtcttgtgccgccagcggcttcagcttcagcgacttttggatgagctgggtccgacaggcccctggcaaaggacttgaatgggtcgccacaatcagccaggccggcagcgagaaggactacgtggactctgtgaagggcagattcaccatcagccgggacaacgccaagaagtccctgtacctccagatgaacagcctgagagccgaggacaccgccgtgtactattgtgcctctggcgtgtacagcttcgactacagaggccagggcaccctggtcacagtctcttctggtaccggcggaggcggatctggcggcggaggtagcggtggcggaggatctgaattccagagcccatctagcctggctgtgtctgccggcgagaaagtgaccatgagctgcaagagcagccagagcctgctgaacagccggacccggaagaactacctggcctggtatcagcagaagcccggccagagccccaagctgctgatctactgggccagcaccagagaaagcggcgtgcccgatagattcaccggctctggcagcggcaccgacttcaccctgacaatcagcagcgtgcaggccgaggacctggccgtgtactactgcaagcagagcaacctgtacaccttcggcggaggcaccaagctggaaatcaagctcgagatccagaaccctgatcctgccgtgtaccagctgcgggatagcaagagcagcgacaagagcgtgtgtctgttcaccgacttcgacagccagaccaacgtgtcccagagcaaggactccgacgtgtacatcaccgataagtgcgtgctggacatgcggagcatggacttcaagagcaactccgccgtggcctggtccaacaagtccgatttcgcctgcgccaacgccttcaacaacagcattatccccgaggacacattcttcccaagccccgagagcagctgcggctttaccagcgagagctaccagcagggcgtgctgagcgccaccatcctgtacgagatcctgctgggcaaggccaccctgtacgccgtgctggtgtctgccctggtgctgatggctatggtcaagcggaaggacagccggggacgcgccaagagaagcggatctggcgtgaagcagaccctgaatttcgacctgctgaagctggctggcgacgtggaatccaacccaggccctactagtatggactggatttggcgcatccttttccttgtcggcgctgctaccggcgcgcattccgggccccagctccagctgcaagagtctggacctggcctggtcaagcctagcgagacactgagcctgacctgtaccgtgtccggcgatagcatcagcagcggcgattactactggggctggatcagacagcctcctggcaaaggactggaatggatcggccacatctactacagcggcgtgacctactacaaccccagcctgaagtccagagtgaccatcagcgtggacaccagccggaaccagttctccctgaagctgtctagcgtgacagccgccgataccgccgtgtactactgcaccagagaggacagcagcaactggcggagtagaggccagggaacactggtcacagttagctctggatccggcggaggcggaagtggaggcggaggatctggcggcggaggctctttcgaacaggtgcagctggaagagtctggacccgagcttgtgaagcctggggccagcgtgaagctgtcctgtaaagccagcggctacaccttcaccgagtacatcatccactgggtcaagcagcggagcggccagggcctggaatggatcggctggttttaccctggctccggcagcatcaagtacaacgagaagttcaaggacaaggccaccctgaccgccgacaagtccagcagcaccgtgtacatggaactgagcggcctgaccagcgaggacagcgccgtgtatttctgcgccagacacgacggctacagctacttcgactattggggccagggcaccacactgaccgtgtcctctacgcgtgaggacctgaagaacgtgttcccacctgaggtggccgtgttcgagcctagcgaggccgagatcagccacacccagaaagccaccctcgtgtgcctggctaccggcttctaccccgaccatgtggaactgtcttggtgggtcaacggcaaagaggtgcacagcggcgtgtgtaccgacccccagccactgaaagaacagcccgccctgaacgacagccggtactgcctgagcagcagactgagagtgtccgccaccttctggcagaacccccggaaccacttcagatgccaggtgcagttctacggcctgagcgagaacgacgagtggacccaggacagagccaagcccgtgacccagatcgtgtctgccgaagcctggggcagagccgattgcgacgtgaagctggtggaaaagagcttcgagacagacaccaacctgaacttccagaacctgagcgtgatcggcttcagaatcctgctgctgaaagtggccggctttaacctgctgatgaccctgcggctgtggtccagc

SEQ ID NO: 4796 - DNA, 2688 bp, synthetic construct
  source 1..2688: mol_type = other DNA
atggccttaccagtgaccgccttgctcctgccgctggccttgctgctccacgccgccaggccggaagtgcagctggttgaatctggcggaggactggttcagcctggcggatctctgagactgtcttgtgccgccagcggcttcagcttcagcgacttttggatgagctgggtccgacaggcccctggcaaaggacttgaatgggtcgccacaatcagccaggccggcagcgagaaggactacgtggactctgtgaagggcagattcaccatcagccgggacaacgccaagaagtccctgtacctccagatgaacagcctgagagccgaggacaccgccgtgtactattgtgcctctggcgtgtacagcttcgactacagaggccagggcaccctggtcacagtctcttctggtaccggcggaggcggatctggcggcggaggtagcggtggcggaggatctgaattcgacatccagatgacccagagccccagcagcctgtctgcctctctgggcgagagagtgtccctgacctgtcgggccacacaggaactgagcggctacctgtcttggctgcagcagaagcccgacggcaccatcaagcggctgatctacgccgccagcaccctggatagcggcgtgcccaagagattcagcggcaacagaagcggcagcgactacagcctgaccatcagctccctggaaagcgaggacttcgccgactactactgcctgcagtacgccatctacccctacaccttcggcggaggcaccaagctggaaatcaagctcgagatccagaaccctgatcctgccgtgtaccagctgcgggatagcaagagcagcgacaagagcgtgtgtctgttcaccgacttcgacagccagaccaacgtgtcccagagcaaggactccgacgtgtacatcaccgataagtgcgtgctggacatgcggagcatggacttcaagagcaactccgccgtggcctggtccaacaagtccgatttcgcctgcgccaacgccttcaacaacagcattatccccgaggacacattcttcccaagccccgagagcagctgcggctttaccagcgagagctaccagcagggcgtgctgagcgccaccatcctgtacgagatcctgctgggcaaggccaccctgtacgccgtgctggtgtctgccctggtgctgatggctatggtcaagcggaaggacagccggggacgcgccaagagaagcggatctggcgtgaagcagaccctgaatttcgacctgctgaagctggctggcgacgtggaatccaacccaggccctactagtatggactggatttggcgcatccttttccttgtcggcgctgctaccggcgcgcattccgggccccagctccagctgcaagagtctggacctggcctggtcaagcctagcgagacactgagcctgacctgtaccgtgtccggcgatagcatcagcagcggcgattactactggggctggatcagacagcctcctggcaaaggactggaatggatcggccacatctactacagcggcgtgacctactacaaccccagcctgaagtccagagtgaccatcagcgtggacaccagccggaaccagttctccctgaagctgtctagcgtgacagccgccgataccgccgtgtactactgcaccagagaggacagcagcaactggcggagtagaggccagggaacactggtcacagttagctctggatccggcggaggcggaagtggaggcggaggatctggcggcggaggctctttcgaagaggtgcaactgcagcagtctggccccgagcttgtgaagcctggcgcctccgtgaagatgagctgcaaggccagcggctacacctttaccagctacttcatccactgggtcaagcagaaacccggccagggcctggaatggatcggcttcatcaacccttacaacgacggcagcaagtacaacgagaagttcaagggcaaggccaccctgaccagcgacaagagcagcagcaccgcctacatggaactgtccagcctgacatccgaggacagcgccgtgtactactgcaccagggacgacggctactacggctacgccatggactactggggccagggaacaagcgtcaccgtgtcctctacgcgtgaggacctgaagaacgtgttcccacctgaggtggccgtgttcgagcctagcgaggccgagatcagccacacccagaaagccaccctcgtgtgcctggctaccggcttctaccccgaccatgtggaactgtcttggtgggtcaacggcaaagaggtgcacagcggcgtgtgtaccgacccccagccactgaaagaacagcccgccctgaacgacagccggtactgcctgagcagcagactgagagtgtccgccaccttctggcagaacccccggaaccacttcagatgccaggtgcagttctacggcctgagcgagaacgacgagtggacccaggacagagccaagcccgtgacccagatcgtgtctgccgaagcctggggcagagccgattgcgacgtgaagctggtggaaaagagcttcgagacagacaccaacctgaacttccagaacctgagcgtgatcggcttcagaatcctgctgctgaaagtggccggctttaacctgctgatgaccctgcggctgtggtccagc

SEQ ID NO: 4797 - DNA, 2703 bp, synthetic construct
  source 1..2703: mol_type = other DNA
atggccttaccagtgaccgccttgctcctgccgctggccttgctgctccacgccgccaggccggaagtgcagctggttgaatctggcggaggactggttcagcctggcggatctctgagactgtcttgtgccgccagcggcttcagcttcagcgacttttggatgagctgggtccgacaggcccctggcaaaggacttgaatgggtcgccacaatcagccaggccggcagcgagaaggactacgtggactctgtgaagggcagattcaccatcagccgggacaacgccaagaagtccctgtacctccagatgaacagcctgagagccgaggacaccgccgtgtactattgtgcctctggcgtgtacagcttcgactacagaggccagggcaccctggtcacagtctcttctggtaccggcggaggcggatctggcggcggaggtagcggtggcggaggatctgaattcgacaccatcgtgctgacacagagccctgcttccctggccgtgtccctgggacagagagccaccatctcttgcagagccagcgagagcgtggacagctacggcaacagcttcatgcactggtatcagcagaagcccggccagccccccaagctgctgatctacctggcctccaacctggaaagcggcgtgcccgccagattttctggcagcggcagcagaaccgacttcaccctgaccatcgaccccgtggaagccgatgatgccgccacctactactgccagcagaacaactacgacccctggaccttcggcggaggcaccaagctggaaatcaagctcgagatccagaaccctgatcctgccgtgtaccagctgcgggatagcaagagcagcgacaagagcgtgtgtctgttcaccgacttcgacagccagaccaacgtgtcccagagcaaggactccgacgtgtacatcaccgataagtgcgtgctggacatgcggagcatggacttcaagagcaactccgccgtggcctggtccaacaagtccgatttcgcctgcgccaacgccttcaacaacagcattatccccgaggacacattcttcccaagccccgagagcagctgcggctttaccagcgagagctaccagcagggcgtgctgagcgccaccatcctgtacgagatcctgctgggcaaggccaccctgtacgccgtgctggtgtctgccctggtgctgatggctatggtcaagcggaaggacagccggggacgcgccaagagaagcggatctggcgtgaagcagaccctgaatttcgacctgctgaagctggctggcgacgtggaatccaacccaggccctactagtatggactggatttggcgcatccttttccttgtcggcgctgctaccggcgcgcattccgggccccagctccagctgcaagagtctggacctggcctggtcaagcctagcgagacactgagcctgacctgtaccgtgtccggcgatagcatcagcagcggcgattactactggggctggatcagacagcctcctggcaaaggactggaatggatcggccacatctactacagcggcgtgacctactacaaccccagcctgaagtccagagtgaccatcagcgtggacaccagccggaaccagttctccctgaagctgtctagcgtgacagccgccgataccgccgtgtactactgcaccagagaggacagcagcaactggcggagtagaggccagggaacactggtcacagttagctctggatccggcggaggcggaagtggaggcggaggatctggcggcggaggctctttcgaagaagtgcaactccagcagagcggccctgagcttgtgaagcctggcgcttccgtgaagatgagctgcaaggccagcggctacaccttcaccagctacgtgatgcactgggtcaagcagaaacctggacagggcctggaatggatcggctacatcaacccctacaacgacggcaccaagtacaacgagaagttcaagggcaaggccaccctgacaagcgacaccagcagcagcaccgcctacatggaactgaacagcctgaccagcgaggacagcgccgtgtacttctgcgccagacccatctacttcgacaacgactacttcgattactggggccagggcaccaccctgaaggtgtcctctacgcgtgaggacctgaagaacgtgttcccacctgaggtggccgtgttcgagcctagcgaggccgagatcagccacacccagaaagccaccctcgtgtgcctggctaccggcttctaccccgaccatgtggaactgtcttggtgggtcaacggcaaagaggtgcacagcggcgtgtgtaccgacccccagccactgaaagaacagcccgccctgaacgacagccggtactgcctgagcagcagactgagagtgtccgccaccttctggcagaacccccggaaccacttcagatgccaggtgcagttctacggcctgagcgagaacgacgagtggacccaggacagagccaagcccgtgacccagatcgtgtctgccgaagcctggggcagagccgattgcgacgtgaagctggtggaaaagagcttcgagacagacaccaacctgaacttccagaacctgagcgtgatcggcttcagaatcctgctgctgaaagtggccggctttaacctgctgatgaccctgcggctgtggtccagc

SEQ ID NO: 4798 - DNA, 2688 bp, synthetic construct
  source 1..2688: mol_type = other DNA
atggccttaccagtgaccgccttgctcctgccgctggccttgctgctccacgccgccaggccggaagtgcagctggttgaatctggcggaggactggttcagcctggcggatctctgagactgtcttgtgccgccagcggcttcagcttcagcgacttttggatgagctgggtccgacaggcccctggcaaaggacttgaatgggtcgccacaatcagccaggccggcagcgagaaggactacgtggactctgtgaagggcagattcaccatcagccgggacaacgccaagaagtccctgtacctccagatgaacagcctgagagccgaggacaccgccgtgtactattgtgcctctggcgtgtacagcttcgactacagaggccagggcaccctggtcacagtctcttctggtaccggcggaggcggatctggcggcggaggtagcggtggcggaggatctgaattcgacatccagatgacccagagccccagcagcctgtctgccagcgtgggcgacagagtgaccatcacatgcaaggccagccaggacgtgggaatcgccgtggcctggtatcagcagaaacccggcaaggtgcccaagctgctgatctactgggccagcaccagacacaccggcgtgcccgatagattttccggcagcggctccggcaccgacttcaccctgacaatcagctccctccagcccgaggacgtggcaacctactactgccagcagtacagcagctacccctacaccttcggccagggcaccaaggtggaaatcaagagactcgagatccagaaccctgatcctgccgtgtaccagctgcgggatagcaagagcagcgacaagagcgtgtgtctgttcaccgacttcgacagccagaccaacgtgtcccagagcaaggactccgacgtgtacatcaccgataagtgcgtgctggacatgcggagcatggacttcaagagcaactccgccgtggcctggtccaacaagtccgatttcgcctgcgccaacgccttcaacaacagcattatccccgaggacacattcttcccaagccccgagagcagctgcggctttaccagcgagagctaccagcagggcgtgctgagcgccaccatcctgtacgagatcctgctgggcaaggccaccctgtacgccgtgctggtgtctgccctggtgctgatggctatggtcaagcggaaggacagccggggacgcgccaagagaagcggatctggcgtgaagcagaccctgaatttcgacctgctgaagctggctggcgacgtggaatccaacccaggccctactagtatggactggatttggcgcatccttttccttgtcggcgctgctaccggcgcgcattccgggccccagctccagctgcaagagtctggacctggcctggtcaagcctagcgagacactgagcctgacctgtaccgtgtccggcgatagcatcagcagcggcgattactactggggctggatcagacagcctcctggcaaaggactggaatggatcggccacatctactacagcggcgtgacctactacaaccccagcctgaagtccagagtgaccatcagcgtggacaccagccggaaccagttctccctgaagctgtctagcgtgacagccgccgataccgccgtgtactactgcaccagagaggacagcagcaactggcggagtagaggccagggaacactggtcacagttagctctggatccggcggaggcggaagtggaggcggaggatctggcggcggaggctctttcgaagaagtgcaactggtggaatcaggcggcggactggtgcagcctggcggatctctgagactgagctgtgccgccagcggcttcgacttcagccggtactggatgagctgggtgcgccaggcccctggcaaaggactggaatggatcggcgagatcaaccccgacagcagcaccatcaactacgcccccagcctgaaggacaagttcatcatcagccgggacaacgccaagaacagcctgtacctccagatgaactccctgcgggccgaggacaccgccgtgtactattgcgccagacccgacggcaactactggtacttcgacgtgtggggccagggaaccctcgtgaccgtgtcatctacgcgtgaggacctgaagaacgtgttcccacctgaggtggccgtgttcgagcctagcgaggccgagatcagccacacccagaaagccaccctcgtgtgcctggctaccggcttctaccccgaccatgtggaactgtcttggtgggtcaacggcaaagaggtgcacagcggcgtgtgtaccgacccccagccactgaaagaacagcccgccctgaacgacagccggtactgcctgagcagcagactgagagtgtccgccaccttctggcagaacccccggaaccacttcagatgccaggtgcagttctacggcctgagcgagaacgacgagtggacccaggacagagccaagcccgtgacccagatcgtgtctgccgaagcctggggcagagccgattgcgacgtgaagctggtggaaaagagcttcgagacagacaccaacctgaacttccagaacctgagcgtgatcggcttcagaatcctgctgctgaaagtggccggctttaacctgctgatgaccctgcggctgtggtccagc

SEQ ID NO: 4799 - DNA, 2688 bp, synthetic construct
  source 1..2688: mol_type = other DNA
atggccttaccagtgaccgccttgctcctgccgctggccttgctgctccacgccgccaggccggaagtgcagctggttgaatctggcggaggactggttcagcctggcggatctctgagactgtcttgtgccgccagcggcttcagcttcagcgacttttggatgagctgggtccgacaggcccctggcaaaggacttgaatgggtcgccacaatcagccaggccggcagcgagaaggactacgtggactctgtgaagggcagattcaccatcagccgggacaacgccaagaagtccctgtacctccagatgaacagcctgagagccgaggacaccgccgtgtactattgtgcctctggcgtgtacagcttcgactacagaggccagggcaccctggtcacagtctcttctggtaccggcggaggcggatctggcggcggaggtagcggtggcggaggatctgaattcgacatcgtgatgacccagagccagaagagcatgagcaccagcgtgggcgacagagtgagcatcacctgcaaggccagccaggacgtgatcaccggcgtggcctggtaccagcagaagcccggccagagccccaagctgctgatctacagcgccagctacagatacaccggcgtgcccgacagattcaccggcagcggcagcggcaccgacttcaccttcaccatcagcaacgtgcaggccgaggacctggccgtgtactactgccagcagcactacagcacccccctgaccttcggcgccggcaccaagctggagctgaagctcgagatccagaaccctgatcctgccgtgtaccagctgcgggatagcaagagcagcgacaagagcgtgtgtctgttcaccgacttcgacagccagaccaacgtgtcccagagcaaggactccgacgtgtacatcaccgataagtgcgtgctggacatgcggagcatggacttcaagagcaactccgccgtggcctggtccaacaagtccgatttcgcctgcgccaacgccttcaacaacagcattatccccgaggacacattcttcccaagccccgagagcagctgcggctttaccagcgagagctaccagcagggcgtgctgagcgccaccatcctgtacgagatcctgctgggcaaggccaccctgtacgccgtgctggtgtctgccctggtgctgatggctatggtcaagcggaaggacagccggggacgcgccaagagaagcggatctggcgtgaagcagaccctgaatttcgacctgctgaagctggctggcgacgtggaatccaacccaggccctactagtatggactggatttggcgcatccttttccttgtcggcgctgctaccggcgcgcattccgggccccagctccagctgcaagagtctggacctggcctggtcaagcctagcgagacactgagcctgacctgtaccgtgtccggcgatagcatcagcagcggcgattactactggggctggatcagacagcctcctggcaaaggactggaatggatcggccacatctactacagcggcgtgacctactacaaccccagcctgaagtccagagtgaccatcagcgtggacaccagccggaaccagttctccctgaagctgtctagcgtgacagccgccgataccgccgtgtactactgcaccagagaggacagcagcaactggcggagtagaggccagggaacactggtcacagttagctctggatccggcggaggcggaagtggaggcggaggatctggcggcggaggctctttcgaacaggtgcagctgcagcagcccggcgccgagctggtgagacccggcgccagcgtgaagctgagctgcaaggccagcggctacagcttcaccacctactggatgaactgggtgaagcagagacccggccagggcctggagtggatcggcatgatccaccccagcgacagcgagaccagactgaaccagaagttcaaggacaaggccaccctgaccgtggacaagagcagcagcaccgcctacatgcagctgagcagccccaccagcgaggacagcgccgtgtactactgcgccagaagcaccatgatcgccaccagagccatggactactggggccagggcaccagcgtgaccgtgagcagcacgcgtgaggacctgaagaacgtgttcccacctgaggtggccgtgttcgagcctagcgaggccgagatcagccacacccagaaagccaccctcgtgtgcctggctaccggcttctaccccgaccatgtggaactgtcttggtgggtcaacggcaaagaggtgcacagcggcgtgtgtaccgacccccagccactgaaagaacagcccgccctgaacgacagccggtactgcctgagcagcagactgagagtgtccgccaccttctggcagaacccccggaaccacttcagatgccaggtgcagttctacggcctgagcgagaacgacgagtggacccaggacagagccaagcccgtgacccagatcgtgtctgccgaagcctggggcagagccgattgcgacgtgaagctggtggaaaagagcttcgagacagacaccaacctgaacttccagaacctgagcgtgatcggcttcagaatcctgctgctgaaagtggccggctttaacctgctgatgaccctgcggctgtggtccagc

SEQ ID NO: 4800 - DNA, 2706 bp, synthetic construct
  source 1..2706: mol_type = other DNA
atggccttaccagtgaccgccttgctcctgccgctggccttgctgctccacgccgccaggccggaagtgcagctggttgaatctggcggaggactggttcagcctggcggatctctgagactgtcttgtgccgccagcggcttcagcttcagcgacttttggatgagctgggtccgacaggcccctggcaaaggacttgaatgggtcgccacaatcagccaggccggcagcgagaaggactacgtggactctgtgaagggcagattcaccatcagccgggacaacgccaagaagtccctgtacctccagatgaacagcctgagagccgaggacaccgccgtgtactattgtgcctctggcgtgtacagcttcgactacagaggccagggcaccctggtcacagtctcttctggtaccggcggaggcggatctggcggcggaggtagcggtggcggaggatctgaattccagagcgtgctgacacagcctccatccgtgtctggcgctccaggccagagagtgaccatctcctgtaccggcagcggcagcaacatcggagccccctacgacgtgtcctggtatcagcaactgcctggcaccgcccccaagctgctgatctaccacaacaacaagcggcccagcggcgtgcccgatagattcagcggctctaagagcggcaccagcgccagcctggctatcactggactccaggccgaggacgaggccgactactactgtgccacagtggaagccggcctgagcggctctgtgtttggcggcggaacaaagctgaccgtgctgggagctctcgagatccagaaccctgatcctgccgtgtaccagctgcgggatagcaagagcagcgacaagagcgtgtgtctgttcaccgacttcgacagccagaccaacgtgtcccagagcaaggactccgacgtgtacatcaccgataagtgcgtgctggacatgcggagcatggacttcaagagcaactccgccgtggcctggtccaacaagtccgatttcgcctgcgccaacgccttcaacaacagcattatccccgaggacacattcttcccaagccccgagagcagctgcggctttaccagcgagagctaccagcagggcgtgctgagcgccaccatcctgtacgagatcctgctgggcaaggccaccctgtacgccgtgctggtgtctgccctggtgctgatggctatggtcaagcggaaggacagccggggacgcgccaagagaagcggatctggcgtgaagcagaccctgaatttcgacctgctgaagctggctggcgacgtggaatccaacccaggccctactagtatggactggatttggcgcatccttttccttgtcggcgctgctaccggcgcgcattccgggccccagctccagctgcaagagtctggacctggcctggtcaagcctagcgagacactgagcctgacctgtaccgtgtccggcgatagcatcagcagcggcgattactactggggctggatcagacagcctcctggcaaaggactggaatggatcggccacatctactacagcggcgtgacctactacaaccccagcctgaagtccagagtgaccatcagcgtggacaccagccggaaccagttctccctgaagctgtctagcgtgacagccgccgataccgccgtgtactactgcaccagagaggacagcagcaactggcggagtagaggccagggaacactggtcacagttagctctggatccggcggaggcggaagtggaggcggaggatctggcggcggaggctctttcgaacaggtgcaactggtgcagagcggagccgaagtgaagaaacctggggccagcgtgaaggtgtcctgcaaggtgtccggctacaccctgaccgagctgagcattcactgggtgcgccaggcccctggcaagggactggaatggatgggcggcttcgaccccgaagagaacgagatcgtgtacgcccagcggttccagggcagagtgacaatgaccgaggacaccagcaccgacaccgcctacatggaactgagcagcctgcggagcgaggataccgccgtgtactactgcgccatcgtgggcagcttcagccctctgacactgggcctgtggggccagggaactatggtcaccgtgtccagcacgcgtgaggacctgaagaacgtgttcccacctgaggtggccgtgttcgagcctagcgaggccgagatcagccacacccagaaagccaccctcgtgtgcctggctaccggcttctaccccgaccatgtggaactgtcttggtgggtcaacggcaaagaggtgcacagcggcgtgtgtaccgacccccagccactgaaagaacagcccgccctgaacgacagccggtactgcctgagcagcagactgagagtgtccgccaccttctggcagaacccccggaaccacttcagatgccaggtgcagttctacggcctgagcgagaacgacgagtggacccaggacagagccaagcccgtgacccagatcgtgtctgccgaagcctggggcagagccgattgcgacgtgaagctggtggaaaagagcttcgagacagacaccaacctgaacttccagaacctgagcgtgatcggcttcagaatcctgctgctgaaagtggccggctttaacctgctgatgaccctgcggctgtggtccagc

SEQ ID NO: 4801 - DNA, 2706 bp, synthetic construct
  source 1..2706: mol_type = other DNA
atggccttaccagtgaccgccttgctcctgccgctggccttgctgctccacgccgccaggccggaagtgcagctggttgaatctggcggaggactggttcagcctggcggatctctgagactgtcttgtgccgccagcggcttcagcttcagcgacttttggatgagctgggtccgacaggcccctggcaaaggacttgaatgggtcgccacaatcagccaggccggcagcgagaaggactacgtggactctgtgaagggcagattcaccatcagccgggacaacgccaagaagtccctgtacctccagatgaacagcctgagagccgaggacaccgccgtgtactattgtgcctctggcgtgtacagcttcgactacagaggccagggcaccctggtcacagtctcttctggtaccggcggaggcggatctggcggcggaggtagcggtggcggaggatctgaattccagagcgtgctgacacagcctccatccgtgtctggcgctccaggccagagagtgaccatctcctgtaccggcagcggcagcaacatcggagccccctacgacgtgtcctggtatcagcaactgcctggcaccgcccccaagctgctgatctaccacaacaacaagcggcccagcggcgtgcccgatagattcagcggctctaagagcggcaccagcgccagcctggctatcactggactccaggccgaggacgaggccgactactactgccagagctacgacagcagcagcatcagcaccatcttcggcggaggcaccaagctgacagtgctgggagctctcgagatccagaaccctgatcctgccgtgtaccagctgcgggatagcaagagcagcgacaagagcgtgtgtctgttcaccgacttcgacagccagaccaacgtgtcccagagcaaggactccgacgtgtacatcaccgataagtgcgtgctggacatgcggagcatggacttcaagagcaactccgccgtggcctggtccaacaagtccgatttcgcctgcgccaacgccttcaacaacagcattatccccgaggacacattcttcccaagccccgagagcagctgcggctttaccagcgagagctaccagcagggcgtgctgagcgccaccatcctgtacgagatcctgctgggcaaggccaccctgtacgccgtgctggtgtctgccctggtgctgatggctatggtcaagcggaaggacagccggggacgcgccaagagaagcggatctggcgtgaagcagaccctgaatttcgacctgctgaagctggctggcgacgtggaatccaacccaggccctactagtatggactggatttggcgcatccttttccttgtcggcgctgctaccggcgcgcattccgggccccagctccagctgcaagagtctggacctggcctggtcaagcctagcgagacactgagcctgacctgtaccgtgtccggcgatagcatcagcagcggcgattactactggggctggatcagacagcctcctggcaaaggactggaatggatcggccacatctactacagcggcgtgacctactacaaccccagcctgaagtccagagtgaccatcagcgtggacaccagccggaaccagttctccctgaagctgtctagcgtgacagccgccgataccgccgtgtactactgcaccagagaggacagcagcaactggcggagtagaggccagggaacactggtcacagttagctctggatccggcggaggcggaagtggaggcggaggatctggcggcggaggctctttcgaacaggtgcaactggtgcagagcggagccgaagtgaagaaacctggggccagcgtgaaggtgtcctgcaaggtgtccggctacaccctgaccgagctgagcattcactgggtgcgccaggcccctggcaagggactggaatggatgggcggcttcgaccccgaagagaacgagatcgtgtacgcccagcggttccagggcagagtgacaatgaccgaggacaccagcaccgacaccgcctacatggaactgagcagcctgcggagcgaggataccgccgtgtactactgtgccatcgtgggcagcttcagcggaatcgcctacagaccttggggccagggcacaatggtcaccgtgtctagcacgcgtgaggacctgaagaacgtgttcccacctgaggtggccgtgttcgagcctagcgaggccgagatcagccacacccagaaagccaccctcgtgtgcctggctaccggcttctaccccgaccatgtggaactgtcttggtgggtcaacggcaaagaggtgcacagcggcgtgtgtaccgacccccagccactgaaagaacagcccgccctgaacgacagccggtactgcctgagcagcagactgagagtgtccgccaccttctggcagaacccccggaaccacttcagatgccaggtgcagttctacggcctgagcgagaacgacgagtggacccaggacagagccaagcccgtgacccagatcgtgtctgccgaagcctggggcagagccgattgcgacgtgaagctggtggaaaagagcttcgagacagacaccaacctgaacttccagaacctgagcgtgatcggcttcagaatcctgctgctgaaagtggccggctttaacctgctgatgaccctgcggctgtggtccagc

SEQ ID NO: 4802 - DNA, 2670 bp, synthetic construct
  source 1..2670: mol_type = other DNA
atggccttaccagtgaccgccttgctcctgccgctggccttgctgctccacgccgccaggccggaagtgcagctggttgaatctggcggaggactggttcagcctggcggatctctgagactgtcttgtgccgccagcggcttcagcttcagcgacttttggatgagctgggtccgacaggcccctggcaaaggacttgaatgggtcgccacaatcagccaggccggcagcgagaaggactacgtggactctgtgaagggcagattcaccatcagccgggacaacgccaagaagtccctgtacctccagatgaacagcctgagagccgaggacaccgccgtgtactattgtgcctctggcgtgtacagcttcgactacagaggccagggcaccctggtcacagtctcttctggtaccggcggaggcggatctggcggcggaggtagcggtggcggaggatctgaattcgacatccagatgacccagagccccagcagcctgtctgccagcgtgggcgacagagtgaccatcacctgtagagccagccagggcatcagaaacaacctggcctggtatcagcagaagcccggcaaggcccccaagcggctgatctacgccgccagcaatctccagagcggcgtgcccagcagattcacaggctctggcagcggcaccgagttcaccctgatcgtgtctagcctccagcccgaggacttcgccacctactactgcctccagcaccacagctaccccctgacatctggcggaggcaccaaggtggaactcgagatccagaaccctgatcctgccgtgtaccagctgcgggatagcaagagcagcgacaagagcgtgtgtctgttcaccgacttcgacagccagaccaacgtgtcccagagcaaggactccgacgtgtacatcaccgataagtgcgtgctggacatgcggagcatggacttcaagagcaactccgccgtggcctggtccaacaagtccgatttcgcctgcgccaacgccttcaacaacagcattatccccgaggacacattcttcccaagccccgagagcagctgcggctttaccagcgagagctaccagcagggcgtgctgagcgccaccatcctgtacgagatcctgctgggcaaggccaccctgtacgccgtgctggtgtctgccctggtgctgatggctatggtcaagcggaaggacagccggggacgcgccaagagaagcggatctggcgtgaagcagaccctgaatttcgacctgctgaagctggctggcgacgtggaatccaacccaggccctactagtatggactggatttggcgcatccttttccttgtcggcgctgctaccggcgcgcattccgggccccagctccagctgcaagagtctggacctggcctggtcaagcctagcgagacactgagcctgacctgtaccgtgtccggcgatagcatcagcagcggcgattactactggggctggatcagacagcctcctggcaaaggactggaatggatcggccacatctactacagcggcgtgacctactacaaccccagcctgaagtccagagtgaccatcagcgtggacaccagccggaaccagttctccctgaagctgtctagcgtgacagccgccgataccgccgtgtactactgcaccagagaggacagcagcaactggcggagtagaggccagggaacactggtcacagttagctctggatccggcggaggcggaagtggaggcggaggatctggcggcggaggctctttcgaagaggtgcaggtgctggaaagtggcggaggactggtgcagcctggcggctctctgagactgtcttgtgccgccagcggcttcaccttcagcagctacgccatgagctgggtgcgccaggcccctggaaaaggactggaatgggtgtccgccatcagcggctctggcgggtctaccaactacgccgatagcgtgaagggccggttcaccatcagccgggacaacagcaagaacaccctgtacctccagatgaacagcctgcgggccgaggacaccgccgtgtattattgtgccggcagcagcgggtggagcgagtattggggacagggcaccctcgtgaccgtgtcctctacgcgtgaggacctgaagaacgtgttcccacctgaggtggccgtgttcgagcctagcgaggccgagatcagccacacccagaaagccaccctcgtgtgcctggctaccggcttctaccccgaccatgtggaactgtcttggtgggtcaacggcaaagaggtgcacagcggcgtgtgtaccgacccccagccactgaaagaacagcccgccctgaacgacagccggtactgcctgagcagcagactgagagtgtccgccaccttctggcagaacccccggaaccacttcagatgccaggtgcagttctacggcctgagcgagaacgacgagtggacccaggacagagccaagcccgtgacccagatcgtgtctgccgaagcctggggcagagccgattgcgacgtgaagctggtggaaaagagcttcgagacagacaccaacctgaacttccagaacctgagcgtgatcggcttcagaatcctgctgctgaaagtggccggctttaacctgctgatgaccctgcggctgtggtccagc

SEQ ID NO: 4803 - DNA, 2688 bp, synthetic construct
  source 1..2688: mol_type = other DNA
atggccttaccagtgaccgccttgctcctgccgctggccttgctgctccacgccgccaggccggaagtgcagctggttgaatctggcggaggactggttcagcctggcggatctctgagactgtcttgtgccgccagcggcttcagcttcagcgacttttggatgagctgggtccgacaggcccctggcaaaggacttgaatgggtcgccacaatcagccaggccggcagcgagaaggactacgtggactctgtgaagggcagattcaccatcagccgggacaacgccaagaagtccctgtacctccagatgaacagcctgagagccgaggacaccgccgtgtactattgtgcctctggcgtgtacagcttcgactacagaggccagggcaccctggtcacagtctcttctggtaccggcggaggcggatctggcggcggaggtagcggtggcggaggatctgaattcgacgagatccagctggtgcagagcggagccgaagtgaagaagcctggcgagagcctgcggatcagctgcaagggcagcggcttcaacatcgaggactactacatccactgggtgcgccagatgcccggcaagggcctggaatggatgggcagaatcgaccccgagaacgacgagactaagtacggccccatcttccagggccacgtgaccatcagcgccgacaccagcatcaacaccgtgtacctccagtggtccagcctgaaggccagcgacaccgccatgtactactgcgcctttagaggcggcgtgtactggggccagggcaccacagtgacagtgtctagcctcgagatccagaaccctgatcctgccgtgtaccagctgcgggatagcaagagcagcgacaagagcgtgtgtctgttcaccgacttcgacagccagaccaacgtgtcccagagcaaggactccgacgtgtacatcaccgataagtgcgtgctggacatgcggagcatggacttcaagagcaactccgccgtggcctggtccaacaagtccgatttcgcctgcgccaacgccttcaacaacagcattatccccgaggacacattcttcccaagccccgagagcagctgcggctttaccagcgagagctaccagcagggcgtgctgagcgccaccatcctgtacgagatcctgctgggcaaggccaccctgtacgccgtgctggtgtctgccctggtgctgatggctatggtcaagcggaaggacagccggggacgcgccaagagaagcggatctggcgtgaagcagaccctgaatttcgacctgctgaagctggctggcgacgtggaatccaacccaggccctactagtatggactggatttggcgcatccttttccttgtcggcgctgctaccggcgcgcattccgggccccagctccagctgcaagagtctggacctggcctggtcaagcctagcgagacactgagcctgacctgtaccgtgtccggcgatagcatcagcagcggcgattactactggggctggatcagacagcctcctggcaaaggactggaatggatcggccacatctactacagcggcgtgacctactacaaccccagcctgaagtccagagtgaccatcagcgtggacaccagccggaaccagttctccctgaagctgtctagcgtgacagccgccgataccgccgtgtactactgcaccagagaggacagcagcaactggcggagtagaggccagggaacactggtcacagttagctctggatccggcggaggcggaagtggaggcggaggatctggcggcggaggctctttcgaagatgtcgtgatgacccagagccccgacagcctggctgtgtctctgggagagagagccaccatcaactgcaagtccagccagtccctgctggacagcgacggcaagacctacctgaactggctccagcagaagcccggccagccccccaagagactgatctccctggtgtccaagctggactccggcgtgcccgatagattttccggctctggcagcggcaccgacttcaccctgacaatcagctcccttcaggccgaggacgtggccgtgtactattgctggcagggcacacacttccccggcacctttggcggaggcaccaaggtggaaatcaagacgcgtgaggacctgaagaacgtgttcccacctgaggtggccgtgttcgagcctagcgaggccgagatcagccacacccagaaagccaccctcgtgtgcctggctaccggcttctaccccgaccatgtggaactgtcttggtgggtcaacggcaaagaggtgcacagcggcgtgtgtaccgacccccagccactgaaagaacagcccgccctgaacgacagccggtactgcctgagcagcagactgagagtgtccgccaccttctggcagaacccccggaaccacttcagatgccaggtgcagttctacggcctgagcgagaacgacgagtggacccaggacagagccaagcccgtgacccagatcgtgtctgccgaagcctggggcagagccgattgcgacgtgaagctggtggaaaagagcttcgagacagacaccaacctgaacttccagaacctgagcgtgatcggcttcagaatcctgctgctgaaagtggccggctttaacctgctgatgaccctgcggctgtggtccagc

SEQ ID NO: 4804 - DNA, 2709 bp, synthetic construct
  source 1..2709: mol_type = other DNA
atggccttaccagtgaccgccttgctcctgccgctggccttgctgctccacgccgccaggccggaagtgcagctggttgaatctggcggaggactggttcagcctggcggatctctgagactgtcttgtgccgccagcggcttcagcttcagcgacttttggatgagctgggtccgacaggcccctggcaaaggacttgaatgggtcgccacaatcagccaggccggcagcgagaaggactacgtggactctgtgaagggcagattcaccatcagccgggacaacgccaagaagtccctgtacctccagatgaacagcctgagagccgaggacaccgccgtgtactattgtgcctctggcgtgtacagcttcgactacagaggccagggcaccctggtcacagtctcttctggtaccggcggaggcggatctggcggcggaggtagcggtggcggaggatctgaattcgacgagcttgtgatgacccagagccccagcagcctgacagtgacagccggcgagaaagtgaccatgagctgcaagagcagccagagcctgctgaacagcggcaaccagaagaactacctgacctggtatcagcagaagcccggccagccccccaagctgctgatctactgggccagcaccagagaaagcggcgtgcccgatagattcaccggctctggcagcggcaccgacttcaccctgacaatcagcagcgtgcaggccgaggacctggccgtgtactactgccagaacgactacagctaccccctgaccttcggagccggcaccaagctggaaatcaagctcgagatccagaaccctgatcctgccgtgtaccagctgcgggatagcaagagcagcgacaagagcgtgtgtctgttcaccgacttcgacagccagaccaacgtgtcccagagcaaggactccgacgtgtacatcaccgataagtgcgtgctggacatgcggagcatggacttcaagagcaactccgccgtggcctggtccaacaagtccgatttcgcctgcgccaacgccttcaacaacagcattatccccgaggacacattcttcccaagccccgagagcagctgcggctttaccagcgagagctaccagcagggcgtgctgagcgccaccatcctgtacgagatcctgctgggcaaggccaccctgtacgccgtgctggtgtctgccctggtgctgatggctatggtcaagcggaaggacagccggggacgcgccaagagaagcggatctggcgtgaagcagaccctgaatttcgacctgctgaagctggctggcgacgtggaatccaacccaggccctactagtatggactggatttggcgcatccttttccttgtcggcgctgctaccggcgcgcattccgggccccagctccagctgcaagagtctggacctggcctggtcaagcctagcgagacactgagcctgacctgtaccgtgtccggcgatagcatcagcagcggcgattactactggggctggatcagacagcctcctggcaaaggactggaatggatcggccacatctactacagcggcgtgacctactacaaccccagcctgaagtccagagtgaccatcagcgtggacaccagccggaaccagttctccctgaagctgtctagcgtgacagccgccgataccgccgtgtactactgcaccagagaggacagcagcaactggcggagtagaggccagggaacactggtcacagttagctctggatccggcggaggcggaagtggaggcggaggatctggcggcggaggctctttcgaagaagtgcagctgctggaacagtctggcgccgaacttgtgcggcctggcaccagcgtgaagatcagctgtaaagccagcggctacgccttcaccaactactggctgggctgggtcaagcagaggcctggacacggcctggaatggatcggcgacatctttcccggctccggcaacatccactacaacgagaagttcaagggcaaggccaccctgaccgccgacaagtctagcagcaccgcctacatgcagctgtccagcctgacctttgaggacagcgccgtgtatttctgtgcccggctgcggaactgggacgagcccatggattattggggccagggcaccaccgtgaccgtgtctagtacgcgtgaggacctgaagaacgtgttcccacctgaggtggccgtgttcgagcctagcgaggccgagatcagccacacccagaaagccaccctcgtgtgcctggctaccggcttctaccccgaccatgtggaactgtcttggtgggtcaacggcaaagaggtgcacagcggcgtgtgtaccgacccccagccactgaaagaacagcccgccctgaacgacagccggtactgcctgagcagcagactgagagtgtccgccaccttctggcagaacccccggaaccacttcagatgccaggtgcagttctacggcctgagcgagaacgacgagtggacccaggacagagccaagcccgtgacccagatcgtgtctgccgaagcctggggcagagccgattgcgacgtgaagctggtggaaaagagcttcgagacagacaccaacctgaacttccagaacctgagcgtgatcggcttcagaatcctgctgctgaaagtggccggctttaacctgctgatgaccctgcggctgtggtccagc

SEQ ID NO: 4805 - DNA, 2712 bp, synthetic construct
  source 1..2712: mol_type = other DNA
atggccttaccagtgaccgccttgctcctgccgctggccttgctgctccacgccgccaggccggaagtgcagctggttgaatctggcggaggactggttcagcctggcggatctctgagactgtcttgtgccgccagcggcttcagcttcagcgacttttggatgagctgggtccgacaggcccctggcaaaggacttgaatgggtcgccacaatcagccaggccggcagcgagaaggactacgtggactctgtgaagggcagattcaccatcagccgggacaacgccaagaagtccctgtacctccagatgaacagcctgagagccgaggacaccgccgtgtactattgtgcctctggcgtgtacagcttcgactacagaggccagggcaccctggtcacagtctcttctggtaccggcggaggcggatctggcggcggaggtagcggtggcggaggatctgaattcgacgagctgcagatgacccagagccctagcagcctgtctgccagcgtgggcgacagagtgaccatcacctgtagagccagccagagcatcagcagctacctgaactggtatcagcagaagcccggccagccccccaaactgctgatctactgggccagcaccagagaaagcggcgtgcccgatagattcagcggcagcgagagcggcaccaactacaccctgaccatcagctccctgcagcccgaggacttcgccacctacttttgccagcagagcgacagcctgcccatcacctttggacagggcacccggctggacattcagctcgagatccagaaccctgatcctgccgtgtaccagctgcgggatagcaagagcagcgacaagagcgtgtgtctgttcaccgacttcgacagccagaccaacgtgtcccagagcaaggactccgacgtgtacatcaccgataagtgcgtgctggacatgcggagcatggacttcaagagcaactccgccgtggcctggtccaacaagtccgatttcgcctgcgccaacgccttcaacaacagcattatccccgaggacacattcttcccaagccccgagagcagctgcggctttaccagcgagagctaccagcagggcgtgctgagcgccaccatcctgtacgagatcctgctgggcaaggccaccctgtacgccgtgctggtgtctgccctggtgctgatggctatggtcaagcggaaggacagccggggacgcgccaagagaagcggatctggcgtgaagcagaccctgaatttcgacctgctgaagctggctggcgacgtggaatccaacccaggccctactagtatggactggatttggcgcatccttttccttgtcggcgctgctaccggcgcgcattccgggccccagctccagctgcaagagtctggacctggcctggtcaagcctagcgagacactgagcctgacctgtaccgtgtccggcgatagcatcagcagcggcgattactactggggctggatcagacagcctcctggcaaaggactggaatggatcggccacatctactacagcggcgtgacctactacaaccccagcctgaagtccagagtgaccatcagcgtggacaccagccggaaccagttctccctgaagctgtctagcgtgacagccgccgataccgccgtgtactactgcaccagagaggacagcagcaactggcggagtagaggccagggaacactggtcacagttagctctggatccggcggaggcggaagtggaggcggaggatctggcggcggaggctctttcgaagaggtgcaactgctggaatctgggggcggagtggtgcagcctggcagaagcctgagactgagctgtgccgccagcggcttcaccttcagctcctacggaatgcactgggtgcgccaggcccctggcaaaggactggaatgggtggccgtgatctcctacgacggcagcaacaagtactacgccgacagcgtgaagggccggttcaccatcagccgggacaacagcaagaacaccctgtacctgcagatgaacagcctgcgggccgaggacaccgccgtgtactactgcgccaaggatatgggctggggcagcggctggcggccttactactactacggcatggacgtgtggggccagggcaccaccgtgacagtgtcatctacgcgtgaggacctgaagaacgtgttcccacctgaggtggccgtgttcgagcctagcgaggccgagatcagccacacccagaaagccaccctcgtgtgcctggctaccggcttctaccccgaccatgtggaactgtcttggtgggtcaacggcaaagaggtgcacagcggcgtgtgtaccgacccccagccactgaaagaacagcccgccctgaacgacagccggtactgcctgagcagcagactgagagtgtccgccaccttctggcagaacccccggaaccacttcagatgccaggtgcagttctacggcctgagcgagaacgacgagtggacccaggacagagccaagcccgtgacccagatcgtgtctgccgaagcctggggcagagccgattgcgacgtgaagctggtggaaaagagcttcgagacagacaccaacctgaacttccagaacctgagcgtgatcggcttcagaatcctgctgctgaaagtggccggctttaacctgctgatgaccctgcggctgtggtccagc

SEQ ID NO: 4806 - DNA, 2703 bp, synthetic construct
  source 1..2703: mol_type = other DNA
atggccttaccagtgaccgccttgctcctgccgctggccttgctgctccacgccgccaggccggaagtgcagctggttgaatctggcggaggactggttcagcctggcggatctctgagactgtcttgtgccgccagcggcttcagcttcagcgacttttggatgagctgggtccgacaggcccctggcaaaggacttgaatgggtcgccacaatcagccaggccggcagcgagaaggactacgtggactctgtgaagggcagattcaccatcagccgggacaacgccaagaagtccctgtacctccagatgaacagcctgagagccgaggacaccgccgtgtactattgtgcctctggcgtgtacagcttcgactacagaggccagggcaccctggtcacagtctcttctggtaccggcggaggcggatctggcggcggaggtagcggtggcggaggatctgaattcgacgacatccaaatgacacagagtccttctagtttgagtgcgagcgtgggggacagggtgaccattacctgcagggccagccagagcataagctcataccttaattggtaccagcaaaaaccaggtaaggcccctaagctcctgatctacgcggcctcttcacttcaatctggggtcccttcccgcttcagtggctccggcagcggcaccgacttcacgctcactatatcaagtctgcagcctgaggatctcgccacctattactgtcaacaaagttattccacccctttcacctttggaccgggcacgaaagtggatattaagctcgagatccagaaccctgatcctgccgtgtaccagctgcgggatagcaagagcagcgacaagagcgtgtgtctgttcaccgacttcgacagccagaccaacgtgtcccagagcaaggactccgacgtgtacatcaccgataagtgcgtgctggacatgcggagcatggacttcaagagcaactccgccgtggcctggtccaacaagtccgatttcgcctgcgccaacgccttcaacaacagcattatccccgaggacacattcttcccaagccccgagagcagctgcggctttaccagcgagagctaccagcagggcgtgctgagcgccaccatcctgtacgagatcctgctgggcaaggccaccctgtacgccgtgctggtgtctgccctggtgctgatggctatggtcaagcggaaggacagccggggacgcgccaagagaagcggatctggcgtgaagcagaccctgaatttcgacctgctgaagctggctggcgacgtggaatccaacccaggccctactagtatggactggatttggcgcatccttttccttgtcggcgctgctaccggcgcgcattccgggccccagctccagctgcaagagtctggacctggcctggtcaagcctagcgagacactgagcctgacctgtaccgtgtccggcgatagcatcagcagcggcgattactactggggctggatcagacagcctcctggcaaaggactggaatggatcggccacatctactacagcggcgtgacctactacaaccccagcctgaagtccagagtgaccatcagcgtggacaccagccggaaccagttctccctgaagctgtctagcgtgacagccgccgataccgccgtgtactactgcaccagagaggacagcagcaactggcggagtagaggccagggaacactggtcacagttagctctggatccggcggaggcggaagtggaggcggaggatctggcggcggaggctctttcgaagtgcacgaggtccagcttgtgcagtccggggcagaggtcaagaagcctggttctagcgtaaaagtgagttgcaaagcctcaggtgggacattttcatcctacgcgatcagttgggttagacaggctcctggtcaagggctggaatggatgggcggaattattccaatcttcggaacagcgaattacgcgcagaagttccagggtagagtaaccatcactgctgacaagtccacctccaccgcatacatggaattgtctagtctccggagcgaggatacggcggtgtattattgtgctacgttcgccctgtttggcttccgcgaacaggctttcgacatctgggggcagggcacgacagtcacggttagtagtacgcgtgaggacctgaagaacgtgttcccacctgaggtggccgtgttcgagcctagcgaggccgagatcagccacacccagaaagccaccctcgtgtgcctggctaccggcttctaccccgaccatgtggaactgtcttggtgggtcaacggcaaagaggtgcacagcggcgtgtgtaccgacccccagccactgaaagaacagcccgccctgaacgacagccggtactgcctgagcagcagactgagagtgtccgccaccttctggcagaacccccggaaccacttcagatgccaggtgcagttctacggcctgagcgagaacgacgagtggacccaggacagagccaagcccgtgacccagatcgtgtctgccgaagcctggggcagagccgattgcgacgtgaagctggtggaaaagagcttcgagacagacaccaacctgaacttccagaacctgagcgtgatcggcttcagaatcctgctgctgaaagtggccggctttaacctgctgatgaccctgcggctgtggtccagc

SEQ ID NO: 4807 - DNA, 2697 bp, synthetic construct
  source 1..2697: mol_type = other DNA
atggccttaccagtgaccgccttgctcctgccgctggccttgctgctccacgccgccaggccggaagtgcagctggttgaatctggcggaggactggttcagcctggcggatctctgagactgtcttgtgccgccagcggcttcagcttcagcgacttttggatgagctgggtccgacaggcccctggcaaaggacttgaatgggtcgccacaatcagccaggccggcagcgagaaggactacgtggactctgtgaagggcagattcaccatcagccgggacaacgccaagaagtccctgtacctccagatgaacagcctgagagccgaggacaccgccgtgtactattgtgcctctggcgtgtacagcttcgactacagaggccagggcaccctggtcacagtctcttctggtaccggcggaggcggatctggcggcggaggtagcggtggcggaggatctgaattcgacatcgtgctgacccagagccctctgagcctggccgtgtctctgggacagcctgccatcatcagctgcaaggccagccagagcgtgtcctttgccggcacctctctgatgcactggtatcaccagaagcccggccagcagcccagactgctgatctacagagccagcaacctggaagccggcgtgcccgatagattttccggcagcggcagcaagaccgacttcaccctgaccatcagccccgtggaagccgaagatgccgccacctactactgccagcagagcagagagtacccctacaccttcggcggaggcaccaagctggaaatcaagaggctcgagatccagaaccctgatcctgccgtgtaccagctgcgggatagcaagagcagcgacaagagcgtgtgtctgttcaccgacttcgacagccagaccaacgtgtcccagagcaaggactccgacgtgtacatcaccgataagtgcgtgctggacatgcggagcatggacttcaagagcaactccgccgtggcctggtccaacaagtccgatttcgcctgcgccaacgccttcaacaacagcattatccccgaggacacattcttcccaagccccgagagcagctgcggctttaccagcgagagctaccagcagggcgtgctgagcgccaccatcctgtacgagatcctgctgggcaaggccaccctgtacgccgtgctggtgtctgccctggtgctgatggctatggtcaagcggaaggacagccggggacgcgccaagagaagcggatctggcgtgaagcagaccctgaatttcgacctgctgaagctggctggcgacgtggaatccaacccaggccctactagtatggactggatttggcgcatccttttccttgtcggcgctgctaccggcgcgcattccgggccccagctccagctgcaagagtctggacctggcctggtcaagcctagcgagacactgagcctgacctgtaccgtgtccggcgatagcatcagcagcggcgattactactggggctggatcagacagcctcctggcaaaggactggaatggatcggccacatctactacagcggcgtgacctactacaaccccagcctgaagtccagagtgaccatcagcgtggacaccagccggaaccagttctccctgaagctgtctagcgtgacagccgccgataccgccgtgtactactgcaccagagaggacagcagcaactggcggagtagaggccagggaacactggtcacagttagctctggatccggcggaggcggaagtggaggcggaggatctggcggcggaggctctttcgaacaggtccaactggtgcagagcggagccgaggtcgtgaagcctggcgcttccgtgaagattagctgcaaagccagcggctacacctttaccggctactttatgaactgggtcaagcagagccctggccagagcctggaatggatcggcagaatccacccctacgacggcgacaccttctacaaccagaagttccagggcaaggccaccctgacagtggacaagagcagcaacaccgcccacatggaactgctgagcctgaccagcgaggacttcgccgtgtactactgcaccagatacgacggcagccgggctatggactattggggccagggcaccaccgtgaccgtgtctagtacgcgtgaggacctgaagaacgtgttcccacctgaggtggccgtgttcgagcctagcgaggccgagatcagccacacccagaaagccaccctcgtgtgcctggctaccggcttctaccccgaccatgtggaactgtcttggtgggtcaacggcaaagaggtgcacagcggcgtgtgtaccgacccccagccactgaaagaacagcccgccctgaacgacagccggtactgcctgagcagcagactgagagtgtccgccaccttctggcagaacccccggaaccacttcagatgccaggtgcagttctacggcctgagcgagaacgacgagtggacccaggacagagccaagcccgtgacccagatcgtgtctgccgaagcctggggcagagccgattgcgacgtgaagctggtggaaaagagcttcgagacagacaccaacctgaacttccagaacctgagcgtgatcggcttcagaatcctgctgctgaaagtggccggctttaacctgctgatgaccctgcggctgtggtccagc

SEQ ID NO: 4808 - DNA, 2688 bp, synthetic construct
  source 1..2688: mol_type = other DNA
atggccttaccagtgaccgccttgctcctgccgctggccttgctgctccacgccgccaggccggaagtgcagctggttgaatctggcggaggactggttcagcctggcggatctctgagactgtcttgtgccgccagcggcttcagcttcagcgacttttggatgagctgggtccgacaggcccctggcaaaggacttgaatgggtcgccacaatcagccaggccggcagcgagaaggactacgtggactctgtgaagggcagattcaccatcagccgggacaacgccaagaagtccctgtacctccagatgaacagcctgagagccgaggacaccgccgtgtactattgtgcctctggcgtgtacagcttcgactacagaggccagggcaccctggtcacagtctcttctggtaccggcggaggcggatctggcggcggaggtagcggtggcggaggatctgaattcgacgacgttgtgatgacccagacccccctgagcctgcctgtgacacctggcgaacctgccagcatcagctgtcggagcagccagagcctggtgcacagaaacggcaacacctacctgcactggtatctccagaagcccggccagagccccaagctgctgatccacaaggtgtccaacagattcagcggcgtgcccgacagattctccggcagcggctctggcaccgacttcaccctgaagatcagccgggtggaagccgaggacctgggcgtgtacttctgtagccagagcacccatgtgccccccctgacatttggagccggcaccaagctggaactgaagctcgagatccagaaccctgatcctgccgtgtaccagctgcgggatagcaagagcagcgacaagagcgtgtgtctgttcaccgacttcgacagccagaccaacgtgtcccagagcaaggactccgacgtgtacatcaccgataagtgcgtgctggacatgcggagcatggacttcaagagcaactccgccgtggcctggtccaacaagtccgatttcgcctgcgccaacgccttcaacaacagcattatccccgaggacacattcttcccaagccccgagagcagctgcggctttaccagcgagagctaccagcagggcgtgctgagcgccaccatcctgtacgagatcctgctgggcaaggccaccctgtacgccgtgctggtgtctgccctggtgctgatggctatggtcaagcggaaggacagccggggacgcgccaagagaagcggatctggcgtgaagcagaccctgaatttcgacctgctgaagctggctggcgacgtggaatccaacccaggccctactagtatggactggatttggcgcatccttttccttgtcggcgctgctaccggcgcgcattccgggccccagctccagctgcaagagtctggacctggcctggtcaagcctagcgagacactgagcctgacctgtaccgtgtccggcgatagcatcagcagcggcgattactactggggctggatcagacagcctcctggcaaaggactggaatggatcggccacatctactacagcggcgtgacctactacaaccccagcctgaagtccagagtgaccatcagcgtggacaccagccggaaccagttctccctgaagctgtctagcgtgacagccgccgataccgccgtgtactactgcaccagagaggacagcagcaactggcggagtagaggccagggaacactggtcacagttagctctggatccggcggaggcggaagtggaggcggaggatctggcggcggaggctctttcgaagaagtgcagctggtgcagtctggcgctgaggtggaaaagcctggggccagcgtgaagattagctgcaaggccagcggcagcagcttcaccggctacaacatgaactgggtgcgccagaacatcggcaagagcctggaatggatcggagccatcgacccctactacggcggcaccagctacaaccagaagttcaagggcagagccaccctgaccgtggacaagagcaccagcaccgcctacatgcacctgaagtccctgcggagcgaggacaccgccgtgtactactgtgtgtccggcatggaatattggggccagggcaccagcgtgaccgtgtctagtacgcgtgaggacctgaagaacgtgttcccacctgaggtggccgtgttcgagcctagcgaggccgagatcagccacacccagaaagccaccctcgtgtgcctggctaccggcttctaccccgaccatgtggaactgtcttggtgggtcaacggcaaagaggtgcacagcggcgtgtgtaccgacccccagccactgaaagaacagcccgccctgaacgacagccggtactgcctgagcagcagactgagagtgtccgccaccttctggcagaacccccggaaccacttcagatgccaggtgcagttctacggcctgagcgagaacgacgagtggacccaggacagagccaagcccgtgacccagatcgtgtctgccgaagcctggggcagagccgattgcgacgtgaagctggtggaaaagagcttcgagacagacaccaacctgaacttccagaacctgagcgtgatcggcttcagaatcctgctgctgaaagtggccggctttaacctgctgatgaccctgcggctgtggtccagc

SEQ ID NO: 4809 - DNA, 2682 bp, synthetic construct
  source 1..2682: mol_type = other DNA
atggccttaccagtgaccgccttgctcctgccgctggccttgctgctccacgccgccaggccggaagtgcagctggttgaatctggcggaggactggttcagcctggcggatctctgagactgtcttgtgccgccagcggcttcagcttcagcgacttttggatgagctgggtccgacaggcccctggcaaaggacttgaatgggtcgccacaatcagccaggccggcagcgagaaggactacgtggactctgtgaagggcagattcaccatcagccgggacaacgccaagaagtccctgtacctccagatgaacagcctgagagccgaggacaccgccgtgtactattgtgcctctggcgtgtacagcttcgactacagaggccagggcaccctggtcacagtctcttctggtaccggcggaggcggatctggcggcggaggtagcggtggcggaggatctgaattcgacgagatcgtgatgacccagacccctgccaccctgtctgtgtctgccggcgagagagtgaccattacctgcaaggccagccagagcgtgtccaacgacgtgacctggtatcagcagaagcccggccaggcccccagactgctgatctacagcgccagcaacagatacagcggcgtgcccgccagattttccggcagcggctacggcaccgagttcaccttcaccatcagcagcgtgcagagcgaggacttcgccgtgtacttctgtcagcaagactacagcagcttcggccagggcaccaagctggaaatcaagaggctcgagatccagaaccctgatcctgccgtgtaccagctgcgggatagcaagagcagcgacaagagcgtgtgtctgttcaccgacttcgacagccagaccaacgtgtcccagagcaaggactccgacgtgtacatcaccgataagtgcgtgctggacatgcggagcatggacttcaagagcaactccgccgtggcctggtccaacaagtccgatttcgcctgcgccaacgccttcaacaacagcattatccccgaggacacattcttcccaagccccgagagcagctgcggctttaccagcgagagctaccagcagggcgtgctgagcgccaccatcctgtacgagatcctgctgggcaaggccaccctgtacgccgtgctggtgtctgccctggtgctgatggctatggtcaagcggaaggacagccggggacgcgccaagagaagcggatctggcgtgaagcagaccctgaatttcgacctgctgaagctggctggcgacgtggaatccaacccaggccctactagtatggactggatttggcgcatccttttccttgtcggcgctgctaccggcgcgcattccgggccccagctccagctgcaagagtctggacctggcctggtcaagcctagcgagacactgagcctgacctgtaccgtgtccggcgatagcatcagcagcggcgattactactggggctggatcagacagcctcctggcaaaggactggaatggatcggccacatctactacagcggcgtgacctactacaaccccagcctgaagtccagagtgaccatcagcgtggacaccagccggaaccagttctccctgaagctgtctagcgtgacagccgccgataccgccgtgtactactgcaccagagaggacagcagcaactggcggagtagaggccagggaacactggtcacagttagctctggatccggcggaggcggaagtggaggcggaggatctggcggcggaggctctttcgaacaggtgcagctggtggaatctggacctggcgtggtgcagcctggcagaagcctgagaatcagctgtgccgtgtccggcttcagcgtgaccaactacggcgtgcactgggtgcgccagccacctggaaaaggactggaatggctgggcgtgatctgggctggcggcatcaccaactacaacagcgccttcatgtcccggctgaccatctccaaggacaacagcaagaacaccgtgtacctccagatgaacagcctgcgggccgaggacaccgccatgtactactgtgcttccagaggcggccactacggctacgccctggattattggggccagggaaccctcgtgaccgtgtcctctacgcgtgaggacctgaagaacgtgttcccacctgaggtggccgtgttcgagcctagcgaggccgagatcagccacacccagaaagccaccctcgtgtgcctggctaccggcttctaccccgaccatgtggaactgtcttggtgggtcaacggcaaagaggtgcacagcggcgtgtgtaccgacccccagccactgaaagaacagcccgccctgaacgacagccggtactgcctgagcagcagactgagagtgtccgccaccttctggcagaacccccggaaccacttcagatgccaggtgcagttctacggcctgagcgagaacgacgagtggacccaggacagagccaagcccgtgacccagatcgtgtctgccgaagcctggggcagagccgattgcgacgtgaagctggtggaaaagagcttcgagacagacaccaacctgaacttccagaacctgagcgtgatcggcttcagaatcctgctgctgaaagtggccggctttaacctgctgatgaccctgcggctgtggtccagc

SEQ ID NO: 4810 - DNA, 2688 bp, synthetic construct
  source 1..2688: mol_type = other DNA
atggccttaccagtgaccgccttgctcctgccgctggccttgctgctccacgccgccaggccggaagtgcagctggttgaatctggcggaggactggttcagcctggcggatctctgagactgtcttgtgccgccagcggcttcagcttcagcgacttttggatgagctgggtccgacaggcccctggcaaaggacttgaatgggtcgccacaatcagccaggccggcagcgagaaggactacgtggactctgtgaagggcagattcaccatcagccgggacaacgccaagaagtccctgtacctccagatgaacagcctgagagccgaggacaccgccgtgtactattgtgcctctggcgtgtacagcttcgactacagaggccagggcaccctggtcacagtctcttctggtaccggcggaggcggatctggcggcggaggtagcggtggcggaggatctgaattcgacatccagatgacccagaccgccagcagcctgcctgcctctctgggcgacagagtgaccatctcctgtagcgccagccaggacatcagcaactacctgaactggtatcagcagaaacccgacggcaccgtgaagctgctgatcttctacagcagcaacctgcacagcggcgtgcccagcagattttctggcggcggaagcggcaccgactacagcctgaccatcagcaatctggaacccgaggacattgccacctacttttgccaccagtacagcaagctgccctggacctttggcggaggcaccaagctggaaatcaagagactcgagatccagaaccctgatcctgccgtgtaccagctgcgggatagcaagagcagcgacaagagcgtgtgtctgttcaccgacttcgacagccagaccaacgtgtcccagagcaaggactccgacgtgtacatcaccgataagtgcgtgctggacatgcggagcatggacttcaagagcaactccgccgtggcctggtccaacaagtccgatttcgcctgcgccaacgccttcaacaacagcattatccccgaggacacattcttcccaagccccgagagcagctgcggctttaccagcgagagctaccagcagggcgtgctgagcgccaccatcctgtacgagatcctgctgggcaaggccaccctgtacgccgtgctggtgtctgccctggtgctgatggctatggtcaagcggaaggacagccggggacgcgccaagagaagcggatctggcgtgaagcagaccctgaatttcgacctgctgaagctggctggcgacgtggaatccaacccaggccctactagtatggactggatttggcgcatccttttccttgtcggcgctgctaccggcgcgcattccgggccccagctccagctgcaagagtctggacctggcctggtcaagcctagcgagacactgagcctgacctgtaccgtgtccggcgatagcatcagcagcggcgattactactggggctggatcagacagcctcctggcaaaggactggaatggatcggccacatctactacagcggcgtgacctactacaaccccagcctgaagtccagagtgaccatcagcgtggacaccagccggaaccagttctccctgaagctgtctagcgtgacagccgccgataccgccgtgtactactgcaccagagaggacagcagcaactggcggagtagaggccagggaacactggtcacagttagctctggatccggcggaggcggaagtggaggcggaggatctggcggcggaggctctttcgaagaagtgaccctggtggaaagcggcggagacttcgtgaagcctggcggctctctgaaggtgtcctgtgccgccagcggcttcgcctttagccactacgccatgagctgggtgcgccagacccctgccaagagactggaatgggtggcctacatcagcagcggcggctccggcacctactactccgatagcgtgaagggccggttcaccatcagccgggacaacgccaagaacaccctgtacctccagatgcggagcctgcggagcgaggacagcgccatgtatttctgcaccagagtgaagctgggcacctattacttcgactcttggggccagggcaccaccctgaccgtgtcatctacgcgtgaggacctgaagaacgtgttcccacctgaggtggccgtgttcgagcctagcgaggccgagatcagccacacccagaaagccaccctcgtgtgcctggctaccggcttctaccccgaccatgtggaactgtcttggtgggtcaacggcaaagaggtgcacagcggcgtgtgtaccgacccccagccactgaaagaacagcccgccctgaacgacagccggtactgcctgagcagcagactgagagtgtccgccaccttctggcagaacccccggaaccacttcagatgccaggtgcagttctacggcctgagcgagaacgacgagtggacccaggacagagccaagcccgtgacccagatcgtgtctgccgaagcctggggcagagccgattgcgacgtgaagctggtggaaaagagcttcgagacagacaccaacctgaacttccagaacctgagcgtgatcggcttcagaatcctgctgctgaaagtggccggctttaacctgctgatgaccctgcggctgtggtccagc

SEQ ID NO: 4811 - DNA, 2694 bp, synthetic construct
  source 1..2694: mol_type = other DNA
atggccttaccagtgaccgccttgctcctgccgctggccttgctgctccacgccgccaggccggaagtgcagctggttgaatctggcggaggactggttcagcctggcggatctctgagactgtcttgtgccgccagcggcttcagcttcagcgacttttggatgagctgggtccgacaggcccctggcaaaggacttgaatgggtcgccacaatcagccaggccggcagcgagaaggactacgtggactctgtgaagggcagattcaccatcagccgggacaacgccaagaagtccctgtacctccagatgaacagcctgagagccgaggacaccgccgtgtactattgtgcctctggcgtgtacagcttcgactacagaggccagggcaccctggtcacagtctcttctggtaccggcggaggcggatctggcggcggaggtagcggtggcggaggatctgaattccagttcgtgctgacccagagcccttctgcctctgctgccctgggagcctctgccaagctgacctgtacactgagcagcgcccacaagacctacaccatcgactggtatcagcagcagaagggaaaggcccccagatacctgatccaagtgaagtccgacggcacctacacaaaggccaccggcgtgcccgatagattcagcggcagtagcagcggagccgatagatacctgattatccccagcgtgcaggccgacgacgaggccgattactactgcggcaccgattacaccggcggctacgtgttcggcggaggcacacaactgaccgtgacactcgagatccagaaccctgatcctgccgtgtaccagctgcgggatagcaagagcagcgacaagagcgtgtgtctgttcaccgacttcgacagccagaccaacgtgtcccagagcaaggactccgacgtgtacatcaccgataagtgcgtgctggacatgcggagcatggacttcaagagcaactccgccgtggcctggtccaacaagtccgatttcgcctgcgccaacgccttcaacaacagcattatccccgaggacacattcttcccaagccccgagagcagctgcggctttaccagcgagagctaccagcagggcgtgctgagcgccaccatcctgtacgagatcctgctgggcaaggccaccctgtacgccgtgctggtgtctgccctggtgctgatggctatggtcaagcggaaggacagccggggacgcgccaagagaagcggatctggcgtgaagcagaccctgaatttcgacctgctgaagctggctggcgacgtggaatccaacccaggccctactagtatggactggatttggcgcatccttttccttgtcggcgctgctaccggcgcgcattccgggccccagctccagctgcaagagtctggacctggcctggtcaagcctagcgagacactgagcctgacctgtaccgtgtccggcgatagcatcagcagcggcgattactactggggctggatcagacagcctcctggcaaaggactggaatggatcggccacatctactacagcggcgtgacctactacaaccccagcctgaagtccagagtgaccatcagcgtggacaccagccggaaccagttctccctgaagctgtctagcgtgacagccgccgataccgccgtgtactactgcaccagagaggacagcagcaactggcggagtagaggccagggaacactggtcacagttagctctggatccggcggaggcggaagtggaggcggaggatctggcggcggaggctctttcgaagagcaactgaaagagtctggcggcggactgttcaagcccaccgataccctgaccctgacctgcaccgtgtccggcttcagcctgagctactacggcgtgaactgggtgcgccaggcccctggcaatggcctggaatggatcggcacaatcggcggcagcggcgacacctactatgcctcttgggccaagtccagaagcaccatcatcagaaacaccaacgagaacaccgtgaccctgaagatgaccagcctgacagccgccgacaccgccacctacttttgcgtcagatacgccaacatcggctacgagtatttcaacgtgtggggacccggcaccctcgtgaccgtgtcatctacgcgtgaggacctgaagaacgtgttcccacctgaggtggccgtgttcgagcctagcgaggccgagatcagccacacccagaaagccaccctcgtgtgcctggctaccggcttctaccccgaccatgtggaactgtcttggtgggtcaacggcaaagaggtgcacagcggcgtgtgtaccgacccccagccactgaaagaacagcccgccctgaacgacagccggtactgcctgagcagcagactgagagtgtccgccaccttctggcagaacccccggaaccacttcagatgccaggtgcagttctacggcctgagcgagaacgacgagtggacccaggacagagccaagcccgtgacccagatcgtgtctgccgaagcctggggcagagccgattgcgacgtgaagctggtggaaaagagcttcgagacagacaccaacctgaacttccagaacctgagcgtgatcggcttcagaatcctgctgctgaaagtggccggctttaacctgctgatgaccctgcggctgtggtccagc

SEQ ID NO: 4812 - DNA, 2709 bp, synthetic construct
  source 1..2709: mol_type = other DNA
atggccttaccagtgaccgccttgctcctgccgctggccttgctgctccacgccgccaggccggaagtgcagctggttgaatctggcggaggactggttcagcctggcggatctctgagactgtcttgtgccgccagcggcttcagcttcagcgacttttggatgagctgggtccgacaggcccctggcaaaggacttgaatgggtcgccacaatcagccaggccggcagcgagaaggactacgtggactctgtgaagggcagattcaccatcagccgggacaacgccaagaagtccctgtacctccagatgaacagcctgagagccgaggacaccgccgtgtactattgtgcctctggcgtgtacagcttcgactacagaggccagggcaccctggtcacagtctcttctggtaccggcggaggcggatctggcggcggaggtagcggtggcggaggatctgaattccagttcgtgctgacccagagcccttctgtgtctgccgccctgggagcctctgccaagctgacctgtacactgagcagcgcccacaagacctacaccatcgactggtatcagcagcagcagggcgaggcccccagatacctgatgcaagtgaagtccgacggcagctacaccaagggcaccggcgtgcccgatagattcagcggcagtagcagcggagccgatagatacctgattatccccagcgtgcaggccgacgacgaggccggatatgtgtgcggcgctgacgacaatggcggctacgtgttcggcggaggcacccaactgacagtgacactcgagatccagaaccctgatcctgccgtgtaccagctgcgggatagcaagagcagcgacaagagcgtgtgtctgttcaccgacttcgacagccagaccaacgtgtcccagagcaaggactccgacgtgtacatcaccgataagtgcgtgctggacatgcggagcatggacttcaagagcaactccgccgtggcctggtccaacaagtccgatttcgcctgcgccaacgccttcaacaacagcattatccccgaggacacattcttcccaagccccgagagcagctgcggctttaccagcgagagctaccagcagggcgtgctgagcgccaccatcctgtacgagatcctgctgggcaaggccaccctgtacgccgtgctggtgtctgccctggtgctgatggctatggtcaagcggaaggacagccggggacgcgccaagagaagcggatctggcgtgaagcagaccctgaatttcgacctgctgaagctggctggcgacgtggaatccaacccaggccctactagtatggactggatttggcgcatccttttccttgtcggcgctgctaccggcgcgcattccgggccccagctccagctgcaagagtctggacctggcctggtcaagcctagcgagacactgagcctgacctgtaccgtgtccggcgatagcatcagcagcggcgattactactggggctggatcagacagcctcctggcaaaggactggaatggatcggccacatctactacagcggcgtgacctactacaaccccagcctgaagtccagagtgaccatcagcgtggacaccagccggaaccagttctccctgaagctgtctagcgtgacagccgccgataccgccgtgtactactgcaccagagaggacagcagcaactggcggagtagaggccagggaacactggtcacagttagctctggatccggcggaggcggaagtggaggcggaggatctggcggcggaggctctttcgaacagagcgtgaaagagtctgagggcggcctgttcaagcccaccgataccctgaccctgacctgcaccgtgtccggcttcagcctgagcagacacgccctgacatgggtgcgccaggcccctggaaatggcctggaatggatcggagccatcgacaacgccggcaccacctactatgcctcttgggccaagtccagaagcaccatcacccggaacaccgacctgcacaccgtgaccctgaagatgaccagcctgaccgccagcgacaccgccacctacttttgcgccagagtgttctacgacatcaacagcggctactacctggacggcatggacctgtggggacctggcacacttgtgaccgtgtccagcacgcgtgaggacctgaagaacgtgttcccacctgaggtggccgtgttcgagcctagcgaggccgagatcagccacacccagaaagccaccctcgtgtgcctggctaccggcttctaccccgaccatgtggaactgtcttggtgggtcaacggcaaagaggtgcacagcggcgtgtgtaccgacccccagccactgaaagaacagcccgccctgaacgacagccggtactgcctgagcagcagactgagagtgtccgccaccttctggcagaacccccggaaccacttcagatgccaggtgcagttctacggcctgagcgagaacgacgagtggacccaggacagagccaagcccgtgacccagatcgtgtctgccgaagcctggggcagagccgattgcgacgtgaagctggtggaaaagagcttcgagacagacaccaacctgaacttccagaacctgagcgtgatcggcttcagaatcctgctgctgaaagtggccggctttaacctgctgatgaccctgcggctgtggtccagc

SEQ ID NO: 4813 - DNA, 2691 bp, synthetic construct
  source 1..2691: mol_type = other DNA
atggccttaccagtgaccgccttgctcctgccgctggccttgctgctccacgccgccaggccggaagtgcagctggttgaatctggcggaggactggttcagcctggcggatctctgagactgtcttgtgccgccagcggcttcagcttcagcgacttttggatgagctgggtccgacaggcccctggcaaaggacttgaatgggtcgccacaatcagccaggccggcagcgagaaggactacgtggactctgtgaagggcagattcaccatcagccgggacaacgccaagaagtccctgtacctccagatgaacagcctgagagccgaggacaccgccgtgtactattgtgcctctggcgtgtacagcttcgactacagaggccagggcaccctggtcacagtctcttctggtaccggcggaggcggatctggcggcggaggtagcggtggcggaggatctgaattcgacatccagatgacccagagccccagcagcctgtctgccagcgtgggcgacagagtgaccatcacctgtagagccagccagggcatcagctcttggctggcctggtatcagcagaagcccgagaaggcccccaagagcctgatctacgccgcctctagtctccagagcggcgtgcccagcagattttctggcagcggctccggcaccgacttcaccctgacaatcagctccctccagcccgaggacttcgccacctactactgccagcagtacaacagctacccccccacctttggcggaggcaccaaggtggaaatcaagctcgagatccagaaccctgatcctgccgtgtaccagctgcgggatagcaagagcagcgacaagagcgtgtgtctgttcaccgacttcgacagccagaccaacgtgtcccagagcaaggactccgacgtgtacatcaccgataagtgcgtgctggacatgcggagcatggacttcaagagcaactccgccgtggcctggtccaacaagtccgatttcgcctgcgccaacgccttcaacaacagcattatccccgaggacacattcttcccaagccccgagagcagctgcggctttaccagcgagagctaccagcagggcgtgctgagcgccaccatcctgtacgagatcctgctgggcaaggccaccctgtacgccgtgctggtgtctgccctggtgctgatggctatggtcaagcggaaggacagccggggacgcgccaagagaagcggatctggcgtgaagcagaccctgaatttcgacctgctgaagctggctggcgacgtggaatccaacccaggccctactagtatggactggatttggcgcatccttttccttgtcggcgctgctaccggcgcgcattccgggccccagctccagctgcaagagtctggacctggcctggtcaagcctagcgagacactgagcctgacctgtaccgtgtccggcgatagcatcagcagcggcgattactactggggctggatcagacagcctcctggcaaaggactggaatggatcggccacatctactacagcggcgtgacctactacaaccccagcctgaagtccagagtgaccatcagcgtggacaccagccggaaccagttctccctgaagctgtctagcgtgacagccgccgataccgccgtgtactactgcaccagagaggacagcagcaactggcggagtagaggccagggaacactggtcacagttagctctggatccggcggaggcggaagtggaggcggaggatctggcggcggaggctctttcgaagaagtgcaactggtggaatcaggcggcggactggtgcagcctggcgagtctctgagactgagctgtgtggcctccggcttcaccttcagccggtacaagatgaactgggtgcgccaggcccctggcaagggactggaatgggtgtcctacatcagccgcagcggcagagacatctactacgccgacagcgtgaagggccggttcaccatcagcagagacaacgccaagaacagcctgtacctccagatgaactccctgcgggacgaggacaccgccgtgtactactgtgccggaaccgtgaccacctattactacttcggcatggacgtgtggggccacggcaccaccgtgacagtgtcatctacgcgtgaggacctgaagaacgtgttcccacctgaggtggccgtgttcgagcctagcgaggccgagatcagccacacccagaaagccaccctcgtgtgcctggctaccggcttctaccccgaccatgtggaactgtcttggtgggtcaacggcaaagaggtgcacagcggcgtgtgtaccgacccccagccactgaaagaacagcccgccctgaacgacagccggtactgcctgagcagcagactgagagtgtccgccaccttctggcagaacccccggaaccacttcagatgccaggtgcagttctacggcctgagcgagaacgacgagtggacccaggacagagccaagcccgtgacccagatcgtgtctgccgaagcctggggcagagccgattgcgacgtgaagctggtggaaaagagcttcgagacagacaccaacctgaacttccagaacctgagcgtgatcggcttcagaatcctgctgctgaaagtggccggctttaacctgctgatgaccctgcggctgtggtccagc

SEQ ID NO: 4814 - DNA, 2694 bp, synthetic construct
  source 1..2694: mol_type = other DNA
atggccttaccagtgaccgccttgctcctgccgctggccttgctgctccacgccgccaggccggaagtgcagctggttgaatctggcggaggactggttcagcctggcggatctctgagactgtcttgtgccgccagcggcttcagcttcagcgacttttggatgagctgggtccgacaggcccctggcaaaggacttgaatgggtcgccacaatcagccaggccggcagcgagaaggactacgtggactctgtgaagggcagattcaccatcagccgggacaacgccaagaagtccctgtacctccagatgaacagcctgagagccgaggacaccgccgtgtactattgtgcctctggcgtgtacagcttcgactacagaggccagggcaccctggtcacagtctcttctggtaccggcggaggcggatctggcggcggaggtagcggtggcggaggatctgaattcgacatccagatgacccagagccccagcagcctgtctgccagcgtgggcgacagagtgaccatcacctgtagagccagccagggcatcagctcttggctggcctggtatcagcagaagcccgagaaggcccccaagagcctgatctacgccgcctctagtctccagagcggcgtgcccagcagattttctggcagcggctccggcaccgacttcaccctgacaatcagctccctccagcccgaggacttcgccacctactactgccagcagtacaacagctaccctcccacctttggcggaggcaccaaggtggaaatcaagctcgagatccagaaccctgatcctgccgtgtaccagctgcgggatagcaagagcagcgacaagagcgtgtgtctgttcaccgacttcgacagccagaccaacgtgtcccagagcaaggactccgacgtgtacatcaccgataagtgcgtgctggacatgcggagcatggacttcaagagcaactccgccgtggcctggtccaacaagtccgatttcgcctgcgccaacgccttcaacaacagcattatccccgaggacacattcttcccaagccccgagagcagctgcggctttaccagcgagagctaccagcagggcgtgctgagcgccaccatcctgtacgagatcctgctgggcaaggccaccctgtacgccgtgctggtgtctgccctggtgctgatggctatggtcaagcggaaggacagccggggacgcgccaagagaagcggatctggcgtgaagcagaccctgaatttcgacctgctgaagctggctggcgacgtggaatccaacccaggccctactagtatggactggatttggcgcatccttttccttgtcggcgctgctaccggcgcgcattccgggccccagctccagctgcaagagtctggacctggcctggtcaagcctagcgagacactgagcctgacctgtaccgtgtccggcgatagcatcagcagcggcgattactactggggctggatcagacagcctcctggcaaaggactggaatggatcggccacatctactacagcggcgtgacctactacaaccccagcctgaagtccagagtgaccatcagcgtggacaccagccggaaccagttctccctgaagctgtctagcgtgacagccgccgataccgccgtgtactactgcaccagagaggacagcagcaactggcggagtagaggccagggaacactggtcacagttagctctggatccggcggaggcggaagtggaggcggaggatctggcggcggaggctctttcgaagaagtgcaactggtggaatccgggggaggctctgtgcagcctggcgagtctctgagactgagctgtgtggcctccggcttcaccttcagccggtacaagatgaactgggtgcgccaggcccctggcaagggactggaatgggtgtcctacatcagccgcagcggcagagacatctactacgccgacagcgtgaagggccggttcaccatcagcagagacaacgccaagaacagcctgtacctccagatgaactccctgcgggacgaggacaccgccgtgtactactgtgccggaaccgtgaccacctattactacgacttcggcatggacgtgtggggccagggcacaaccgtgacagtgtctagcacgcgtgaggacctgaagaacgtgttcccacctgaggtggccgtgttcgagcctagcgaggccgagatcagccacacccagaaagccaccctcgtgtgcctggctaccggcttctaccccgaccatgtggaactgtcttggtgggtcaacggcaaagaggtgcacagcggcgtgtgtaccgacccccagccactgaaagaacagcccgccctgaacgacagccggtactgcctgagcagcagactgagagtgtccgccaccttctggcagaacccccggaaccacttcagatgccaggtgcagttctacggcctgagcgagaacgacgagtggacccaggacagagccaagcccgtgacccagatcgtgtctgccgaagcctggggcagagccgattgcgacgtgaagctggtggaaaagagcttcgagacagacaccaacctgaacttccagaacctgagcgtgatcggcttcagaatcctgctgctgaaagtggccggctttaacctgctgatgaccctgcggctgtggtccagc

SEQ ID NO: 4815 - DNA, 2688 bp, synthetic construct
  source 1..2688: mol_type = other DNA
atggccttaccagtgaccgccttgctcctgccgctggccttgctgctccacgccgccaggccggaagtgcagctggttgaatctggcggaggactggttcagcctggcggatctctgagactgtcttgtgccgccagcggcttcagcttcagcgacttttggatgagctgggtccgacaggcccctggcaaaggacttgaatgggtcgccacaatcagccaggccggcagcgagaaggactacgtggactctgtgaagggcagattcaccatcagccgggacaacgccaagaagtccctgtacctccagatgaacagcctgagagccgaggacaccgccgtgtactattgtgcctctggcgtgtacagcttcgactacagaggccagggcaccctggtcacagtctcttctggtaccggcggaggcggatctggcggcggaggtagcggtggcggaggatctgaattccagtctgtgctgacacagcctccatctgcctctggcacacctggacagagagtgaccatcagctgtagcggcagcagaagcaacgtcggcggcaactacgtgttctggtatcagcaggtcccaggcgctacccctaagctgctgatctacagaagcaatcagcggcctagcggcgtgcccgatagatttgccggaagcaagagcggcagctctgccagccttgccatctctggactgagaagcgaggacgaggccgactactactgtgccacctgggatgatagcctgagcggcttcgtgtttggcaccggcaccaaagtgacagtgcttggtctcgagatccagaaccctgatcctgccgtgtaccagctgcgggatagcaagagcagcgacaagagcgtgtgtctgttcaccgacttcgacagccagaccaacgtgtcccagagcaaggactccgacgtgtacatcaccgataagtgcgtgctggacatgcggagcatggacttcaagagcaactccgccgtggcctggtccaacaagtccgatttcgcctgcgccaacgccttcaacaacagcattatccccgaggacacattcttcccaagccccgagagcagctgcggctttaccagcgagagctaccagcagggcgtgctgagcgccaccatcctgtacgagatcctgctgggcaaggccaccctgtacgccgtgctggtgtctgccctggtgctgatggctatggtcaagcggaaggacagccggggacgcgccaagagaagcggatctggcgtgaagcagaccctgaatttcgacctgctgaagctggctggcgacgtggaatccaacccaggccctactagtatggactggatttggcgcatccttttccttgtcggcgctgctaccggcgcgcattccgggccccagctccagctgcaagagtctggacctggcctggtcaagcctagcgagacactgagcctgacctgtaccgtgtccggcgatagcatcagcagcggcgattactactggggctggatcagacagcctcctggcaaaggactggaatggatcggccacatctactacagcggcgtgacctactacaaccccagcctgaagtccagagtgaccatcagcgtggacaccagccggaaccagttctccctgaagctgtctagcgtgacagccgccgataccgccgtgtactactgcaccagagaggacagcagcaactggcggagtagaggccagggaacactggtcacagttagctctggatccggcggaggcggaagtggaggcggaggatctggcggcggaggctctttcgaagttcagctggttgaatctggcggcggactggttaagcctggcggatctctgagactgtcttgtgccgccagcggcttcaccttcagcgattactacatgagctggatcagacaggcccctggcaaaggactggaatgggtgtcctacatcagcagcagcggctccaccatctactacgccgatagcgtgaagggcagattcaccatcagccgggacaacgccaagaacagcctgtacctccagatgaactccctgagagccgaggacaccgccgtgtactattgcgccagaggctacggcaaagcctacgatcaatggggccagggcacactggtcaccgtttcttctacgcgtgaggacctgaagaacgtgttcccacctgaggtggccgtgttcgagcctagcgaggccgagatcagccacacccagaaagccaccctcgtgtgcctggctaccggcttctaccccgaccatgtggaactgtcttggtgggtcaacggcaaagaggtgcacagcggcgtgtgtaccgacccccagccactgaaagaacagcccgccctgaacgacagccggtactgcctgagcagcagactgagagtgtccgccaccttctggcagaacccccggaaccacttcagatgccaggtgcagttctacggcctgagcgagaacgacgagtggacccaggacagagccaagcccgtgacccagatcgtgtctgccgaagcctggggcagagccgattgcgacgtgaagctggtggaaaagagcttcgagacagacaccaacctgaacttccagaacctgagcgtgatcggcttcagaatcctgctgctgaaagtggccggctttaacctgctgatgaccctgcggctgtggtccagc

SEQ ID NO: 4816 - DNA, 2685 bp, synthetic construct
  source 1..2685: mol_type = other DNA
atggccttaccagtgaccgccttgctcctgccgctggccttgctgctccacgccgccaggccggaagtgcagctggttgaatctggcggaggactggttcagcctggcggatctctgagactgtcttgtgccgccagcggcttcagcttcagcgacttttggatgagctgggtccgacaggcccctggcaaaggacttgaatgggtcgccacaatcagccaggccggcagcgagaaggactacgtggactctgtgaagggcagattcaccatcagccgggacaacgccaagaagtccctgtacctccagatgaacagcctgagagccgaggacaccgccgtgtactattgtgcctctggcgtgtacagcttcgactacagaggccagggcaccctggtcacagtctcttctggtaccggcggaggcggatctggcggcggaggtagcggtggcggaggatctgaattccagtctgtggtcacacagccacctagcatgtctgccgctccaggccagcaagtgaccatctcttgtagcggcggcaacagcaacatcgagcggaactacgtgtcctggtatctgcaactgcctggcacagcccctaagctggtcatcttcgacaacgacagacggcccagcggcatccccgatagattttctggcagcaagagcggcaccagcgccacactgggaattaccggacttcagacaggcgacgaggccgactactactgtggcacatgggactctagcctgagaggctgggttttcggcggaggcacaaagctgacagtgcttggtctcgagatccagaaccctgatcctgccgtgtaccagctgcgggatagcaagagcagcgacaagagcgtgtgtctgttcaccgacttcgacagccagaccaacgtgtcccagagcaaggactccgacgtgtacatcaccgataagtgcgtgctggacatgcggagcatggacttcaagagcaactccgccgtggcctggtccaacaagtccgatttcgcctgcgccaacgccttcaacaacagcattatccccgaggacacattcttcccaagccccgagagcagctgcggctttaccagcgagagctaccagcagggcgtgctgagcgccaccatcctgtacgagatcctgctgggcaaggccaccctgtacgccgtgctggtgtctgccctggtgctgatggctatggtcaagcggaaggacagccggggacgcgccaagagaagcggatctggcgtgaagcagaccctgaatttcgacctgctgaagctggctggcgacgtggaatccaacccaggccctactagtatggactggatttggcgcatccttttccttgtcggcgctgctaccggcgcgcattccgggccccagctccagctgcaagagtctggacctggcctggtcaagcctagcgagacactgagcctgacctgtaccgtgtccggcgatagcatcagcagcggcgattactactggggctggatcagacagcctcctggcaaaggactggaatggatcggccacatctactacagcggcgtgacctactacaaccccagcctgaagtccagagtgaccatcagcgtggacaccagccggaaccagttctccctgaagctgtctagcgtgacagccgccgataccgccgtgtactactgcaccagagaggacagcagcaactggcggagtagaggccagggaacactggtcacagttagctctggatccggcggaggcggaagtggaggcggaggatctggcggcggaggctctttcgaagtgcagctcgttgagtctggcggcggactgattcaacctggcggaagcctgagactgagctgtgccgcttccggcttcaccttcagcaactacgccatgaactgggttcgacaggcccctggcaaaggactggaatgggtgtccaccatcaacggcagaggcagcagcaccatctacgccgattctgtgaagggcagattcaccatcagccgggacaacagcaagaacaccctgtacctccagatgaactccctgagagccgaggacaccgccacctattactgtgcccggtacatcagcagaggactgggcgattcttggggccagggcacactggttacagtgacgcgtgaggacctgaagaacgtgttcccacctgaggtggccgtgttcgagcctagcgaggccgagatcagccacacccagaaagccaccctcgtgtgcctggctaccggcttctaccccgaccatgtggaactgtcttggtgggtcaacggcaaagaggtgcacagcggcgtgtgtaccgacccccagccactgaaagaacagcccgccctgaacgacagccggtactgcctgagcagcagactgagagtgtccgccaccttctggcagaacccccggaaccacttcagatgccaggtgcagttctacggcctgagcgagaacgacgagtggacccaggacagagccaagcccgtgacccagatcgtgtctgccgaagcctggggcagagccgattgcgacgtgaagctggtggaaaagagcttcgagacagacaccaacctgaacttccagaacctgagcgtgatcggcttcagaatcctgctgctgaaagtggccggctttaacctgctgatgaccctgcggctgtggtccagc

SEQ ID NO: 4817 - DNA, 2688 bp, synthetic construct
  source 1..2688: mol_type = other DNA
atggccttaccagtgaccgccttgctcctgccgctggccttgctgctccacgccgccaggccggaagtgcagctggttgaatctggcggaggactggttcagcctggcggatctctgagactgtcttgtgccgccagcggcttcagcttcagcgacttttggatgagctgggtccgacaggcccctggcaaaggacttgaatgggtcgccacaatcagccaggccggcagcgagaaggactacgtggactctgtgaagggcagattcaccatcagccgggacaacgccaagaagtccctgtacctccagatgaacagcctgagagccgaggacaccgccgtgtactattgtgcctctggcgtgtacagcttcgactacagaggccagggcaccctggtcacagtctcttctggtaccggcggaggcggatctggcggcggaggtagcggtggcggaggatctgaattcgacgtcgtgatgacccagacccctctgagcctgcctgtgtccctgggcgatcaggccagcatcagctgtagaagcagccagagcctggtgcacagcaacggcaacacctacctgcactggtatctccagaagcccggccagagccccaagctgctgatctacaaggtgtccaacagattcagcggcgtgcccgacagattctccggcagcggctctggcaccgacttcaccctgaagatcagccgggtggaagccgaggacctgggcgtgtacttctgtagccagaacacccccgtgccccccaagtttggcagcggcaccaagctggaaatcaagctcgagatccagaaccctgatcctgccgtgtaccagctgcgggatagcaagagcagcgacaagagcgtgtgtctgttcaccgacttcgacagccagaccaacgtgtcccagagcaaggactccgacgtgtacatcaccgataagtgcgtgctggacatgcggagcatggacttcaagagcaactccgccgtggcctggtccaacaagtccgatttcgcctgcgccaacgccttcaacaacagcattatccccgaggacacattcttcccaagccccgagagcagctgcggctttaccagcgagagctaccagcagggcgtgctgagcgccaccatcctgtacgagatcctgctgggcaaggccaccctgtacgccgtgctggtgtctgccctggtgctgatggctatggtcaagcggaaggacagccggggacgcgccaagagaagcggatctggcgtgaagcagaccctgaatttcgacctgctgaagctggctggcgacgtggaatccaacccaggccctactagtatggactggatttggcgcatccttttccttgtcggcgctgctaccggcgcgcattccgggccccagctccagctgcaagagtctggacctggcctggtcaagcctagcgagacactgagcctgacctgtaccgtgtccggcgatagcatcagcagcggcgattactactggggctggatcagacagcctcctggcaaaggactggaatggatcggccacatctactacagcggcgtgacctactacaaccccagcctgaagtccagagtgaccatcagcgtggacaccagccggaaccagttctccctgaagctgtctagcgtgacagccgccgataccgccgtgtactactgcaccagagaggacagcagcaactggcggagtagaggccagggaacactggtcacagttagctctggatccggcggaggcggaagtggaggcggaggatctggcggcggaggctctttcgaacaggtgcagctccagcagtctggcgctgaactcgtgcggcctggcgcttctgtgaagctgtcttgcaaggccagcggctacaccttcaacgactacgagatgcactgggtcaagcagacccctgtgcacggcctgaagtggatcggagccctggaacccaagaccggcgataccgcctacagccagaagttcaagggcaaggccaccctgaccgccgacaagagcagcagcacagcctacatggaactgcggagcctgaccagcgaggacagcgccgtgtactactgcaccagctgctactactacacctacagcggccagggcaccctcgtgacagtgtctgctacgcgtgaggacctgaagaacgtgttcccacctgaggtggccgtgttcgagcctagcgaggccgagatcagccacacccagaaagccaccctcgtgtgcctggctaccggcttctaccccgaccatgtggaactgtcttggtgggtcaacggcaaagaggtgcacagcggcgtgtgtaccgacccccagccactgaaagaacagcccgccctgaacgacagccggtactgcctgagcagcagactgagagtgtccgccaccttctggcagaacccccggaaccacttcagatgccaggtgcagttctacggcctgagcgagaacgacgagtggacccaggacagagccaagcccgtgacccagatcgtgtctgccgaagcctggggcagagccgattgcgacgtgaagctggtggaaaagagcttcgagacagacaccaacctgaacttccagaacctgagcgtgatcggcttcagaatcctgctgctgaaagtggccggctttaacctgctgatgaccctgcggctgtggtccagc

SEQ ID NO: 4818 - DNA, 2685 bp, synthetic construct
  source 1..2685: mol_type = other DNA
atggccttaccagtgaccgccttgctcctgccgctggccttgctgctccacgccgccaggccggaagtgcagctggttgaatctggcggaggactggttcagcctggcggatctctgagactgtcttgtgccgccagcggcttcagcttcagcgacttttggatgagctgggtccgacaggcccctggcaaaggacttgaatgggtcgccacaatcagccaggccggcagcgagaaggactacgtggactctgtgaagggcagattcaccatcagccgggacaacgccaagaagtccctgtacctccagatgaacagcctgagagccgaggacaccgccgtgtactattgtgcctctggcgtgtacagcttcgactacagaggccagggcaccctggtcacagtctcttctggtaccggcggaggcggatctggcggcggaggtagcggtggcggaggatctgaattcgacatccaactgacccagagccccagcagcctgtctgcctctgtgggcgacagagtgaccatcacctgtagagccagccagggcatcagaaacgacctgggctggtatcagcagaagcccggcaaggcccccaagcggctgatctatgctgccagctccctccagaatggcgtgcccagcagattttccggcagcggctctggcaccgagttcaccctgaccatcagctccctccagcccgaggacttcgccacctactactgcctccagcacaacacctaccccgccttcggccagggcaccaaggtggaaatcaagagactcgagatccagaaccctgatcctgccgtgtaccagctgcgggatagcaagagcagcgacaagagcgtgtgtctgttcaccgacttcgacagccagaccaacgtgtcccagagcaaggactccgacgtgtacatcaccgataagtgcgtgctggacatgcggagcatggacttcaagagcaactccgccgtggcctggtccaacaagtccgatttcgcctgcgccaacgccttcaacaacagcattatccccgaggacacattcttcccaagccccgagagcagctgcggctttaccagcgagagctaccagcagggcgtgctgagcgccaccatcctgtacgagatcctgctgggcaaggccaccctgtacgccgtgctggtgtctgccctggtgctgatggctatggtcaagcggaaggacagccggggacgcgccaagagaagcggatctggcgtgaagcagaccctgaatttcgacctgctgaagctggctggcgacgtggaatccaacccaggccctactagtatggactggatttggcgcatccttttccttgtcggcgctgctaccggcgcgcattccgggccccagctccagctgcaagagtctggacctggcctggtcaagcctagcgagacactgagcctgacctgtaccgtgtccggcgatagcatcagcagcggcgattactactggggctggatcagacagcctcctggcaaaggactggaatggatcggccacatctactacagcggcgtgacctactacaaccccagcctgaagtccagagtgaccatcagcgtggacaccagccggaaccagttctccctgaagctgtctagcgtgacagccgccgataccgccgtgtactactgcaccagagaggacagcagcaactggcggagtagaggccagggaacactggtcacagttagctctggatccggcggaggcggaagtggaggcggaggatctggcggcggaggctctttcgaacaggtgcaactccaggaatctggccctggcctcgtgaagcctagccagaccctgagcctgacctgtaccgtgtctggcggcagcatcagcagcttcaactactactggtcctggatcagacaccaccctggcaagggcctggaatggatcggctacatctactacagcggcagcacctacagcaaccccagcctgaagtcccgcgtgaccatctccgtggacaccagcaagaaccagtttagcctgaccctgtccagcgtgacagccgccgataccgccgtgtactactgcgccagaggctacaactggaactacttcgactactggggccagggaaccctcgtgaccgtgtctagtacgcgtgaggacctgaagaacgtgttcccacctgaggtggccgtgttcgagcctagcgaggccgagatcagccacacccagaaagccaccctcgtgtgcctggctaccggcttctaccccgaccatgtggaactgtcttggtgggtcaacggcaaagaggtgcacagcggcgtgtgtaccgacccccagccactgaaagaacagcccgccctgaacgacagccggtactgcctgagcagcagactgagagtgtccgccaccttctggcagaacccccggaaccacttcagatgccaggtgcagttctacggcctgagcgagaacgacgagtggacccaggacagagccaagcccgtgacccagatcgtgtctgccgaagcctggggcagagccgattgcgacgtgaagctggtggaaaagagcttcgagacagacaccaacctgaacttccagaacctgagcgtgatcggcttcagaatcctgctgctgaaagtggccggctttaacctgctgatgaccctgcggctgtggtccagc

SEQ ID NO: 4819 - DNA, 2691 bp, synthetic construct
  source 1..2691: mol_type = other DNA
atggccttaccagtgaccgccttgctcctgccgctggccttgctgctccacgccgccaggccggaagtgcagctggttgaatctggcggaggactggttcagcctggcggatctctgagactgtcttgtgccgccagcggcttcagcttcagcgacttttggatgagctgggtccgacaggcccctggcaaaggacttgaatgggtcgccacaatcagccaggccggcagcgagaaggactacgtggactctgtgaagggcagattcaccatcagccgggacaacgccaagaagtccctgtacctccagatgaacagcctgagagccgaggacaccgccgtgtactattgtgcctctggcgtgtacagcttcgactacagaggccagggcaccctggtcacagtctcttctggtaccggcggaggcggatctggcggcggaggtagcggtggcggaggatctgaattcgacgacatcgtgctgacccagagccccgccagcctggccgtgagcctgggccagagcgtgaccatcagctgcagagccagcgagagcgtggagtactacggcaccagcctgatgcagtggtaccagcagaagcccggccagccccccaagctgctgatctacgccaccagcaacgtggagagcggcgtgcccgccagattcagcggcagcggcagcggcaccgacttcagcctgaacatccaccccgtggaggaggacgacatcgccatgtacttctgccagcagagcagaaagctgcccagcaccttcggcggcggcaccaagctggagatcaagctcgagatccagaaccctgatcctgccgtgtaccagctgcgggatagcaagagcagcgacaagagcgtgtgtctgttcaccgacttcgacagccagaccaacgtgtcccagagcaaggactccgacgtgtacatcaccgataagtgcgtgctggacatgcggagcatggacttcaagagcaactccgccgtggcctggtccaacaagtccgatttcgcctgcgccaacgccttcaacaacagcattatccccgaggacacattcttcccaagccccgagagcagctgcggctttaccagcgagagctaccagcagggcgtgctgagcgccaccatcctgtacgagatcctgctgggcaaggccaccctgtacgccgtgctggtgtctgccctggtgctgatggctatggtcaagcggaaggacagccggggacgcgccaagagaagcggatctggcgtgaagcagaccctgaatttcgacctgctgaagctggctggcgacgtggaatccaacccaggccctactagtatggactggatttggcgcatccttttccttgtcggcgctgctaccggcgcgcattccgggccccagctccagctgcaagagtctggacctggcctggtcaagcctagcgagacactgagcctgacctgtaccgtgtccggcgatagcatcagcagcggcgattactactggggctggatcagacagcctcctggcaaaggactggaatggatcggccacatctactacagcggcgtgacctactacaaccccagcctgaagtccagagtgaccatcagcgtggacaccagccggaaccagttctccctgaagctgtctagcgtgacagccgccgataccgccgtgtactactgcaccagagaggacagcagcaactggcggagtagaggccagggaacactggtcacagttagctctggatccggcggaggcggaagtggaggcggaggatctggcggcggaggctctttcgaagacgtgagactgcaggagagcggccccggccaggtgaagcccagccagaccgtgagcctgacctgcagcgtgaccggctacagcatcaccaacggcaaccactggtggaactggatcagacaggtgagcggcagcaagctggagtggatcggctacatcagcagcagcggcagcaccgacagcaaccccagcctgaagagcagaatcagcatcaccagagacaccagcaagaaccagctgttcctgcagctgaacagcgtgaccaccgaggacatcgccacctactactgcgccagaggctactacttcgactactggggccagggcaccaccctgaccgtgagcagcacgcgtgaggacctgaagaacgtgttcccacctgaggtggccgtgttcgagcctagcgaggccgagatcagccacacccagaaagccaccctcgtgtgcctggctaccggcttctaccccgaccatgtggaactgtcttggtgggtcaacggcaaagaggtgcacagcggcgtgtgtaccgacccccagccactgaaagaacagcccgccctgaacgacagccggtactgcctgagcagcagactgagagtgtccgccaccttctggcagaacccccggaaccacttcagatgccaggtgcagttctacggcctgagcgagaacgacgagtggacccaggacagagccaagcccgtgacccagatcgtgtctgccgaagcctggggcagagccgattgcgacgtgaagctggtggaaaagagcttcgagacagacaccaacctgaacttccagaacctgagcgtgatcggcttcagaatcctgctgctgaaagtggccggctttaacctgctgatgaccctgcggctgtggtccagc

SEQ ID NO: 4820 - DNA, 2688 bp, synthetic construct
  source 1..2688: mol_type = other DNA
atggccttaccagtgaccgccttgctcctgccgctggccttgctgctccacgccgccaggccggaagtgcagctggttgaatctggcggaggactggttcagcctggcggatctctgagactgtcttgtgccgccagcggcttcagcttcagcgacttttggatgagctgggtccgacaggcccctggcaaaggacttgaatgggtcgccacaatcagccaggccggcagcgagaaggactacgtggactctgtgaagggcagattcaccatcagccgggacaacgccaagaagtccctgtacctccagatgaacagcctgagagccgaggacaccgccgtgtactattgtgcctctggcgtgtacagcttcgactacagaggccagggcaccctggtcacagtctcttctggtaccggcggaggcggatctggcggcggaggtagcggtggcggaggatctgaattcgacatccagatgacccagagccccagcagcctgtctgccagcgtgggcgacagagtgaccatcacctgtagagccagccaggacgtgaacaccgccgtggcctggtatcagcagaagcctggcaaggcccccaagctgctgatctacagcgccagcttcctggaaagcggcgtgcccagcagattcagcggaagcagaagcggcaccgacttcaccctgaccatcagctccctccagcccgaggacttcgccacctactactgccagcagcactacaccacccctcccaccttcggccagaccaaggtggaaatcaagagactcgagatccagaaccctgatcctgccgtgtaccagctgcgggatagcaagagcagcgacaagagcgtgtgtctgttcaccgacttcgacagccagaccaacgtgtcccagagcaaggactccgacgtgtacatcaccgataagtgcgtgctggacatgcggagcatggacttcaagagcaactccgccgtggcctggtccaacaagtccgatttcgcctgcgccaacgccttcaacaacagcattatccccgaggacacattcttcccaagccccgagagcagctgcggctttaccagcgagagctaccagcagggcgtgctgagcgccaccatcctgtacgagatcctgctgggcaaggccaccctgtacgccgtgctggtgtctgccctggtgctgatggctatggtcaagcggaaggacagccggggacgcgccaagagaagcggatctggcgtgaagcagaccctgaatttcgacctgctgaagctggctggcgacgtggaatccaacccaggccctactagtatggactggatttggcgcatccttttccttgtcggcgctgctaccggcgcgcattccgggccccagctccagctgcaagagtctggacctggcctggtcaagcctagcgagacactgagcctgacctgtaccgtgtccggcgatagcatcagcagcggcgattactactggggctggatcagacagcctcctggcaaaggactggaatggatcggccacatctactacagcggcgtgacctactacaaccccagcctgaagtccagagtgaccatcagcgtggacaccagccggaaccagttctccctgaagctgtctagcgtgacagccgccgataccgccgtgtactactgcaccagagaggacagcagcaactggcggagtagaggccagggaacactggtcacagttagctctggatccggcggaggcggaagtggaggcggaggatctggcggcggaggctctttcgaagaagtgcaactggtggaatctggcggcggactggtgcagcctggcggatctctgagactgagctgtgccgccagcggcttcaacatcaaggacacctacatccactgggtgcgccaggcccctggaaagggactggaatgggtggcccggatctaccccaccaacggctacaccagatacgccgacagcgtgaagggccggttcaccatcagcgccgacaccagcaagaataccgcctacctccagatgaacagcctgcgggccgaggataccgccgtgtactactgctcaagatggggaggcgacggcttctacgctatggacgtgtggggccagggcacccttgtgaccgtgtcatctacgcgtgaggacctgaagaacgtgttcccacctgaggtggccgtgttcgagcctagcgaggccgagatcagccacacccagaaagccaccctcgtgtgcctggctaccggcttctaccccgaccatgtggaactgtcttggtgggtcaacggcaaagaggtgcacagcggcgtgtgtaccgacccccagccactgaaagaacagcccgccctgaacgacagccggtactgcctgagcagcagactgagagtgtccgccaccttctggcagaacccccggaaccacttcagatgccaggtgcagttctacggcctgagcgagaacgacgagtggacccaggacagagccaagcccgtgacccagatcgtgtctgccgaagcctggggcagagccgattgcgacgtgaagctggtggaaaagagcttcgagacagacaccaacctgaacttccagaacctgagcgtgatcggcttcagaatcctgctgctgaaagtggccggctttaacctgctgatgaccctgcggctgtggtccagc

SEQ ID NO: 4821 - DNA, 2685 bp, synthetic construct
  source 1..2685: mol_type = other DNA
atggccttaccagtgaccgccttgctcctgccgctggccttgctgctccacgccgccaggccggaagtgcagctggttgaatctggcggaggactggttcagcctggcggatctctgagactgtcttgtgccgccagcggcttcagcttcagcgacttttggatgagctgggtccgacaggcccctggcaaaggacttgaatgggtcgccacaatcagccaggccggcagcgagaaggactacgtggactctgtgaagggcagattcaccatcagccgggacaacgccaagaagtccctgtacctccagatgaacagcctgagagccgaggacaccgccgtgtactattgtgcctctggcgtgtacagcttcgactacagaggccagggcaccctggtcacagtctcttctggtaccggcggaggcggatctggcggcggaggtagcggtggcggaggatctgaattcgaccagagcgtgctgacacagcctcctagcgtgtcagtggcccctggcaagaccgccagaatcccctgcgagggcaactacatcggcagcagcaacgtgcactggtatcagcagaagcccggccaggctcccgtgctcgtgatccacttcgacagcgacagacccagcggcatccccgacagattcagcggcagcaacagcggcaacatggctaccctgaccatcagcagagtggaagccggggacgaggccgactactactgtcaagtgtgggagaaccacggctgggtgttcggcggaggcaccaagctgacagtgctgtctctcgagatccagaaccctgatcctgccgtgtaccagctgcgggatagcaagagcagcgacaagagcgtgtgtctgttcaccgacttcgacagccagaccaacgtgtcccagagcaaggactccgacgtgtacatcaccgataagtgcgtgctggacatgcggagcatggacttcaagagcaactccgccgtggcctggtccaacaagtccgatttcgcctgcgccaacgccttcaacaacagcattatccccgaggacacattcttcccaagccccgagagcagctgcggctttaccagcgagagctaccagcagggcgtgctgagcgccaccatcctgtacgagatcctgctgggcaaggccaccctgtacgccgtgctggtgtctgccctggtgctgatggctatggtcaagcggaaggacagccggggacgcgccaagagaagcggatctggcgtgaagcagaccctgaatttcgacctgctgaagctggctggcgacgtggaatccaacccaggccctactagtatggactggatttggcgcatccttttccttgtcggcgctgctaccggcgcgcattccgggccccagctccagctgcaagagtctggacctggcctggtcaagcctagcgagacactgagcctgacctgtaccgtgtccggcgatagcatcagcagcggcgattactactggggctggatcagacagcctcctggcaaaggactggaatggatcggccacatctactacagcggcgtgacctactacaaccccagcctgaagtccagagtgaccatcagcgtggacaccagccggaaccagttctccctgaagctgtctagcgtgacagccgccgataccgccgtgtactactgcaccagagaggacagcagcaactggcggagtagaggccagggaacactggtcacagttagctctggatccggcggaggcggaagtggaggcggaggatctggcggcggaggctctttcgaagaggtgcaactggtggaaacaggcggcggactggtgcagcctggcgagtctctgagactgagctgtgccgccagcggcttcaccttcagcgactacgagatgaactgggtgcgccaggcccctggaaagggcctggaatgggtgtcctacatcagcagctccggcagcaccatctactacgccgacagcgtgaagggccggtttaccatctaccgggacaacgccaagaacagcctgtacctccagatgaactccctgcgggccgaggacaccgccctgtactattgtgccagagcctggggcgtgggaccccctgattattggggacagggcaccctcgtgaccgtgtcctctacgcgtgaggacctgaagaacgtgttcccacctgaggtggccgtgttcgagcctagcgaggccgagatcagccacacccagaaagccaccctcgtgtgcctggctaccggcttctaccccgaccatgtggaactgtcttggtgggtcaacggcaaagaggtgcacagcggcgtgtgtaccgacccccagccactgaaagaacagcccgccctgaacgacagccggtactgcctgagcagcagactgagagtgtccgccaccttctggcagaacccccggaaccacttcagatgccaggtgcagttctacggcctgagcgagaacgacgagtggacccaggacagagccaagcccgtgacccagatcgtgtctgccgaagcctggggcagagccgattgcgacgtgaagctggtggaaaagagcttcgagacagacaccaacctgaacttccagaacctgagcgtgatcggcttcagaatcctgctgctgaaagtggccggctttaacctgctgatgaccctgcggctgtggtccagc

SEQ ID NO: 4822 - DNA, 2709 bp, synthetic construct
  source 1..2709: mol_type = other DNA
atggccttaccagtgaccgccttgctcctgccgctggccttgctgctccacgccgccaggccggaagtgcagctggttgaatctggcggaggactggttcagcctggcggatctctgagactgtcttgtgccgccagcggcttcagcttcagcgacttttggatgagctgggtccgacaggcccctggcaaaggacttgaatgggtcgccacaatcagccaggccggcagcgagaaggactacgtggactctgtgaagggcagattcaccatcagccgggacaacgccaagaagtccctgtacctccagatgaacagcctgagagccgaggacaccgccgtgtactattgtgcctctggcgtgtacagcttcgactacagaggccagggcaccctggtcacagtctcttctggtaccggcggaggcggatctggcggcggaggtagcggtggcggaggatctgaattcgacatccagatgacccagagccccagcagcctgtctgccagcgtgggcgataccgtgaccatcacctgtcaggccaacggctacctgaactggtatcagcagcggagaggcaaggcccccaagctgctgatctacgacggcagcaagctggaaagaggcgtgcccagcagattcagcggcagaagatggggccaggagtacaacctgaccatcaacaacctccagcccgaggatattgccacatacttttgccaggtgtacgagttcgtggtgcccggcacacggctggacctgaagagaacagtggctgctcctctcgagatccagaaccctgatcctgccgtgtaccagctgcgggatagcaagagcagcgacaagagcgtgtgtctgttcaccgacttcgacagccagaccaacgtgtcccagagcaaggactccgacgtgtacatcaccgataagtgcgtgctggacatgcggagcatggacttcaagagcaactccgccgtggcctggtccaacaagtccgatttcgcctgcgccaacgccttcaacaacagcattatccccgaggacacattcttcccaagccccgagagcagctgcggctttaccagcgagagctaccagcagggcgtgctgagcgccaccatcctgtacgagatcctgctgggcaaggccaccctgtacgccgtgctggtgtctgccctggtgctgatggctatggtcaagcggaaggacagccggggacgcgccaagagaagcggatctggcgtgaagcagaccctgaatttcgacctgctgaagctggctggcgacgtggaatccaacccaggccctactagtatggactggatttggcgcatccttttccttgtcggcgctgctaccggcgcgcattccgggccccagctccagctgcaagagtctggacctggcctggtcaagcctagcgagacactgagcctgacctgtaccgtgtccggcgatagcatcagcagcggcgattactactggggctggatcagacagcctcctggcaaaggactggaatggatcggccacatctactacagcggcgtgacctactacaaccccagcctgaagtccagagtgaccatcagcgtggacaccagccggaaccagttctccctgaagctgtctagcgtgacagccgccgataccgccgtgtactactgcaccagagaggacagcagcaactggcggagtagaggccagggaacactggtcacagttagctctggatccggcggaggcggaagtggaggcggaggatctggcggcggaggctctttcgaacaggtgcagctgctccagtctggcgctgccgtgacaaagcctggcgcttctgtgcgggtgtcctgtgaagccagcggctacaacatccgggactacttcatccactggtggcggcaggctccaggccagggactccagtgggtgggatggatcaaccccaagaccggccagcccaacaaccccagacagttccagggcagagtgtccctgaccagacacgccagctgggacttcgacaccttcagcttctacatggatctgaaggccctgcggagcgacgataccgccgtgtacttctgcgccagacagagaagcgactactgggatttcgacgtgtggggcagcggcacccaagtgacagtgtctagcgccagcaccaagggacccacgcgtgaggacctgaagaacgtgttcccacctgaggtggccgtgttcgagcctagcgaggccgagatcagccacacccagaaagccaccctcgtgtgcctggctaccggcttctaccccgaccatgtggaactgtcttggtgggtcaacggcaaagaggtgcacagcggcgtgtgtaccgacccccagccactgaaagaacagcccgccctgaacgacagccggtactgcctgagcagcagactgagagtgtccgccaccttctggcagaacccccggaaccacttcagatgccaggtgcagttctacggcctgagcgagaacgacgagtggacccaggacagagccaagcccgtgacccagatcgtgtctgccgaagcctggggcagagccgattgcgacgtgaagctggtggaaaagagcttcgagacagacaccaacctgaacttccagaacctgagcgtgatcggcttcagaatcctgctgctgaaagtggccggctttaacctgctgatgaccctgcggctgtggtccagc

SEQ ID NO: 4823 - DNA, 2727 bp, synthetic construct
  source 1..2727: mol_type = other DNA
atggccttaccagtgaccgccttgctcctgccgctggccttgctgctccacgccgccaggccggaagtgcagctggttgaatctggcggaggactggttcagcctggcggatctctgagactgtcttgtgccgccagcggcttcagcttcagcgacttttggatgagctgggtccgacaggcccctggcaaaggacttgaatgggtcgccacaatcagccaggccggcagcgagaaggactacgtggactctgtgaagggcagattcaccatcagccgggacaacgccaagaagtccctgtacctccagatgaacagcctgagagccgaggacaccgccgtgtactattgtgcctctggcgtgtacagcttcgactacagaggccagggcaccctggtcacagtctcttctggtaccggcggaggcggatctggcggcggaggtagcggtggcggaggatctgaattccagtctgccctgacacagcctcctagcgcctctggctctcccggccagagcatcaccatcagctgtaccggcaccagcaacaacttcgtgtcctggtatcagcagcacgccggcaaggcccccaagctcgtgatctacgacgtgaacaagcggcccagcggcgtgcccgatagattcagcggcagcaagagcggcaacaccgccagcctgacagtgtctggcctccagaccgatgacgaggccgtgtactactgcggcagcctcgtgggcaactgggacgtgatctttggcggaggcaccaagctgaccgtgctgctcgagatccagaaccctgatcctgccgtgtaccagctgcgggatagcaagagcagcgacaagagcgtgtgtctgttcaccgacttcgacagccagaccaacgtgtcccagagcaaggactccgacgtgtacatcaccgataagtgcgtgctggacatgcggagcatggacttcaagagcaactccgccgtggcctggtccaacaagtccgatttcgcctgcgccaacgccttcaacaacagcattatccccgaggacacattcttcccaagccccgagagcagctgcggctttaccagcgagagctaccagcagggcgtgctgagcgccaccatcctgtacgagatcctgctgggcaaggccaccctgtacgccgtgctggtgtctgccctggtgctgatggctatggtcaagcggaaggacagccggggacgcgccaagagaagcggatctggcgtgaagcagaccctgaatttcgacctgctgaagctggctggcgacgtggaatccaacccaggccctactagtatggactggatttggcgcatccttttccttgtcggcgctgctaccggcgcgcattccgggccccagctccagctgcaagagtctggacctggcctggtcaagcctagcgagacactgagcctgacctgtaccgtgtccggcgatagcatcagcagcggcgattactactggggctggatcagacagcctcctggcaaaggactggaatggatcggccacatctactacagcggcgtgacctactacaaccccagcctgaagtccagagtgaccatcagcgtggacaccagccggaaccagttctccctgaagctgtctagcgtgacagccgccgataccgccgtgtactactgcaccagagaggacagcagcaactggcggagtagaggccagggaacactggtcacagttagctctggatccggcggaggcggaagtggaggcggaggatctggcggcggaggctctttcgaacagccccagctccaggaatctggccccacactggtggaagccagcgagacactgagcctgacctgtgccgtgtccggcgattctaccgccgcctgcaatagcttctggggctgggtgcgccagcctcctggaaagggactggaatgggtgggaagcctgagccactgcgccagctattggaaccggggctggacctaccacaaccccagcctgaagtccagactgaccctggccctggacacccccaagaacctggtgttcctgaagctgaacagcgtgacagccgccgacaccgccacctactactgtgccagatttggcggcgaggtgctgcggtacaccgactggcctaaacctgcctgggtggacctgtggggcagaggaacactcgtgaccgtgtccagcacgcgtgaggacctgaagaacgtgttcccacctgaggtggccgtgttcgagcctagcgaggccgagatcagccacacccagaaagccaccctcgtgtgcctggctaccggcttctaccccgaccatgtggaactgtcttggtgggtcaacggcaaagaggtgcacagcggcgtgtgtaccgacccccagccactgaaagaacagcccgccctgaacgacagccggtactgcctgagcagcagactgagagtgtccgccaccttctggcagaacccccggaaccacttcagatgccaggtgcagttctacggcctgagcgagaacgacgagtggacccaggacagagccaagcccgtgacccagatcgtgtctgccgaagcctggggcagagccgattgcgacgtgaagctggtggaaaagagcttcgagacagacaccaacctgaacttccagaacctgagcgtgatcggcttcagaatcctgctgctgaaagtggccggctttaacctgctgatgaccctgcggctgtggtccagc

SEQ ID NO: 4824 - DNA, 2682 bp, synthetic construct
  source 1..2682: mol_type = other DNA
atggccttaccagtgaccgccttgctcctgccgctggccttgctgctccacgccgccaggccggaagtgcagctggttgaatctggcggaggactggttcagcctggcggatctctgagactgtcttgtgccgccagcggcttcagcttcagcgacttttggatgagctgggtccgacaggcccctggcaaaggacttgaatgggtcgccacaatcagccaggccggcagcgagaaggactacgtggactctgtgaagggcagattcaccatcagccgggacaacgccaagaagtccctgtacctccagatgaacagcctgagagccgaggacaccgccgtgtactattgtgcctctggcgtgtacagcttcgactacagaggccagggcaccctggtcacagtctcttctggtaccggcggaggcggatctggcggcggaggtagcggtggcggaggatctgaattcgagatcgtgctgacacagagccctggcaccctgagcctgtctccaggcgagacagccatcatcagctgccggacaagccagtacggcagcctggcctggtatcagcagaggccaggacaggcccccagactcgtgatctacagcggcagcacaagagccgccggaatccccgatagattcagcggctccagatggggacccgactacaacctgaccatcagcaacctggaaagcggcgacttcggcgtgtactactgccagcagtacgagttcttcggccagggcaccaaggtgcaggtggacatcaaaagactcgagatccagaaccctgatcctgccgtgtaccagctgcgggatagcaagagcagcgacaagagcgtgtgtctgttcaccgacttcgacagccagaccaacgtgtcccagagcaaggactccgacgtgtacatcaccgataagtgcgtgctggacatgcggagcatggacttcaagagcaactccgccgtggcctggtccaacaagtccgatttcgcctgcgccaacgccttcaacaacagcattatccccgaggacacattcttcccaagccccgagagcagctgcggctttaccagcgagagctaccagcagggcgtgctgagcgccaccatcctgtacgagatcctgctgggcaaggccaccctgtacgccgtgctggtgtctgccctggtgctgatggctatggtcaagcggaaggacagccggggacgcgccaagagaagcggatctggcgtgaagcagaccctgaatttcgacctgctgaagctggctggcgacgtggaatccaacccaggccctactagtatggactggatttggcgcatccttttccttgtcggcgctgctaccggcgcgcattccgggccccagctccagctgcaagagtctggacctggcctggtcaagcctagcgagacactgagcctgacctgtaccgtgtccggcgatagcatcagcagcggcgattactactggggctggatcagacagcctcctggcaaaggactggaatggatcggccacatctactacagcggcgtgacctactacaaccccagcctgaagtccagagtgaccatcagcgtggacaccagccggaaccagttctccctgaagctgtctagcgtgacagccgccgataccgccgtgtactactgcaccagagaggacagcagcaactggcggagtagaggccagggaacactggtcacagttagctctggatccggcggaggcggaagtggaggcggaggatctggcggcggaggctctttcgaacaggtgcagctggtgcagtctggcggccagatgaagaaacccggcgagagcatgagaatcagctgtcgggcctccggctacgagttcatcgactgcaccctgaactggatcagactggcccctggcaagcggcctgagtggatgggatggctgaagcctagaggcggagccgtgaactacgccagacctctccagggcagagtgaccatgaccagggacgtgtacagcgataccgccttcctggaactgcggagcctgaccgtggatgataccgccgtgtacttctgcaccagaggcaagaactgcgattacaactgggacttcgagcactggggcagaggcacccctgtgatcgtgtctagcacgcgtgaggacctgaagaacgtgttcccacctgaggtggccgtgttcgagcctagcgaggccgagatcagccacacccagaaagccaccctcgtgtgcctggctaccggcttctaccccgaccatgtggaactgtcttggtgggtcaacggcaaagaggtgcacagcggcgtgtgtaccgacccccagccactgaaagaacagcccgccctgaacgacagccggtactgcctgagcagcagactgagagtgtccgccaccttctggcagaacccccggaaccacttcagatgccaggtgcagttctacggcctgagcgagaacgacgagtggacccaggacagagccaagcccgtgacccagatcgtgtctgccgaagcctggggcagagccgattgcgacgtgaagctggtggaaaagagcttcgagacagacaccaacctgaacttccagaacctgagcgtgatcggcttcagaatcctgctgctgaaagtggccggctttaacctgctgatgaccctgcggctgtggtccagc

SEQ ID NO: 4825 - DNA, 2712 bp, synthetic construct
  source 1..2712: mol_type = other DNA
atggccttaccagtgaccgccttgctcctgccgctggccttgctgctccacgccgccaggccggaagtgcagctggttgaatctggcggaggactggttcagcctggcggatctctgagactgtcttgtgccgccagcggcttcagcttcagcgacttttggatgagctgggtccgacaggcccctggcaaaggacttgaatgggtcgccacaatcagccaggccggcagcgagaaggactacgtggactctgtgaagggcagattcaccatcagccgggacaacgccaagaagtccctgtacctccagatgaacagcctgagagccgaggacaccgccgtgtactattgtgcctctggcgtgtacagcttcgactacagaggccagggcaccctggtcacagtctcttctggtaccggcggaggcggatctggcggcggaggtagcggtggcggaggatctgaattcgagctggtgctgacacagagccctggcaccctgtctctgtctgccggcgaaagagccaccctgagctgtagagccagccagagcgtgtcctctggcagcctggcttggtatcagcagaagccaggccaggcccccagactgctgatctacggcgcttctaccagagccaccggcatccccgatagattcagcggctctggctccggcaccgacttcaccctgacaatcggcagactggaacccgaggacctggccgtgtactactgccagcagtacggcaccagcccctacacattcggccagggcaccaagctggaaatcctcgagatccagaaccctgatcctgccgtgtaccagctgcgggatagcaagagcagcgacaagagcgtgtgtctgttcaccgacttcgacagccagaccaacgtgtcccagagcaaggactccgacgtgtacatcaccgataagtgcgtgctggacatgcggagcatggacttcaagagcaactccgccgtggcctggtccaacaagtccgatttcgcctgcgccaacgccttcaacaacagcattatccccgaggacacattcttcccaagccccgagagcagctgcggctttaccagcgagagctaccagcagggcgtgctgagcgccaccatcctgtacgagatcctgctgggcaaggccaccctgtacgccgtgctggtgtctgccctggtgctgatggctatggtcaagcggaaggacagccggggacgcgccaagagaagcggatctggcgtgaagcagaccctgaatttcgacctgctgaagctggctggcgacgtggaatccaacccaggccctactagtatggactggatttggcgcatccttttccttgtcggcgctgctaccggcgcgcattccgggccccagctccagctgcaagagtctggacctggcctggtcaagcctagcgagacactgagcctgacctgtaccgtgtccggcgatagcatcagcagcggcgattactactggggctggatcagacagcctcctggcaaaggactggaatggatcggccacatctactacagcggcgtgacctactacaaccccagcctgaagtccagagtgaccatcagcgtggacaccagccggaaccagttctccctgaagctgtctagcgtgacagccgccgataccgccgtgtactactgcaccagagaggacagcagcaactggcggagtagaggccagggaacactggtcacagttagctctggatccggcggaggcggaagtggaggcggaggatctggcggcggaggctctttcgaactggaacagagcggagccgaagtgaagaaacccggcagcagcgtgcaggtgtcctgcaaagcaagcggcggcaccttctctatgtacggcttcaactgggtgcgccaggctcctggacacggcctggaatggatgggcggcatcatccccatcttcggcacctccaactacgcccagaaattccggggcagagtgaccttcaccgccgaccaggccacaagcaccgcctacatggaactgaccaacctgcggagcgacgacaccgccgtgtattattgcgccagagacttcggccccgactgggaggatggcgacagctacgatggcagcggcagaggcttcttcgacttctggggccagggaacccttgtgaccgtgtcctcaacgcgtgaggacctgaagaacgtgttcccacctgaggtggccgtgttcgagcctagcgaggccgagatcagccacacccagaaagccaccctcgtgtgcctggctaccggcttctaccccgaccatgtggaactgtcttggtgggtcaacggcaaagaggtgcacagcggcgtgtgtaccgacccccagccactgaaagaacagcccgccctgaacgacagccggtactgcctgagcagcagactgagagtgtccgccaccttctggcagaacccccggaaccacttcagatgccaggtgcagttctacggcctgagcgagaacgacgagtggacccaggacagagccaagcccgtgacccagatcgtgtctgccgaagcctggggcagagccgattgcgacgtgaagctggtggaaaagagcttcgagacagacaccaacctgaacttccagaacctgagcgtgatcggcttcagaatcctgctgctgaaagtggccggctttaacctgctgatgaccctgcggctgtggtccagc

SEQ ID NO: 4826 - DNA, 2652 bp, synthetic construct
  source 1..2652: mol_type = other DNA
atggccttaccagtgaccgccttgctcctgccgctggccttgctgctccacgccgccaggccggaagtgcagctggttgaatctggcggaggactggttcagcctggcggatctctgagactgtcttgtgccgccagcggcttcagcttcagcgacttttggatgagctgggtccgacaggcccctggcaaaggacttgaatgggtcgccacaatcagccaggccggcagcgagaaggactacgtggactctgtgaagggcagattcaccatcagccgggacaacgccaagaagtccctgtacctccagatgaacagcctgagagccgaggacaccgccgtgtactattgtgcctctggcgtgtacagcttcgactacagaggccagggcaccctggtcacagtctcttctggtaccggcggaggcggatctggcggcggaggtagcggtggcggaggatctgaattcgacatccagatgacccagagccccagcagcctgtctgccagcgtgggcgacagagtgaccatcacctgtcaggccagccaggacatcaacaactacctgaactggtatcagcagaagcccggcaaggcccccaagctgctgatctacgacgccagcaatctgcagaccggcgtgcccagcagattttccggctctggcagcggcaccgacttcaccttcaccatcgaggacattgccacctactactgccagcagtacaccttcggccctggcaccaaggtggacatcaaactcgagatccagaaccctgatcctgccgtgtaccagctgcgggatagcaagagcagcgacaagagcgtgtgtctgttcaccgacttcgacagccagaccaacgtgtcccagagcaaggactccgacgtgtacatcaccgataagtgcgtgctggacatgcggagcatggacttcaagagcaactccgccgtggcctggtccaacaagtccgatttcgcctgcgccaacgccttcaacaacagcattatccccgaggacacattcttcccaagccccgagagcagctgcggctttaccagcgagagctaccagcagggcgtgctgagcgccaccatcctgtacgagatcctgctgggcaaggccaccctgtacgccgtgctggtgtctgccctggtgctgatggctatggtcaagcggaaggacagccggggacgcgccaagagaagcggatctggcgtgaagcagaccctgaatttcgacctgctgaagctggctggcgacgtggaatccaacccaggccctactagtatggactggatttggcgcatccttttccttgtcggcgctgctaccggcgcgcattccgggccccagctccagctgcaagagtctggacctggcctggtcaagcctagcgagacactgagcctgacctgtaccgtgtccggcgatagcatcagcagcggcgattactactggggctggatcagacagcctcctggcaaaggactggaatggatcggccacatctactacagcggcgtgacctactacaaccccagcctgaagtccagagtgaccatcagcgtggacaccagccggaaccagttctccctgaagctgtctagcgtgacagccgccgataccgccgtgtactactgcaccagagaggacagcagcaactggcggagtagaggccagggaacactggtcacagttagctctggatccggcggaggcggaagtggaggcggaggatctggcggcggaggctctttcgaagaagtgcaactgctggaatctggcggcggactggtgcagcctggcggatctctgagactgagctgtgccgccagcggcttcacctttagctggtacagcatgacctgggtgcgccaggcccctggcaaaggactggaatgggtgtccagcatcgtgccctggggcgatttcacccagtacgccgatagcgtgaagggccggttcaccatcagccgggacaacagcaagaacaccctgtacctgcagatgaacagcctgcgggccgaggacaccgccgtgtactattgtgccaagggacctggctggggcagcttcgatctgtggggcagaggaacccttgtgaccgtgtccagcacgcgtgaggacctgaagaacgtgttcccacctgaggtggccgtgttcgagcctagcgaggccgagatcagccacacccagaaagccaccctcgtgtgcctggctaccggcttctaccccgaccatgtggaactgtcttggtgggtcaacggcaaagaggtgcacagcggcgtgtgtaccgacccccagccactgaaagaacagcccgccctgaacgacagccggtactgcctgagcagcagactgagagtgtccgccaccttctggcagaacccccggaaccacttcagatgccaggtgcagttctacggcctgagcgagaacgacgagtggacccaggacagagccaagcccgtgacccagatcgtgtctgccgaagcctggggcagagccgattgcgacgtgaagctggtggaaaagagcttcgagacagacaccaacctgaacttccagaacctgagcgtgatcggcttcagaatcctgctgctgaaagtggccggctttaacctgctgatgaccctgcggctgtggtccagc

SEQ ID NO: 4827 - DNA, 2682 bp, synthetic construct
  source 1..2682: mol_type = other DNA
atggccttaccagtgaccgccttgctcctgccgctggccttgctgctccacgccgccaggccggaagtgcagctggttgaatctggcggaggactggttcagcctggcggatctctgagactgtcttgtgccgccagcggcttcagcttcagcgacttttggatgagctgggtccgacaggcccctggcaaaggacttgaatgggtcgccacaatcagccaggccggcagcgagaaggactacgtggactctgtgaagggcagattcaccatcagccgggacaacgccaagaagtccctgtacctccagatgaacagcctgagagccgaggacaccgccgtgtactattgtgcctctggcgtgtacagcttcgactacagaggccagggcaccctggtcacagtctcttctggtaccggcggaggcggatctggcggcggaggtagcggtggcggaggatctgaattcgacatccagatgacccagagccccagcagcctgtctgccagcgtgggcgacagagtgaccatcacctgtaccgccagcctgagcgtgtccagcacctacctgcactggtatcagcagaagcccggcagcagccccaagctgtggatctacagcaccagcaacctggcctccggcgtgcccagcagattttctggcagcggctctggcaccagctacaccctgaccatcagctccctccagcccgaggacttcgccacctactactgccaccagtaccacagaagccccctgacctttggcggaggcaccaaggtggaaatcaagagactcgagatccagaaccctgatcctgccgtgtaccagctgcgggatagcaagagcagcgacaagagcgtgtgtctgttcaccgacttcgacagccagaccaacgtgtcccagagcaaggactccgacgtgtacatcaccgataagtgcgtgctggacatgcggagcatggacttcaagagcaactccgccgtggcctggtccaacaagtccgatttcgcctgcgccaacgccttcaacaacagcattatccccgaggacacattcttcccaagccccgagagcagctgcggctttaccagcgagagctaccagcagggcgtgctgagcgccaccatcctgtacgagatcctgctgggcaaggccaccctgtacgccgtgctggtgtctgccctggtgctgatggctatggtcaagcggaaggacagccggggacgcgccaagagaagcggatctggcgtgaagcagaccctgaatttcgacctgctgaagctggctggcgacgtggaatccaacccaggccctactagtatggactggatttggcgcatccttttccttgtcggcgctgctaccggcgcgcattccgggccccagctccagctgcaagagtctggacctggcctggtcaagcctagcgagacactgagcctgacctgtaccgtgtccggcgatagcatcagcagcggcgattactactggggctggatcagacagcctcctggcaaaggactggaatggatcggccacatctactacagcggcgtgacctactacaaccccagcctgaagtccagagtgaccatcagcgtggacaccagccggaaccagttctccctgaagctgtctagcgtgacagccgccgataccgccgtgtactactgcaccagagaggacagcagcaactggcggagtagaggccagggaacactggtcacagttagctctggatccggcggaggcggaagtggaggcggaggatctggcggcggaggctctttcgaagaagtgcaactggtggaatctggcggcggactggtgcagcctggcggatctctgagactgagctgtgccgccagcggcttcagcctgaccaaatacggcgtgcactgggtgcgccaggcccctggaaaaggactggaatgggtgggagtgaagtgggctggcggctccaccgactacaacagcgccctgatgagccggttcaccatcagcaaggacaacgccaagaacagcctgtacctccagatgaactccctgcgggccgaggacaccgccgtgtactactgtgccagagatcaccgggacgctatggactactggggccagggaacactcgtgaccgtgtcctctacgcgtgaggacctgaagaacgtgttcccacctgaggtggccgtgttcgagcctagcgaggccgagatcagccacacccagaaagccaccctcgtgtgcctggctaccggcttctaccccgaccatgtggaactgtcttggtgggtcaacggcaaagaggtgcacagcggcgtgtgtaccgacccccagccactgaaagaacagcccgccctgaacgacagccggtactgcctgagcagcagactgagagtgtccgccaccttctggcagaacccccggaaccacttcagatgccaggtgcagttctacggcctgagcgagaacgacgagtggacccaggacagagccaagcccgtgacccagatcgtgtctgccgaagcctggggcagagccgattgcgacgtgaagctggtggaaaagagcttcgagacagacaccaacctgaacttccagaacctgagcgtgatcggcttcagaatcctgctgctgaaagtggccggctttaacctgctgatgaccctgcggctgtggtccagc

SEQ ID NO: 4828 - DNA, 2694 bp, synthetic construct
  source 1..2694: mol_type = other DNA
atggccttaccagtgaccgccttgctcctgccgctggccttgctgctccacgccgccaggccggaagtgcagctggttgaatctggcggaggactggttcagcctggcggatctctgagactgtcttgtgccgccagcggcttcagcttcagcgacttttggatgagctgggtccgacaggcccctggcaaaggacttgaatgggtcgccacaatcagccaggccggcagcgagaaggactacgtggactctgtgaagggcagattcaccatcagccgggacaacgccaagaagtccctgtacctccagatgaacagcctgagagccgaggacaccgccgtgtactattgtgcctctggcgtgtacagcttcgactacagaggccagggcaccctggtcacagtctcttctggtaccggcggaggcggatctggcggcggaggtagcggtggcggaggatctgaattcgacatccagatgacccagagccccagcagcctgtctgccagcgtgggcgacagagtgaccatcacatgcaaggccagccaggacgtgggaacagccgtggcctggtatcagcagaagcctggcaaggcccccaagctgctgatctacagcgccagctacagatccaccggcgtgcccagcagattttccggctctggcagcggcaccgacttcaccctgaccatctctagcctccagcccgaggacttcgccacctactactgccagcaccactactccgccccctggacatttggcggaggcaccaaggtggaaatcaagctcgagatccagaaccctgatcctgccgtgtaccagctgcgggatagcaagagcagcgacaagagcgtgtgtctgttcaccgacttcgacagccagaccaacgtgtcccagagcaaggactccgacgtgtacatcaccgataagtgcgtgctggacatgcggagcatggacttcaagagcaactccgccgtggcctggtccaacaagtccgatttcgcctgcgccaacgccttcaacaacagcattatccccgaggacacattcttcccaagccccgagagcagctgcggctttaccagcgagagctaccagcagggcgtgctgagcgccaccatcctgtacgagatcctgctgggcaaggccaccctgtacgccgtgctggtgtctgccctggtgctgatggctatggtcaagcggaaggacagccggggacgcgccaagagaagcggatctggcgtgaagcagaccctgaatttcgacctgctgaagctggctggcgacgtggaatccaacccaggccctactagtatggactggatttggcgcatccttttccttgtcggcgctgctaccggcgcgcattccgggccccagctccagctgcaagagtctggacctggcctggtcaagcctagcgagacactgagcctgacctgtaccgtgtccggcgatagcatcagcagcggcgattactactggggctggatcagacagcctcctggcaaaggactggaatggatcggccacatctactacagcggcgtgacctactacaaccccagcctgaagtccagagtgaccatcagcgtggacaccagccggaaccagttctccctgaagctgtctagcgtgacagccgccgataccgccgtgtactactgcaccagagaggacagcagcaactggcggagtagaggccagggaacactggtcacagttagctctggatccggcggaggcggaagtggaggcggaggatctggcggcggaggctctttcgaagaagtgcaactggtggaatcaggcggcggactggtgcagcctggcggatctctgagactgagctgtgccgccagcggcttcaccttcagcagaaacggcatgagctgggtgcgccaggcccctggaaaaggactggaatgggtggcaaccgtgtccagcggcggcagctacatctactacgccgacagcgtgaagggccggttcaccatctccagagacaacgccaagaacagcctgtacctccagatgaactccctgcgggccgaggacaccgccgtgtactattgtgccagacagggcaccaccgccctggctaccagattcttcgatgtgtggggccagggcaccctcgtgaccgtgtcatctacgcgtgaggacctgaagaacgtgttcccacctgaggtggccgtgttcgagcctagcgaggccgagatcagccacacccagaaagccaccctcgtgtgcctggctaccggcttctaccccgaccatgtggaactgtcttggtgggtcaacggcaaagaggtgcacagcggcgtgtgtaccgacccccagccactgaaagaacagcccgccctgaacgacagccggtactgcctgagcagcagactgagagtgtccgccaccttctggcagaacccccggaaccacttcagatgccaggtgcagttctacggcctgagcgagaacgacgagtggacccaggacagagccaagcccgtgacccagatcgtgtctgccgaagcctggggcagagccgattgcgacgtgaagctggtggaaaagagcttcgagacagacaccaacctgaacttccagaacctgagcgtgatcggcttcagaatcctgctgctgaaagtggccggctttaacctgctgatgaccctgcggctgtggtccagc

SEQ ID NO: 4829 - DNA, 2682 bp, synthetic construct
  source 1..2682: mol_type = other DNA
atggccttaccagtgaccgccttgctcctgccgctggccttgctgctccacgccgccaggccggaagtgcagctggttgaatctggcggaggactggttcagcctggcggatctctgagactgtcttgtgccgccagcggcttcagcttcagcgacttttggatgagctgggtccgacaggcccctggcaaaggacttgaatgggtcgccacaatcagccaggccggcagcgagaaggactacgtggactctgtgaagggcagattcaccatcagccgggacaacgccaagaagtccctgtacctccagatgaacagcctgagagccgaggacaccgccgtgtactattgtgcctctggcgtgtacagcttcgactacagaggccagggcaccctggtcacagtctcttctggtaccggcggaggcggatctggcggcggaggtagcggtggcggaggatctgaattcgacatccagatgacccagagcccccctagcctgtctgcctctgtgggcggcaaagtgaccatcacatgcaaggccagccaggacatcgaccgctacatggcctggtatcaggacaagcccggcaagggacccaagctgctgatccacgataccagcaccctccagcccggcatccccagcagattttctggcagcggctccggcagagactacagcttcagcatcagcaacctggaacccgaggacattgccacctactactgcctccagtacgacaacctgtggaccttcggcggaggcaccaagctggaaatcaagagactcgagatccagaaccctgatcctgccgtgtaccagctgcgggatagcaagagcagcgacaagagcgtgtgtctgttcaccgacttcgacagccagaccaacgtgtcccagagcaaggactccgacgtgtacatcaccgataagtgcgtgctggacatgcggagcatggacttcaagagcaactccgccgtggcctggtccaacaagtccgatttcgcctgcgccaacgccttcaacaacagcattatccccgaggacacattcttcccaagccccgagagcagctgcggctttaccagcgagagctaccagcagggcgtgctgagcgccaccatcctgtacgagatcctgctgggcaaggccaccctgtacgccgtgctggtgtctgccctggtgctgatggctatggtcaagcggaaggacagccggggacgcgccaagagaagcggatctggcgtgaagcagaccctgaatttcgacctgctgaagctggctggcgacgtggaatccaacccaggccctactagtatggactggatttggcgcatccttttccttgtcggcgctgctaccggcgcgcattccgggccccagctccagctgcaagagtctggacctggcctggtcaagcctagcgagacactgagcctgacctgtaccgtgtccggcgatagcatcagcagcggcgattactactggggctggatcagacagcctcctggcaaaggactggaatggatcggccacatctactacagcggcgtgacctactacaaccccagcctgaagtccagagtgaccatcagcgtggacaccagccggaaccagttctccctgaagctgtctagcgtgacagccgccgataccgccgtgtactactgcaccagagaggacagcagcaactggcggagtagaggccagggaacactggtcacagttagctctggatccggcggaggcggaagtggaggcggaggatctggcggcggaggctctttcgaacaggtgcaactggtgcagagcggagccgagcttgtgaagcctggcgcttccgtgaagatgagctgcaaagccagcggctacatcttcaccaactacaacatccactgggtcaagaagtccccaggccagggcctggaatggatcggagccatctaccccggaaacggcgacgccccttacagccagaagttccaggacagagccaccctgaccgccgacaccagcagcagcaccacctacatggaactgagcagcctgaccagcgaggacagcgccgtgtactattgcgtgcgggccaactgggatgtggccttcgcctattggggccagggcacactggtgtccgtgtcctctacgcgtgaggacctgaagaacgtgttcccacctgaggtggccgtgttcgagcctagcgaggccgagatcagccacacccagaaagccaccctcgtgtgcctggctaccggcttctaccccgaccatgtggaactgtcttggtgggtcaacggcaaagaggtgcacagcggcgtgtgtaccgacccccagccactgaaagaacagcccgccctgaacgacagccggtactgcctgagcagcagactgagagtgtccgccaccttctggcagaacccccggaaccacttcagatgccaggtgcagttctacggcctgagcgagaacgacgagtggacccaggacagagccaagcccgtgacccagatcgtgtctgccgaagcctggggcagagccgattgcgacgtgaagctggtggaaaagagcttcgagacagacaccaacctgaacttccagaacctgagcgtgatcggcttcagaatcctgctgctgaaagtggccggctttaacctgctgatgaccctgcggctgtggtccagc

SEQ ID NO: 4830 - DNA, 2685 bp, synthetic construct
  source 1..2685: mol_type = other DNA
atggccttaccagtgaccgccttgctcctgccgctggccttgctgctccacgccgccaggccggaagtgcagctggttgaatctggcggaggactggttcagcctggcggatctctgagactgtcttgtgccgccagcggcttcagcttcagcgacttttggatgagctgggtccgacaggcccctggcaaaggacttgaatgggtcgccacaatcagccaggccggcagcgagaaggactacgtggactctgtgaagggcagattcaccatcagccgggacaacgccaagaagtccctgtacctccagatgaacagcctgagagccgaggacaccgccgtgtactattgtgcctctggcgtgtacagcttcgactacagaggccagggcaccctggtcacagtctcttctggtaccggcggaggcggatctggcggcggaggtagcggtggcggaggatctgaattcgacatccagatgacccagagccctgccagcctgtctgcctctgtgggcgagacagtgaccatcacctgtcgggtgtccggcaacatccacaactacctggcctggtatcagcagaagcagggcaagagcccccaactgctggtgtacaacgccaagaccctggccgatggcgtgcccagcagattttctggctctggcagcggcacccagtacagcctgaagatcaacagcctccagcccgaggacttcggcagctactactgccagcacttctggtccaacccctacaccttcggcggaggcaccaagctggaaatcaagctcgagatccagaaccctgatcctgccgtgtaccagctgcgggatagcaagagcagcgacaagagcgtgtgtctgttcaccgacttcgacagccagaccaacgtgtcccagagcaaggactccgacgtgtacatcaccgataagtgcgtgctggacatgcggagcatggacttcaagagcaactccgccgtggcctggtccaacaagtccgatttcgcctgcgccaacgccttcaacaacagcattatccccgaggacacattcttcccaagccccgagagcagctgcggctttaccagcgagagctaccagcagggcgtgctgagcgccaccatcctgtacgagatcctgctgggcaaggccaccctgtacgccgtgctggtgtctgccctggtgctgatggctatggtcaagcggaaggacagccggggacgcgccaagagaagcggatctggcgtgaagcagaccctgaatttcgacctgctgaagctggctggcgacgtggaatccaacccaggccctactagtatggactggatttggcgcatccttttccttgtcggcgctgctaccggcgcgcattccgggccccagctccagctgcaagagtctggacctggcctggtcaagcctagcgagacactgagcctgacctgtaccgtgtccggcgatagcatcagcagcggcgattactactggggctggatcagacagcctcctggcaaaggactggaatggatcggccacatctactacagcggcgtgacctactacaaccccagcctgaagtccagagtgaccatcagcgtggacaccagccggaaccagttctccctgaagctgtctagcgtgacagccgccgataccgccgtgtactactgcaccagagaggacagcagcaactggcggagtagaggccagggaacactggtcacagttagctctggatccggcggaggcggaagtggaggcggaggatctggcggcggaggctctttcgaacaggtgcaactccagcagtctggcgcttccgtgaaggtgtcctgcaaggccagcgaactcgtgcggcctggcacaggctacgccttcaccaattacctgatcgagtgggtcaagcagaggcccggacagggcctggaatggatcggagtgattaacccaggcagcggcggcaccaactacaacgagaagttcaagggcaaggccaccctgaccgccgacaagagcagcagcacagcctacatgcaactgagcagcctgaccagcgacgacagcgccgtgtacttctgcgcccggtacagaagctacgactggtacttcgacgtgtggggagccggcaccaccgtgacagtgtcatctacgcgtgaggacctgaagaacgtgttcccacctgaggtggccgtgttcgagcctagcgaggccgagatcagccacacccagaaagccaccctcgtgtgcctggctaccggcttctaccccgaccatgtggaactgtcttggtgggtcaacggcaaagaggtgcacagcggcgtgtgtaccgacccccagccactgaaagaacagcccgccctgaacgacagccggtactgcctgagcagcagactgagagtgtccgccaccttctggcagaacccccggaaccacttcagatgccaggtgcagttctacggcctgagcgagaacgacgagtggacccaggacagagccaagcccgtgacccagatcgtgtctgccgaagcctggggcagagccgattgcgacgtgaagctggtggaaaagagcttcgagacagacaccaacctgaacttccagaacctgagcgtgatcggcttcagaatcctgctgctgaaagtggccggctttaacctgctgatgaccctgcggctgtggtccagc

SEQ ID NO: 4831 - DNA, 2682 bp, synthetic construct
  source 1..2682: mol_type = other DNA
atggccttaccagtgaccgccttgctcctgccgctggccttgctgctccacgccgccaggccggaagtgcagctggttgaatctggcggaggactggttcagcctggcggatctctgagactgtcttgtgccgccagcggcttcagcttcagcgacttttggatgagctgggtccgacaggcccctggcaaaggacttgaatgggtcgccacaatcagccaggccggcagcgagaaggactacgtggactctgtgaagggcagattcaccatcagccgggacaacgccaagaagtccctgtacctccagatgaacagcctgagagccgaggacaccgccgtgtactattgtgcctctggcgtgtacagcttcgactacagaggccagggcaccctggtcacagtctcttctggtaccggcggaggcggatctggcggcggaggtagcggtggcggaggatctgaattcgacatccagatgacccagagcttcagcagcctgagcgccagcgtgggcgacagagtgaccatcacctgtagagccagccaggacatcagcaactacctgaactggtatcagcagaagcccggcaaggcccccaagctgctgatctactacaccagcagactgcacagcggcgtgcccagcagattttctggcagcggctccggcaccgactacaccctgacaatcagctccctgcagcccgaggacttcgctacctacttctgtcagcaaggcaacaccctgccctggacctttggcggaggcaccaagctggaaatcaagagactcgagatccagaaccctgatcctgccgtgtaccagctgcgggatagcaagagcagcgacaagagcgtgtgtctgttcaccgacttcgacagccagaccaacgtgtcccagagcaaggactccgacgtgtacatcaccgataagtgcgtgctggacatgcggagcatggacttcaagagcaactccgccgtggcctggtccaacaagtccgatttcgcctgcgccaacgccttcaacaacagcattatccccgaggacacattcttcccaagccccgagagcagctgcggctttaccagcgagagctaccagcagggcgtgctgagcgccaccatcctgtacgagatcctgctgggcaaggccaccctgtacgccgtgctggtgtctgccctggtgctgatggctatggtcaagcggaaggacagccggggacgcgccaagagaagcggatctggcgtgaagcagaccctgaatttcgacctgctgaagctggctggcgacgtggaatccaacccaggccctactagtatggactggatttggcgcatccttttccttgtcggcgctgctaccggcgcgcattccgggccccagctccagctgcaagagtctggacctggcctggtcaagcctagcgagacactgagcctgacctgtaccgtgtccggcgatagcatcagcagcggcgattactactggggctggatcagacagcctcctggcaaaggactggaatggatcggccacatctactacagcggcgtgacctactacaaccccagcctgaagtccagagtgaccatcagcgtggacaccagccggaaccagttctccctgaagctgtctagcgtgacagccgccgataccgccgtgtactactgcaccagagaggacagcagcaactggcggagtagaggccagggaacactggtcacagttagctctggatccggcggaggcggaagtggaggcggaggatctggcggcggaggctctttcgaagaagtgcaactggtgcagtccggcggagggctggtgcagagcggaggatctctgagactgagctgcagagccagcggctacaccttcacccggtactggatgctgtgggtgcgccagaggccaggcaagggactggaatgggtggccgagatcaacccccggaacgaccggaccaactacaacgagaagttcaagacccggttcaccatcagcgtggacagaagcaagaacaccctgtacctgcagatggacagcctgcgggccgaggataccgccgtgtacttttgtgctctgggaggcggctacgctatggactactggggccagggaacccttgtgaccgtgtcctctacgcgtgaggacctgaagaacgtgttcccacctgaggtggccgtgttcgagcctagcgaggccgagatcagccacacccagaaagccaccctcgtgtgcctggctaccggcttctaccccgaccatgtggaactgtcttggtgggtcaacggcaaagaggtgcacagcggcgtgtgtaccgacccccagccactgaaagaacagcccgccctgaacgacagccggtactgcctgagcagcagactgagagtgtccgccaccttctggcagaacccccggaaccacttcagatgccaggtgcagttctacggcctgagcgagaacgacgagtggacccaggacagagccaagcccgtgacccagatcgtgtctgccgaagcctggggcagagccgattgcgacgtgaagctggtggaaaagagcttcgagacagacaccaacctgaacttccagaacctgagcgtgatcggcttcagaatcctgctgctgaaagtggccggctttaacctgctgatgaccctgcggctgtggtccagc

SEQ ID NO: 4832 - DNA, 2685 bp, synthetic construct
  source 1..2685: mol_type = other DNA
atggccttaccagtgaccgccttgctcctgccgctggccttgctgctccacgccgccaggccggaagtgcagctggttgaatctggcggaggactggttcagcctggcggatctctgagactgtcttgtgccgccagcggcttcagcttcagcgacttttggatgagctgggtccgacaggcccctggcaaaggacttgaatgggtcgccacaatcagccaggccggcagcgagaaggactacgtggactctgtgaagggcagattcaccatcagccgggacaacgccaagaagtccctgtacctccagatgaacagcctgagagccgaggacaccgccgtgtactattgtgcctctggcgtgtacagcttcgactacagaggccagggcaccctggtcacagtctcttctggtaccggcggaggcggatctggcggcggaggtagcggtggcggaggatctgaattcgacatccagatgacacagtctccggcgtcactgtccgcctccgtgggggagactgtgactattatttgtagggcatcagttaacatctactcttatttggcctggtaccagcagaagcaaggcaagagtcctcagctgctggtgtataatgcgaagatcctggcagagggcgtgccgagccggttctccggcagcggctcaggtacccaattttccctcaagatcaattcactgcagccagaggactttggcagttactattgtcaacaccactacggcacattcactttcgggtccggtacaaaattggagattaagcgactcgagatccagaaccctgatcctgccgtgtaccagctgcgggatagcaagagcagcgacaagagcgtgtgtctgttcaccgacttcgacagccagaccaacgtgtcccagagcaaggactccgacgtgtacatcaccgataagtgcgtgctggacatgcggagcatggacttcaagagcaactccgccgtggcctggtccaacaagtccgatttcgcctgcgccaacgccttcaacaacagcattatccccgaggacacattcttcccaagccccgagagcagctgcggctttaccagcgagagctaccagcagggcgtgctgagcgccaccatcctgtacgagatcctgctgggcaaggccaccctgtacgccgtgctggtgtctgccctggtgctgatggctatggtcaagcggaaggacagccggggacgcgccaagagaagcggatctggcgtgaagcagaccctgaatttcgacctgctgaagctggctggcgacgtggaatccaacccaggccctactagtatggactggatttggcgcatccttttccttgtcggcgctgctaccggcgcgcattccgggccccagctccagctgcaagagtctggacctggcctggtcaagcctagcgagacactgagcctgacctgtaccgtgtccggcgatagcatcagcagcggcgattactactggggctggatcagacagcctcctggcaaaggactggaatggatcggccacatctactacagcggcgtgacctactacaaccccagcctgaagtccagagtgaccatcagcgtggacaccagccggaaccagttctccctgaagctgtctagcgtgacagccgccgataccgccgtgtactactgcaccagagaggacagcagcaactggcggagtagaggccagggaacactggtcacagttagctctggatccggcggaggcggaagtggaggcggaggatctggcggcggaggctctttcgaacaggtacagttgaaagaaagcgggcctggactggtagcgccttcccaatctctctccatcacgtgcaccatctctggcttctccctgacttcctatggagttcactgggtgaggcagccccccggcaagggactggaatggctggtcgtcatctggtccgacgggtccacaacctacaactccgctctgaaaagtcggctctctatttctaaagataatagcaagagccaggtgtttctgaaaatgaactctctgcagaccgatgatacggccatttactactgcgcttcacactatggctcaaccttggcattcgcttcctggggccacggaacactggtgaccgtttccgcagccacgcgtgaggacctgaagaacgtgttcccacctgaggtggccgtgttcgagcctagcgaggccgagatcagccacacccagaaagccaccctcgtgtgcctggctaccggcttctaccccgaccatgtggaactgtcttggtgggtcaacggcaaagaggtgcacagcggcgtgtgtaccgacccccagccactgaaagaacagcccgccctgaacgacagccggtactgcctgagcagcagactgagagtgtccgccaccttctggcagaacccccggaaccacttcagatgccaggtgcagttctacggcctgagcgagaacgacgagtggacccaggacagagccaagcccgtgacccagatcgtgtctgccgaagcctggggcagagccgattgcgacgtgaagctggtggaaaagagcttcgagacagacaccaacctgaacttccagaacctgagcgtgatcggcttcagaatcctgctgctgaaagtggccggctttaacctgctgatgaccctgcggctgtggtccagc

SEQ ID NO: 4833 - DNA, 2709 bp, synthetic construct
  source 1..2709: mol_type = other DNA
atggccttaccagtgaccgccttgctcctgccgctggccttgctgctccacgccgccaggccggaagtgcagctggttgaatctggcggaggactggttcagcctggcggatctctgagactgtcttgtgccgccagcggcttcagcttcagcgacttttggatgagctgggtccgacaggcccctggcaaaggacttgaatgggtcgccacaatcagccaggccggcagcgagaaggactacgtggactctgtgaagggcagattcaccatcagccgggacaacgccaagaagtccctgtacctccagatgaacagcctgagagccgaggacaccgccgtgtactattgtgcctctggcgtgtacagcttcgactacagaggccagggcaccctggtcacagtctcttctggtaccggcggaggcggatctggcggcggaggtagcggtggcggaggatctgaattcgacattgtgatgacccagtctcacaaattcatgtccacatcagtaggagacagggtcagcgtcacctgcaaggccagtcagaatgtgggtaataatgtagcctggtatcaacagaaaccagggcaatctcctaaagtactgatttactcggcatcctaccggtacagtggagtccctgatcgcttcacaggcagtggatctgggacagatttcactctcaccatcagtaatgtgcagtctgaagacttggcagagtatttctgtcagcaatataacacctatccattcacgttcggctcggggacaaagttggaaataaaactcgagatccagaaccctgatcctgccgtgtaccagctgcgggatagcaagagcagcgacaagagcgtgtgtctgttcaccgacttcgacagccagaccaacgtgtcccagagcaaggactccgacgtgtacatcaccgataagtgcgtgctggacatgcggagcatggacttcaagagcaactccgccgtggcctggtccaacaagtccgatttcgcctgcgccaacgccttcaacaacagcattatccccgaggacacattcttcccaagccccgagagcagctgcggctttaccagcgagagctaccagcagggcgtgctgagcgccaccatcctgtacgagatcctgctgggcaaggccaccctgtacgccgtgctggtgtctgccctggtgctgatggctatggtcaagcggaaggacagccggggacgcgccaagagaagcggatctggcgtgaagcagaccctgaatttcgacctgctgaagctggctggcgacgtggaatccaacccaggccctactagtatggactggatttggcgcatccttttccttgtcggcgctgctaccggcgcgcattccgggccccagctccagctgcaagagtctggacctggcctggtcaagcctagcgagacactgagcctgacctgtaccgtgtccggcgatagcatcagcagcggcgattactactggggctggatcagacagcctcctggcaaaggactggaatggatcggccacatctactacagcggcgtgacctactacaaccccagcctgaagtccagagtgaccatcagcgtggacaccagccggaaccagttctccctgaagctgtctagcgtgacagccgccgataccgccgtgtactactgcaccagagaggacagcagcaactggcggagtagaggccagggaacactggtcacagttagctctggatccggcggaggcggaagtggaggcggaggatctggcggcggaggctctttcgaagaggtacagctggaggaaagcggtggaggactggtgcaacctggagggtctatgaagctctcttgcgtagcttctgggttcacgttctccaattactggatgaactgggtgcggcagtcccccgagaaaggcctggaatgggtagcagaaattcggttcaagtcccataactatgctacacactttgccgagtctgtcaaaggccggttcactattagtcgagacgacagcaagtcttcagtctacctgcagatgaataacttgcgggcagaggacacaggtatctactactgcaccaggagaatcggcaactccgactatgactggtggtactttgacgtctggggagcaggcaccagcgtgacggtgagttcagcctcaacgcgtgaggacctgaagaacgtgttcccacctgaggtggccgtgttcgagcctagcgaggccgagatcagccacacccagaaagccaccctcgtgtgcctggctaccggcttctaccccgaccatgtggaactgtcttggtgggtcaacggcaaagaggtgcacagcggcgtgtgtaccgacccccagccactgaaagaacagcccgccctgaacgacagccggtactgcctgagcagcagactgagagtgtccgccaccttctggcagaacccccggaaccacttcagatgccaggtgcagttctacggcctgagcgagaacgacgagtggacccaggacagagccaagcccgtgacccagatcgtgtctgccgaagcctggggcagagccgattgcgacgtgaagctggtggaaaagagcttcgagacagacaccaacctgaacttccagaacctgagcgtgatcggcttcagaatcctgctgctgaaagtggccggctttaacctgctgatgaccctgcggctgtggtccagc

SEQ ID NO: 4834 - DNA, 2688 bp, synthetic construct
  source 1..2688: mol_type = other DNA
atggccttaccagtgaccgccttgctcctgccgctggccttgctgctccacgccgccaggccggaagtgcagctggttgaatctggcggaggactggttcagcctggcggatctctgagactgtcttgtgccgccagcggcttcagcttcagcgacttttggatgagctgggtccgacaggcccctggcaaaggacttgaatgggtcgccacaatcagccaggccggcagcgagaaggactacgtggactctgtgaagggcagattcaccatcagccgggacaacgccaagaagtccctgtacctccagatgaacagcctgagagccgaggacaccgccgtgtactattgtgcctctggcgtgtacagcttcgactacagaggccagggcaccctggtcacagtctcttctggtaccggcggaggcggatctggcggcggaggtagcggtggcggaggatctgaattcgaccagatcgtgctgacccagtcccccgctattatgtccgcatcaccgggcgaaaaagtgacgatctcctgtagcgcttcatctagcgtctcctacatgtattggtatcaacagaaacctgggtctagcccaaagccgtggatctacagaaccagtaaccttgccagtggggtgccagcccgcttcagcggtagtggcagtggaacttcctatagcctcacaataagcaacatggaggctgaagatgccgctgcctattactgccagcagtaccacagttacccaaccacgttcggcgggggaactaagctcgaagtaaaactcgagatccagaaccctgatcctgccgtgtaccagctgcgggatagcaagagcagcgacaagagcgtgtgtctgttcaccgacttcgacagccagaccaacgtgtcccagagcaaggactccgacgtgtacatcaccgataagtgcgtgctggacatgcggagcatggacttcaagagcaactccgccgtggcctggtccaacaagtccgatttcgcctgcgccaacgccttcaacaacagcattatccccgaggacacattcttcccaagccccgagagcagctgcggctttaccagcgagagctaccagcagggcgtgctgagcgccaccatcctgtacgagatcctgctgggcaaggccaccctgtacgccgtgctggtgtctgccctggtgctgatggctatggtcaagcggaaggacagccggggacgcgccaagagaagcggatctggcgtgaagcagaccctgaatttcgacctgctgaagctggctggcgacgtggaatccaacccaggccctactagtatggactggatttggcgcatccttttccttgtcggcgctgctaccggcgcgcattccgggccccagctccagctgcaagagtctggacctggcctggtcaagcctagcgagacactgagcctgacctgtaccgtgtccggcgatagcatcagcagcggcgattactactggggctggatcagacagcctcctggcaaaggactggaatggatcggccacatctactacagcggcgtgacctactacaaccccagcctgaagtccagagtgaccatcagcgtggacaccagccggaaccagttctccctgaagctgtctagcgtgacagccgccgataccgccgtgtactactgcaccagagaggacagcagcaactggcggagtagaggccagggaacactggtcacagttagctctggatccggcggaggcggaagtggaggcggaggatctggcggcggaggctctttcgaagaggtgcagctggtggaatctgggggcggcctggtccaacctaagggatcactcaagctctcttgtgcggccagcggattctctttcaatacctatgctatgaattgggtgagacaggcgcccggaaagggcctcgaatggatagcccatatccggtcaaaatcaaacaatttcgcaacctactatgcggactccgtgaaggaccgattttccatctcccgagatgcctccgagaatattctgttcctgcagatgaataacctcaagacagaggacaccgccatgtactactgtgtgcgccagggcggtgactttcccatggattactgggggcaggggaccagcgtgaccgtgagctctacgcgtgaggacctgaagaacgtgttcccacctgaggtggccgtgttcgagcctagcgaggccgagatcagccacacccagaaagccaccctcgtgtgcctggctaccggcttctaccccgaccatgtggaactgtcttggtgggtcaacggcaaagaggtgcacagcggcgtgtgtaccgacccccagccactgaaagaacagcccgccctgaacgacagccggtactgcctgagcagcagactgagagtgtccgccaccttctggcagaacccccggaaccacttcagatgccaggtgcagttctacggcctgagcgagaacgacgagtggacccaggacagagccaagcccgtgacccagatcgtgtctgccgaagcctggggcagagccgattgcgacgtgaagctggtggaaaagagcttcgagacagacaccaacctgaacttccagaacctgagcgtgatcggcttcagaatcctgctgctgaaagtggccggctttaacctgctgatgaccctgcggctgtggtccagc

SEQ ID NO: 4835 - DNA, 2685 bp, synthetic construct
  source 1..2685: mol_type = other DNA
atggccttaccagtgaccgccttgctcctgccgctggccttgctgctccacgccgccaggccggaagtgcagctggttgaatctggcggaggactggttcagcctggcggatctctgagactgtcttgtgccgccagcggcttcagcttcagcgacttttggatgagctgggtccgacaggcccctggcaaaggacttgaatgggtcgccacaatcagccaggccggcagcgagaaggactacgtggactctgtgaagggcagattcaccatcagccgggacaacgccaagaagtccctgtacctccagatgaacagcctgagagccgaggacaccgccgtgtactattgtgcctctggcgtgtacagcttcgactacagaggccagggcaccctggtcacagtctcttctggtaccggcggaggcggatctggcggcggaggtagcggtggcggaggatctgaattcgacgacatccagatgacccagagcagcagcagcttcagcgtgagcctgggcgacagagtgaccatcacctgcatggccagcgaggacatctacatcagactggcctggtaccagcagaagcccggcaacgcccccagactgctgatcagcgccgccaccagcctggagaccggcgtgcccagcagattcagcggcagcggcagcggcaaggactacaccctgagcatcaccagcctgcagaccgaggacgtgggcacctactactgccagcagtactggagcagcccctggaccttcggcggcggcaccaagctggagatcaacctcgagatccagaaccctgatcctgccgtgtaccagctgcgggatagcaagagcagcgacaagagcgtgtgtctgttcaccgacttcgacagccagaccaacgtgtcccagagcaaggactccgacgtgtacatcaccgataagtgcgtgctggacatgcggagcatggacttcaagagcaactccgccgtggcctggtccaacaagtccgatttcgcctgcgccaacgccttcaacaacagcattatccccgaggacacattcttcccaagccccgagagcagctgcggctttaccagcgagagctaccagcagggcgtgctgagcgccaccatcctgtacgagatcctgctgggcaaggccaccctgtacgccgtgctggtgtctgccctggtgctgatggctatggtcaagcggaaggacagccggggacgcgccaagagaagcggatctggcgtgaagcagaccctgaatttcgacctgctgaagctggctggcgacgtggaatccaacccaggccctactagtatggactggatttggcgcatccttttccttgtcggcgctgctaccggcgcgcattccgggccccagctccagctgcaagagtctggacctggcctggtcaagcctagcgagacactgagcctgacctgtaccgtgtccggcgatagcatcagcagcggcgattactactggggctggatcagacagcctcctggcaaaggactggaatggatcggccacatctactacagcggcgtgacctactacaaccccagcctgaagtccagagtgaccatcagcgtggacaccagccggaaccagttctccctgaagctgtctagcgtgacagccgccgataccgccgtgtactactgcaccagagaggacagcagcaactggcggagtagaggccagggaacactggtcacagttagctctggatccggcggaggcggaagtggaggcggaggatctggcggcggaggctctttcgaagacgtgcagctgcaggagagcggccccggcctggtgaagcccagccagagcctgagcctgacctgcaccgtgaccggctacagcatcaccagcgactacacctggaactggatcagacagttccccggcaacaagctggagtggatgggctacatcacctacagcggcagcaccagctacaaccccagcctgaagagcagaaacagcatcaccagagacaccagcaagaaccagttcttcctgcagctgaacagcgtgaccaccgaggacaccgccacctactactgcgccagactgggcagaagatacacaatggactactggggccagggcaccagcgtgaccgtgagcagcacgcgtgaggacctgaagaacgtgttcccacctgaggtggccgtgttcgagcctagcgaggccgagatcagccacacccagaaagccaccctcgtgtgcctggctaccggcttctaccccgaccatgtggaactgtcttggtgggtcaacggcaaagaggtgcacagcggcgtgtgtaccgacccccagccactgaaagaacagcccgccctgaacgacagccggtactgcctgagcagcagactgagagtgtccgccaccttctggcagaacccccggaaccacttcagatgccaggtgcagttctacggcctgagcgagaacgacgagtggacccaggacagagccaagcccgtgacccagatcgtgtctgccgaagcctggggcagagccgattgcgacgtgaagctggtggaaaagagcttcgagacagacaccaacctgaacttccagaacctgagcgtgatcggcttcagaatcctgctgctgaaagtggccggctttaacctgctgatgaccctgcggctgtggtccagc

SEQ ID NO: 4836 - DNA, 2694 bp, synthetic construct
  source 1..2694: mol_type = other DNA
atggccttaccagtgaccgccttgctcctgccgctggccttgctgctccacgccgccaggccggaagtgcagctggttgaatctggcggaggactggttcagcctggcggatctctgagactgtcttgtgccgccagcggcttcagcttcagcgacttttggatgagctgggtccgacaggcccctggcaaaggacttgaatgggtcgccacaatcagccaggccggcagcgagaaggactacgtggactctgtgaagggcagattcaccatcagccgggacaacgccaagaagtccctgtacctccagatgaacagcctgagagccgaggacaccgccgtgtactattgtgcctctggcgtgtacagcttcgactacagaggccagggcaccctggtcacagtctcttctggtaccggcggaggcggatctggcggcggaggtagcggtggcggaggatctgaattcgacgacatccagatgacccagagccccagcagcctgtctgccagcgtgggcgacagagtgaccatcacctgtagagccagccagagcatcagcagctacctgaactggtatcagcagaagcccggcaaggcccccaaactgctgatctacgacgccagcaacctggaaaccggcgtgcccagcagattttccggcagcggctctggcaccgacttcaccttcaccatcagctccctccagcccgaggacattgccacctactactgccagcagtacgacaacctgcccctgacctttggcggaggcaccaaggtggacatcaagagactcgagatccagaaccctgatcctgccgtgtaccagctgcgggatagcaagagcagcgacaagagcgtgtgtctgttcaccgacttcgacagccagaccaacgtgtcccagagcaaggactccgacgtgtacatcaccgataagtgcgtgctggacatgcggagcatggacttcaagagcaactccgccgtggcctggtccaacaagtccgatttcgcctgcgccaacgccttcaacaacagcattatccccgaggacacattcttcccaagccccgagagcagctgcggctttaccagcgagagctaccagcagggcgtgctgagcgccaccatcctgtacgagatcctgctgggcaaggccaccctgtacgccgtgctggtgtctgccctggtgctgatggctatggtcaagcggaaggacagccggggacgcgccaagagaagcggatctggcgtgaagcagaccctgaatttcgacctgctgaagctggctggcgacgtggaatccaacccaggccctactagtatggactggatttggcgcatccttttccttgtcggcgctgctaccggcgcgcattccgggccccagctccagctgcaagagtctggacctggcctggtcaagcctagcgagacactgagcctgacctgtaccgtgtccggcgatagcatcagcagcggcgattactactggggctggatcagacagcctcctggcaaaggactggaatggatcggccacatctactacagcggcgtgacctactacaaccccagcctgaagtccagagtgaccatcagcgtggacaccagccggaaccagttctccctgaagctgtctagcgtgacagccgccgataccgccgtgtactactgcaccagagaggacagcagcaactggcggagtagaggccagggaacactggtcacagttagctctggatccggcggaggcggaagtggaggcggaggatctggcggcggaggctctttcgaacaggtgcaactggtggaatctggcggcggagtggtgcagcctggcagaagcctgagactgagctgtgccgccagcggcttcacctttagcagctacgccatgcactgggtgcgccaggcccctggaaaaggcctggaatgggtggccgtgatctcctacgacggctccaacaagtattacgccgacagcgtgaagggccggttcaccatctccagagacaacagcaagaacaccctgtacctccagatgaacagcctgcgggccgaggacaccgccgtgtactattgtgccagggctcacaacagcagctcttggagcttcgactactggggccagggcaccctcgtgaccgtgtcatctacgcgtgaggacctgaagaacgtgttcccacctgaggtggccgtgttcgagcctagcgaggccgagatcagccacacccagaaagccaccctcgtgtgcctggctaccggcttctaccccgaccatgtggaactgtcttggtgggtcaacggcaaagaggtgcacagcggcgtgtgtaccgacccccagccactgaaagaacagcccgccctgaacgacagccggtactgcctgagcagcagactgagagtgtccgccaccttctggcagaacccccggaaccacttcagatgccaggtgcagttctacggcctgagcgagaacgacgagtggacccaggacagagccaagcccgtgacccagatcgtgtctgccgaagcctggggcagagccgattgcgacgtgaagctggtggaaaagagcttcgagacagacaccaacctgaacttccagaacctgagcgtgatcggcttcagaatcctgctgctgaaagtggccggctttaacctgctgatgaccctgcggctgtggtccagc

SEQ ID NO: 4837 - DNA, 2721 bp, synthetic construct
  source 1..2721: mol_type = other DNA
atggccttaccagtgaccgccttgctcctgccgctggccttgctgctccacgccgccaggccggaagtgcagctggttgaatctggcggaggactggttcagcctggcggatctctgagactgtcttgtgccgccagcggcttcagcttcagcgacttttggatgagctgggtccgacaggcccctggcaaaggacttgaatgggtcgccacaatcagccaggccggcagcgagaaggactacgtggactctgtgaagggcagattcaccatcagccgggacaacgccaagaagtccctgtacctccagatgaacagcctgagagccgaggacaccgccgtgtactattgtgcctctggcgtgtacagcttcgactacagaggccagggcaccctggtcacagtctcttctggtaccggcggaggcggatctggcggcggaggtagcggtggcggaggatctgaattcgacgacgtcgtgatgacccagagccctctgagcctgcctgtgtccctgggcgatcaggccagcatctcctgcagatccagccagagactggtgcacagcaacggcaacacctacctgcactggtatctgcagaagcccggccagagccccaagctgctgatctaccgggtgtccaacagattccccggcgtgcccgatagattcagcggctctggcagcggcaccgacttcaccctgaagatcagccgggtggaagccgaggacctgggcatctatttctgcagccagagcacccacgtgccctacacctttggcggaggcaccaagctggaaatcaagcggctcgagatccagaaccctgatcctgccgtgtaccagctgcgggatagcaagagcagcgacaagagcgtgtgtctgttcaccgacttcgacagccagaccaacgtgtcccagagcaaggactccgacgtgtacatcaccgataagtgcgtgctggacatgcggagcatggacttcaagagcaactccgccgtggcctggtccaacaagtccgatttcgcctgcgccaacgccttcaacaacagcattatccccgaggacacattcttcccaagccccgagagcagctgcggctttaccagcgagagctaccagcagggcgtgctgagcgccaccatcctgtacgagatcctgctgggcaaggccaccctgtacgccgtgctggtgtctgccctggtgctgatggctatggtcaagcggaaggacagccggggacgcgccaagagaagcggatctggcgtgaagcagaccctgaatttcgacctgctgaagctggctggcgacgtggaatccaacccaggccctactagtatggactggatttggcgcatccttttccttgtcggcgctgctaccggcgcgcattccgggccccagctccagctgcaagagtctggacctggcctggtcaagcctagcgagacactgagcctgacctgtaccgtgtccggcgatagcatcagcagcggcgattactactggggctggatcagacagcctcctggcaaaggactggaatggatcggccacatctactacagcggcgtgacctactacaaccccagcctgaagtccagagtgaccatcagcgtggacaccagccggaaccagttctccctgaagctgtctagcgtgacagccgccgataccgccgtgtactactgcaccagagaggacagcagcaactggcggagtagaggccagggaacactggtcacagttagctctggatccggcggaggcggaagtggaggcggaggatctggcggcggaggctctttcgaagaagtgcggctgcagcagtctggccccgacctgattaagcctggggccagcgtgaagatgagctgcaaggccagcggctacaccttcaccggctacgtgatgcactgggtcaagcagaggccaggccagggcctggaatggatcggcttcatcaacccctacaacgacgacatccagagcaacgagcggttccggggcaaggccaccctgaccagcgataagagcagcaccaccgcctacatggaactgagcagcctgacctccgaggacagcgccgtgtactactgtgctaggggagccggctacaacttcgacggggcctacagattcttcgacttttggggccagggcaccacactgaccgtgtcctctacgcgtgaggacctgaagaacgtgttcccacctgaggtggccgtgttcgagcctagcgaggccgagatcagccacacccagaaagccaccctcgtgtgcctggctaccggcttctaccccgaccatgtggaactgtcttggtgggtcaacggcaaagaggtgcacagcggcgtgtgtaccgacccccagccactgaaagaacagcccgccctgaacgacagccggtactgcctgagcagcagactgagagtgtccgccaccttctggcagaacccccggaaccacttcagatgccaggtgcagttctacggcctgagcgagaacgacgagtggacccaggacagagccaagcccgtgacccagatcgtgtctgccgaagcctggggcagagccgattgcgacgtgaagctggtggaaaagagcttcgagacagacaccaacctgaacttccagaacctgagcgtgatcggcttcagaatcctgctgctgaaagtggccggctttaacctgctgatgaccctgcggctgtggtccagc

SEQ ID NO: 4838 - DNA, 2694 bp, synthetic construct
  source 1..2694: mol_type = other DNA
atggccttaccagtgaccgccttgctcctgccgctggccttgctgctccacgccgccaggccggaagtgcagctggttgaatctggcggaggactggttcagcctggcggatctctgagactgtcttgtgccgccagcggcttcagcttcagcgacttttggatgagctgggtccgacaggcccctggcaaaggacttgaatgggtcgccacaatcagccaggccggcagcgagaaggactacgtggactctgtgaagggcagattcaccatcagccgggacaacgccaagaagtccctgtacctccagatgaacagcctgagagccgaggacaccgccgtgtactattgtgcctctggcgtgtacagcttcgactacagaggccagggcaccctggtcacagtctcttctggtaccggcggaggcggatctggcggcggaggtagcggtggcggaggatctgaattcgacagctacgagctgacccagcctcctagcgtgtccgtgtctcctggacagaccgccaccatctcttgcagcggcgatcaactgggcgggaagtacggccactggtatcagaagaagcccggccagagccccgtgctggtgctgtaccaggacagaaaacggcctgccggcatccccgagagattcagcggaagcagcagcggcaacaccatcaccctgaccatcagcggcacccaggccgtggatgaggccgactactactgccaggcttgggacaccaatctgggcggcgtgttcggcggaggcaccaaagtgacagtgctgggacagctcgagatccagaaccctgatcctgccgtgtaccagctgcgggatagcaagagcagcgacaagagcgtgtgtctgttcaccgacttcgacagccagaccaacgtgtcccagagcaaggactccgacgtgtacatcaccgataagtgcgtgctggacatgcggagcatggacttcaagagcaactccgccgtggcctggtccaacaagtccgatttcgcctgcgccaacgccttcaacaacagcattatccccgaggacacattcttcccaagccccgagagcagctgcggctttaccagcgagagctaccagcagggcgtgctgagcgccaccatcctgtacgagatcctgctgggcaaggccaccctgtacgccgtgctggtgtctgccctggtgctgatggctatggtcaagcggaaggacagccggggacgcgccaagagaagcggatctggcgtgaagcagaccctgaatttcgacctgctgaagctggctggcgacgtggaatccaacccaggccctactagtatggactggatttggcgcatccttttccttgtcggcgctgctaccggcgcgcattccgggccccagctccagctgcaagagtctggacctggcctggtcaagcctagcgagacactgagcctgacctgtaccgtgtccggcgatagcatcagcagcggcgattactactggggctggatcagacagcctcctggcaaaggactggaatggatcggccacatctactacagcggcgtgacctactacaaccccagcctgaagtccagagtgaccatcagcgtggacaccagccggaaccagttctccctgaagctgtctagcgtgacagccgccgataccgccgtgtactactgcaccagagaggacagcagcaactggcggagtagaggccagggaacactggtcacagttagctctggatccggcggaggcggaagtggaggcggaggatctggcggcggaggctctttcgaacaggtgcaactggtggaaagcggagccgaagtgaagaaacctggggccagcgtgaaggtgtcctgcaaggccagcggctacacctttaccggctactacatgcactgggtgcgccaggctccaggccagggactggaatggatgggccggatcaaccccaatagcggcggcaccaactacgcccagaaattccagggcagagtgaccatgaccagagacaccagcatcagcaccgcctacatggaactgagccggctgagaagcgacgacaccgccgtgtactactgcgccagccctagaggcagaggcagcgccttcgatatttggggccagggcacactcgtgaccgtgtcctctacgcgtgaggacctgaagaacgtgttcccacctgaggtggccgtgttcgagcctagcgaggccgagatcagccacacccagaaagccaccctcgtgtgcctggctaccggcttctaccccgaccatgtggaactgtcttggtgggtcaacggcaaagaggtgcacagcggcgtgtgtaccgacccccagccactgaaagaacagcccgccctgaacgacagccggtactgcctgagcagcagactgagagtgtccgccaccttctggcagaacccccggaaccacttcagatgccaggtgcagttctacggcctgagcgagaacgacgagtggacccaggacagagccaagcccgtgacccagatcgtgtctgccgaagcctggggcagagccgattgcgacgtgaagctggtggaaaagagcttcgagacagacaccaacctgaacttccagaacctgagcgtgatcggcttcagaatcctgctgctgaaagtggccggctttaacctgctgatgaccctgcggctgtggtccagc

SEQ ID NO: 4839 - DNA, 2703 bp, synthetic construct
  source 1..2703: mol_type = other DNA
atggccttaccagtgaccgccttgctcctgccgctggccttgctgctccacgccgccaggccggaagtgcagctggttgaatctggcggaggactggttcagcctggcggatctctgagactgtcttgtgccgccagcggcttcagcttcagcgacttttggatgagctgggtccgacaggcccctggcaaaggacttgaatgggtcgccacaatcagccaggccggcagcgagaaggactacgtggactctgtgaagggcagattcaccatcagccgggacaacgccaagaagtccctgtacctccagatgaacagcctgagagccgaggacaccgccgtgtactattgtgcctctggcgtgtacagcttcgactacagaggccagggcaccctggtcacagtctcttctggtaccggcggaggcggatctggcggcggaggtagcggtggcggaggatctgaattcgacaacttcatgctgacccagccccacagcgtgtccgagagccctggcaagaccgtgaccatctcctgcaccagaagcagcggctctatcgccagcaaatacgtgcagtggtatcagcagaggcccggcagcagccctaccaccgtgatctacgaggacaaccagaggcctagcggcgtgcccgatagattcagcggcagcatcgacaccagcagcaacagcgccagcctgaccatcagcggcctgagaacagaggacgaggccgactactactgccacagctacgacagcaacaaccactccgtgttcggcggaggcaccaaagtgacagtgctgggacagctcgagatccagaaccctgatcctgccgtgtaccagctgcgggatagcaagagcagcgacaagagcgtgtgtctgttcaccgacttcgacagccagaccaacgtgtcccagagcaaggactccgacgtgtacatcaccgataagtgcgtgctggacatgcggagcatggacttcaagagcaactccgccgtggcctggtccaacaagtccgatttcgcctgcgccaacgccttcaacaacagcattatccccgaggacacattcttcccaagccccgagagcagctgcggctttaccagcgagagctaccagcagggcgtgctgagcgccaccatcctgtacgagatcctgctgggcaaggccaccctgtacgccgtgctggtgtctgccctggtgctgatggctatggtcaagcggaaggacagccggggacgcgccaagagaagcggatctggcgtgaagcagaccctgaatttcgacctgctgaagctggctggcgacgtggaatccaacccaggccctactagtatggactggatttggcgcatccttttccttgtcggcgctgctaccggcgcgcattccgggccccagctccagctgcaagagtctggacctggcctggtcaagcctagcgagacactgagcctgacctgtaccgtgtccggcgatagcatcagcagcggcgattactactggggctggatcagacagcctcctggcaaaggactggaatggatcggccacatctactacagcggcgtgacctactacaaccccagcctgaagtccagagtgaccatcagcgtggacaccagccggaaccagttctccctgaagctgtctagcgtgacagccgccgataccgccgtgtactactgcaccagagaggacagcagcaactggcggagtagaggccagggaacactggtcacagttagctctggatccggcggaggcggaagtggaggcggaggatctggcggcggaggctctttcgaagaagtgcaactggtggaaagcgggggaggcgtggtgcagccaggcggatctctgagactgagctgtgccgccagcggcttcaccttcagcagctacgccatgagctgggtgcgccaggcccctggaaaaggcctggaatgggtgtccgccatctctggctctggcggcagcacctactacgccgatagcgtgaagggccggttcagcatcagccgggacaacagcaagaacaccctgtacctccagatgaacagcctgcgggccgaggacaccgccgtgtactactgtgccagaaccagaagctccggggccttcgacatctggggccagggaacactcgtgaccgtgtcctctacgcgtgaggacctgaagaacgtgttcccacctgaggtggccgtgttcgagcctagcgaggccgagatcagccacacccagaaagccaccctcgtgtgcctggctaccggcttctaccccgaccatgtggaactgtcttggtgggtcaacggcaaagaggtgcacagcggcgtgtgtaccgacccccagccactgaaagaacagcccgccctgaacgacagccggtactgcctgagcagcagactgagagtgtccgccaccttctggcagaacccccggaaccacttcagatgccaggtgcagttctacggcctgagcgagaacgacgagtggacccaggacagagccaagcccgtgacccagatcgtgtctgccgaagcctggggcagagccgattgcgacgtgaagctggtggaaaagagcttcgagacagacaccaacctgaacttccagaacctgagcgtgatcggcttcagaatcctgctgctgaaagtggccggctttaacctgctgatgaccctgcggctgtggtccagc

SEQ ID NO: 4840 - DNA, 2688 bp, synthetic construct
  source 1..2688: mol_type = other DNA
atggccttaccagtgaccgccttgctcctgccgctggccttgctgctccacgccgccaggccggaagtgcagctggttgaatctggcggaggactggttcagcctggcggatctctgagactgtcttgtgccgccagcggcttcagcttcagcgacttttggatgagctgggtccgacaggcccctggcaaaggacttgaatgggtcgccacaatcagccaggccggcagcgagaaggactacgtggactctgtgaagggcagattcaccatcagccgggacaacgccaagaagtccctgtacctccagatgaacagcctgagagccgaggacaccgccgtgtactattgtgcctctggcgtgtacagcttcgactacagaggccagggcaccctggtcacagtctcttctggtaccggcggaggcggatctggcggcggaggtagcggtggcggaggatctgaattcgacatccagatgaaccagagccccagcagcctgagcgccagcctgggcgataccatcaccatcacctgtcacgccagccagaacatcaacgtgtggctgagctggtatcagcagaagcccggcaacatccccaagctgctgatctacaaggccagcaacctgcacaccggcgtgcccagcagattttctggcagcggctctggcaccggcttcaccattaccatcagctccctccagcccgaggacattgccacctactactgccagcagggccagagctacccctggacatttggcggaggcaccaagctggaaatcaagagactcgagatccagaaccctgatcctgccgtgtaccagctgcgggatagcaagagcagcgacaagagcgtgtgtctgttcaccgacttcgacagccagaccaacgtgtcccagagcaaggactccgacgtgtacatcaccgataagtgcgtgctggacatgcggagcatggacttcaagagcaactccgccgtggcctggtccaacaagtccgatttcgcctgcgccaacgccttcaacaacagcattatccccgaggacacattcttcccaagccccgagagcagctgcggctttaccagcgagagctaccagcagggcgtgctgagcgccaccatcctgtacgagatcctgctgggcaaggccaccctgtacgccgtgctggtgtctgccctggtgctgatggctatggtcaagcggaaggacagccggggacgcgccaagagaagcggatctggcgtgaagcagaccctgaatttcgacctgctgaagctggctggcgacgtggaatccaacccaggccctactagtatggactggatttggcgcatccttttccttgtcggcgctgctaccggcgcgcattccgggccccagctccagctgcaagagtctggacctggcctggtcaagcctagcgagacactgagcctgacctgtaccgtgtccggcgatagcatcagcagcggcgattactactggggctggatcagacagcctcctggcaaaggactggaatggatcggccacatctactacagcggcgtgacctactacaaccccagcctgaagtccagagtgaccatcagcgtggacaccagccggaaccagttctccctgaagctgtctagcgtgacagccgccgataccgccgtgtactactgcaccagagaggacagcagcaactggcggagtagaggccagggaacactggtcacagttagctctggatccggcggaggcggaagtggaggcggaggatctggcggcggaggctctttcgaagaagtgcaactccagcagagcggcccagagcttgtgaagcctggcgcttccgtgaagattagctgcaaagccagcggctacagcttcaccggctacttcatgaactgggtcaagcagagccacggcaagagcctggagtacatcggcagattcaacccctacaacggcgagacactgtacaaccagaagttcaagggcaaggccaccctgaccgtggacaagagcagcagcaccgtgcacatggaactgctgagcgtgaccagcgaggacagcgccgtgtactactgtggcagaagcggcaacgacgacgctatggactattggggccagggcaccagcgtgaccgtgtctagtgctacgcgtgaggacctgaagaacgtgttcccacctgaggtggccgtgttcgagcctagcgaggccgagatcagccacacccagaaagccaccctcgtgtgcctggctaccggcttctaccccgaccatgtggaactgtcttggtgggtcaacggcaaagaggtgcacagcggcgtgtgtaccgacccccagccactgaaagaacagcccgccctgaacgacagccggtactgcctgagcagcagactgagagtgtccgccaccttctggcagaacccccggaaccacttcagatgccaggtgcagttctacggcctgagcgagaacgacgagtggacccaggacagagccaagcccgtgacccagatcgtgtctgccgaagcctggggcagagccgattgcgacgtgaagctggtggaaaagagcttcgagacagacaccaacctgaacttccagaacctgagcgtgatcggcttcagaatcctgctgctgaaagtggccggctttaacctgctgatgaccctgcggctgtggtccagc

SEQ ID NO: 4841 - DNA, 2691 bp, synthetic construct
  source 1..2691: mol_type = other DNA
atggccttaccagtgaccgccttgctcctgccgctggccttgctgctccacgccgccaggccggaagtgcagctggttgaatctggcggaggactggttcagcctggcggatctctgagactgtcttgtgccgccagcggcttcagcttcagcgacttttggatgagctgggtccgacaggcccctggcaaaggacttgaatgggtcgccacaatcagccaggccggcagcgagaaggactacgtggactctgtgaagggcagattcaccatcagccgggacaacgccaagaagtccctgtacctccagatgaacagcctgagagccgaggacaccgccgtgtactattgtgcctctggcgtgtacagcttcgactacagaggccagggcaccctggtcacagtctcttctggtaccggcggaggcggatctggcggcggaggtagcggtggcggaggatctgaattcgagatcgtgctgacacagagccctgccaccctgtctctgagccctggcgaaagagccaccctgagctgtagagccagccagagcgtgcggagctacctggcctggtatcagcagaagcctggacaggcccccagactgctgatctacgacgccagcaatcgggccacaggcatccccgccagattttctggctctggcagcggcaccgacttcaccctgacaatcagcagcctggaacccgaggacttcgccgtgtactactgccagcagcggagcaactggccccctacctttggacagggcaccaaggtggaaatcaagctcgagatccagaaccctgatcctgccgtgtaccagctgcgggatagcaagagcagcgacaagagcgtgtgtctgttcaccgacttcgacagccagaccaacgtgtcccagagcaaggactccgacgtgtacatcaccgataagtgcgtgctggacatgcggagcatggacttcaagagcaactccgccgtggcctggtccaacaagtccgatttcgcctgcgccaacgccttcaacaacagcattatccccgaggacacattcttcccaagccccgagagcagctgcggctttaccagcgagagctaccagcagggcgtgctgagcgccaccatcctgtacgagatcctgctgggcaaggccaccctgtacgccgtgctggtgtctgccctggtgctgatggctatggtcaagcggaaggacagccggggacgcgccaagagaagcggatctggcgtgaagcagaccctgaatttcgacctgctgaagctggctggcgacgtggaatccaacccaggccctactagtatggactggatttggcgcatccttttccttgtcggcgctgctaccggcgcgcattccgggccccagctccagctgcaagagtctggacctggcctggtcaagcctagcgagacactgagcctgacctgtaccgtgtccggcgatagcatcagcagcggcgattactactggggctggatcagacagcctcctggcaaaggactggaatggatcggccacatctactacagcggcgtgacctactacaaccccagcctgaagtccagagtgaccatcagcgtggacaccagccggaaccagttctccctgaagctgtctagcgtgacagccgccgataccgccgtgtactactgcaccagagaggacagcagcaactggcggagtagaggccagggaacactggtcacagttagctctggatccggcggaggcggaagtggaggcggaggatctggcggcggaggctctttcgaacaactccaggtgcaggaatctggccccggactcgtgaagcccagcgagacactgagcctgacctgtaccgtgtccggcggcagcatcagcaacagctacttctcctggggctggatcagacagccccctggcaagggcctggaatggatcggcagcttctactacggcgagaaaacctactacaaccccagcctgaagtccagagccaccatcagcatcgacaccagcaagagccagttctccctgaagctgagcagcgtgacagccgccgacaccgccgtgtattattgccccagaggccccaccatgatccggggcgtgatcgactcttggggccagggaacactcgtgaccgtgtcctctacgcgtgaggacctgaagaacgtgttcccacctgaggtggccgtgttcgagcctagcgaggccgagatcagccacacccagaaagccaccctcgtgtgcctggctaccggcttctaccccgaccatgtggaactgtcttggtgggtcaacggcaaagaggtgcacagcggcgtgtgtaccgacccccagccactgaaagaacagcccgccctgaacgacagccggtactgcctgagcagcagactgagagtgtccgccaccttctggcagaacccccggaaccacttcagatgccaggtgcagttctacggcctgagcgagaacgacgagtggacccaggacagagccaagcccgtgacccagatcgtgtctgccgaagcctggggcagagccgattgcgacgtgaagctggtggaaaagagcttcgagacagacaccaacctgaacttccagaacctgagcgtgatcggcttcagaatcctgctgctgaaagtggccggctttaacctgctgatgaccctgcggctgtggtccagc

SEQ ID NO: 4842 - DNA, 2718 bp, synthetic construct
  source 1..2718: mol_type = other DNA
atggccttaccagtgaccgccttgctcctgccgctggccttgctgctccacgccgccaggccggaagtgcagctggttgaatctggcggaggactggttcagcctggcggatctctgagactgtcttgtgccgccagcggcttcagcttcagcgacttttggatgagctgggtccgacaggcccctggcaaaggacttgaatgggtcgccacaatcagccaggccggcagcgagaaggactacgtggactctgtgaagggcagattcaccatcagccgggacaacgccaagaagtccctgtacctccagatgaacagcctgagagccgaggacaccgccgtgtactattgtgcctctggcgtgtacagcttcgactacagaggccagggcaccctggtcacagtctcttctggtaccggcggaggcggatctggcggcggaggtagcggtggcggaggatctgaattcgacatcgtgatgacccagacccccctgagcctgcctgtgacacctggcgagcctgccagcatctcctgcagaagcagcagaagcctgctggacagcgacgacggcaacacctacctggactggtatctgcagaaacccggccagagcccccaactgctgatctacaccctgagctacagagccagcggcgtgcccgatagattttccggctctggcagcggcaccgacttcaccctgaagatcagccgggtggaagccgaggacgtgggcgtgtactactgtatgcagcgggtggaatttcccatcaccttcggccagggcaccagactggaaatcaagagactcgagatccagaaccctgatcctgccgtgtaccagctgcgggatagcaagagcagcgacaagagcgtgtgtctgttcaccgacttcgacagccagaccaacgtgtcccagagcaaggactccgacgtgtacatcaccgataagtgcgtgctggacatgcggagcatggacttcaagagcaactccgccgtggcctggtccaacaagtccgatttcgcctgcgccaacgccttcaacaacagcattatccccgaggacacattcttcccaagccccgagagcagctgcggctttaccagcgagagctaccagcagggcgtgctgagcgccaccatcctgtacgagatcctgctgggcaaggccaccctgtacgccgtgctggtgtctgccctggtgctgatggctatggtcaagcggaaggacagccggggacgcgccaagagaagcggatctggcgtgaagcagaccctgaatttcgacctgctgaagctggctggcgacgtggaatccaacccaggccctactagtatggactggatttggcgcatccttttccttgtcggcgctgctaccggcgcgcattccgggccccagctccagctgcaagagtctggacctggcctggtcaagcctagcgagacactgagcctgacctgtaccgtgtccggcgatagcatcagcagcggcgattactactggggctggatcagacagcctcctggcaaaggactggaatggatcggccacatctactacagcggcgtgacctactacaaccccagcctgaagtccagagtgaccatcagcgtggacaccagccggaaccagttctccctgaagctgtctagcgtgacagccgccgataccgccgtgtactactgcaccagagaggacagcagcaactggcggagtagaggccagggaacactggtcacagttagctctggatccggcggaggcggaagtggaggcggaggatctggcggcggaggctctttcgaacaggtgcaactggtggaatctggcgggggagtggtgcagcctggcagatccctgagactgagctgtgccgccagcggcttcatcttcagcagatacggaatgcactgggtgcgccaggcccctggcaagggactgaaatgggtggccgtgatttggtacgacggcagcaacaagctgtacgccgacagcgtgaagggccggttcaccatcagcagagacaacagcaagaacaccctgtacctgcagatgaacagcctgcgggccgaggacaccgccgtgtactattgcgccagagactactacgacaacagccggcaccactggggcttcgactattggggccagggaacccttgtgaccgtgtcctctacgcgtgaggacctgaagaacgtgttcccacctgaggtggccgtgttcgagcctagcgaggccgagatcagccacacccagaaagccaccctcgtgtgcctggctaccggcttctaccccgaccatgtggaactgtcttggtgggtcaacggcaaagaggtgcacagcggcgtgtgtaccgacccccagccactgaaagaacagcccgccctgaacgacagccggtactgcctgagcagcagactgagagtgtccgccaccttctggcagaacccccggaaccacttcagatgccaggtgcagttctacggcctgagcgagaacgacgagtggacccaggacagagccaagcccgtgacccagatcgtgtctgccgaagcctggggcagagccgattgcgacgtgaagctggtggaaaagagcttcgagacagacaccaacctgaacttccagaacctgagcgtgatcggcttcagaatcctgctgctgaaagtggccggctttaacctgctgatgaccctgcggctgtggtccagc

SEQ ID NO: 4843 - DNA, 2688 bp, synthetic construct
  source 1..2688: mol_type = other DNA
atggccttaccagtgaccgccttgctcctgccgctggccttgctgctccacgccgccaggccggaagtgcagctggttgaatctggcggaggactggttcagcctggcggatctctgagactgtcttgtgccgccagcggcttcagcttcagcgacttttggatgagctgggtccgacaggcccctggcaaaggacttgaatgggtcgccacaatcagccaggccggcagcgagaaggactacgtggactctgtgaagggcagattcaccatcagccgggacaacgccaagaagtccctgtacctccagatgaacagcctgagagccgaggacaccgccgtgtactattgtgcctctggcgtgtacagcttcgactacagaggccagggcaccctggtcacagtctcttctggtaccggcggaggcggatctggcggcggaggtagcggtggcggaggatctgaattcgagatccagatgacccagagccccagcagcatgtctgccagcctgggcgacaccatcaccatcacatgccaggccacccaggacatcttcaagaacctgaactggtatcagcagaagcccggcaagccccccagcctgctgatctactatgccaccgaactggccgagggcgtgcccagcagattttctggcagcggcagcggctccgactacagcctgaccatcagcaacctggaaagcgaggacttcgccgcctactactgcctccagttcttcgagttcccattcaccttcggctccggcaccaagctggaaatgaagctcgagatccagaaccctgatcctgccgtgtaccagctgcgggatagcaagagcagcgacaagagcgtgtgtctgttcaccgacttcgacagccagaccaacgtgtcccagagcaaggactccgacgtgtacatcaccgataagtgcgtgctggacatgcggagcatggacttcaagagcaactccgccgtggcctggtccaacaagtccgatttcgcctgcgccaacgccttcaacaacagcattatccccgaggacacattcttcccaagccccgagagcagctgcggctttaccagcgagagctaccagcagggcgtgctgagcgccaccatcctgtacgagatcctgctgggcaaggccaccctgtacgccgtgctggtgtctgccctggtgctgatggctatggtcaagcggaaggacagccggggacgcgccaagagaagcggatctggcgtgaagcagaccctgaatttcgacctgctgaagctggctggcgacgtggaatccaacccaggccctactagtatggactggatttggcgcatccttttccttgtcggcgctgctaccggcgcgcattccgggccccagctccagctgcaagagtctggacctggcctggtcaagcctagcgagacactgagcctgacctgtaccgtgtccggcgatagcatcagcagcggcgattactactggggctggatcagacagcctcctggcaaaggactggaatggatcggccacatctactacagcggcgtgacctactacaaccccagcctgaagtccagagtgaccatcagcgtggacaccagccggaaccagttctccctgaagctgtctagcgtgacagccgccgataccgccgtgtactactgcaccagagaggacagcagcaactggcggagtagaggccagggaacactggtcacagttagctctggatccggcggaggcggaagtggaggcggaggatctggcggcggaggctctttcgaacaggtgcaactccagcagtctggcgctgagcttgtgcggcctggcacctctgtgaaggtgtcctgtaaagccagcggctacgtgttcaccaactactggatcgagtggatcaagcagcggccaggccagggcctggaatggatcggcgtgatgaatccaggcagcggcgagacaacctacaacgagaagttcaagggcaaggccaccctgaccgccgacaagagcagcagcacagcctacatgcaactgtcctccctgaccagcgtggacagcgccgtgtacttctgcgccagggaccacgaccgggactactacgctatggactactggggccagggcaccagcgtgaccgtgtcatctacgcgtgaggacctgaagaacgtgttcccacctgaggtggccgtgttcgagcctagcgaggccgagatcagccacacccagaaagccaccctcgtgtgcctggctaccggcttctaccccgaccatgtggaactgtcttggtgggtcaacggcaaagaggtgcacagcggcgtgtgtaccgacccccagccactgaaagaacagcccgccctgaacgacagccggtactgcctgagcagcagactgagagtgtccgccaccttctggcagaacccccggaaccacttcagatgccaggtgcagttctacggcctgagcgagaacgacgagtggacccaggacagagccaagcccgtgacccagatcgtgtctgccgaagcctggggcagagccgattgcgacgtgaagctggtggaaaagagcttcgagacagacaccaacctgaacttccagaacctgagcgtgatcggcttcagaatcctgctgctgaaagtggccggctttaacctgctgatgaccctgcggctgtggtccagc

SEQ ID NO: 4844 - DNA, 2679 bp, synthetic construct
  source 1..2679: mol_type = other DNA
atggccttaccagtgaccgccttgctcctgccgctggccttgctgctccacgccgccaggccggaagtgcagctggttgaatctggcggaggactggttcagcctggcggatctctgagactgtcttgtgccgccagcggcttcagcttcagcgacttttggatgagctgggtccgacaggcccctggcaaaggacttgaatgggtcgccacaatcagccaggccggcagcgagaaggactacgtggactctgtgaagggcagattcaccatcagccgggacaacgccaagaagtccctgtacctccagatgaacagcctgagagccgaggacaccgccgtgtactattgtgcctctggcgtgtacagcttcgactacagaggccagggcaccctggtcacagtctcttctggtaccggcggaggcggatctggcggcggaggtagcggtggcggaggatctgaattcgacatcctgctgacacagagccccgccatcctgtccgtgtctccaggcgagagagtgtcctttagctgccgggccagccagaacatcggcaccagcatccactggtatcagcagcggaccaacggcagccccagactgctgattaagtacgccagcgagtccgtgtccggcatccccagcagattttctggcagcggctccggcaccgacttcaccctgagcatcaacagcgtggaaagcgaggacattgccgactactactgccagcacaccaatagctggcccaccacctttggcggaggcaccaagctggaaatcaagagactcgagatccagaaccctgatcctgccgtgtaccagctgcgggatagcaagagcagcgacaagagcgtgtgtctgttcaccgacttcgacagccagaccaacgtgtcccagagcaaggactccgacgtgtacatcaccgataagtgcgtgctggacatgcggagcatggacttcaagagcaactccgccgtggcctggtccaacaagtccgatttcgcctgcgccaacgccttcaacaacagcattatccccgaggacacattcttcccaagccccgagagcagctgcggctttaccagcgagagctaccagcagggcgtgctgagcgccaccatcctgtacgagatcctgctgggcaaggccaccctgtacgccgtgctggtgtctgccctggtgctgatggctatggtcaagcggaaggacagccggggacgcgccaagagaagcggatctggcgtgaagcagaccctgaatttcgacctgctgaagctggctggcgacgtggaatccaacccaggccctactagtatggactggatttggcgcatccttttccttgtcggcgctgctaccggcgcgcattccgggccccagctccagctgcaagagtctggacctggcctggtcaagcctagcgagacactgagcctgacctgtaccgtgtccggcgatagcatcagcagcggcgattactactggggctggatcagacagcctcctggcaaaggactggaatggatcggccacatctactacagcggcgtgacctactacaaccccagcctgaagtccagagtgaccatcagcgtggacaccagccggaaccagttctccctgaagctgtctagcgtgacagccgccgataccgccgtgtactactgcaccagagaggacagcagcaactggcggagtagaggccagggaacactggtcacagttagctctggatccggcggaggcggaagtggaggcggaggatctggcggcggaggctctttcgaacaggtgcaactccagcagtccgacgccgagcttgtgaagcctggcgcttccgtgaagattagctgcaaggccagcggctacaccttcaccgaccacgccattcactgggtcaagcagaagcccgagcagggcctggaatggatcggctacttcagccccggcaacggcgacatcaagtacaacgagaagttcaagggcaaggccaccctgaccgccgacaagagcagcagcacagcctacatgcaactgaacagcctgaccagcgaggactccgccgtgtacttctgcaagcggagctacggcaactacgactactggggccagggcaccacactgaccgtgtctagtacgcgtgaggacctgaagaacgtgttcccacctgaggtggccgtgttcgagcctagcgaggccgagatcagccacacccagaaagccaccctcgtgtgcctggctaccggcttctaccccgaccatgtggaactgtcttggtgggtcaacggcaaagaggtgcacagcggcgtgtgtaccgacccccagccactgaaagaacagcccgccctgaacgacagccggtactgcctgagcagcagactgagagtgtccgccaccttctggcagaacccccggaaccacttcagatgccaggtgcagttctacggcctgagcgagaacgacgagtggacccaggacagagccaagcccgtgacccagatcgtgtctgccgaagcctggggcagagccgattgcgacgtgaagctggtggaaaagagcttcgagacagacaccaacctgaacttccagaacctgagcgtgatcggcttcagaatcctgctgctgaaagtggccggctttaacctgctgatgaccctgcggctgtggtccagc

SEQ ID NO: 4845 - DNA, 2694 bp, synthetic construct
  source 1..2694: mol_type = other DNA
atggccttaccagtgaccgccttgctcctgccgctggccttgctgctccacgccgccaggccggaagtgcagctggttgaatctggcggaggactggttcagcctggcggatctctgagactgtcttgtgccgccagcggcttcagcttcagcgacttttggatgagctgggtccgacaggcccctggcaaaggacttgaatgggtcgccacaatcagccaggccggcagcgagaaggactacgtggactctgtgaagggcagattcaccatcagccgggacaacgccaagaagtccctgtacctccagatgaacagcctgagagccgaggacaccgccgtgtactattgtgcctctggcgtgtacagcttcgactacagaggccagggcaccctggtcacagtctcttctggtaccggcggaggcggatctggcggcggaggtagcggtggcggaggatctgaattcgacatcgtgatgacccagagccccgatagcctggccgtgtctctgggagagagagccaccatcaactgcaagagcagccagagcctgctgaacagcggcgaccagaagaactacctgacctggtatcagcagaagcccggccagccccccaagctgctgatctactgggccagcaccagagaaagcggcgtgcccgatagattcagcggcagcggaagtggcaccgacttcaccctgaccatcagttctcttcaggccgaggacgtggccgtgtactactgccagaacgactacagctaccccctgaccttcggccagggcaccaaggtggaaatcaagctcgagatccagaaccctgatcctgccgtgtaccagctgcgggatagcaagagcagcgacaagagcgtgtgtctgttcaccgacttcgacagccagaccaacgtgtcccagagcaaggactccgacgtgtacatcaccgataagtgcgtgctggacatgcggagcatggacttcaagagcaactccgccgtggcctggtccaacaagtccgatttcgcctgcgccaacgccttcaacaacagcattatccccgaggacacattcttcccaagccccgagagcagctgcggctttaccagcgagagctaccagcagggcgtgctgagcgccaccatcctgtacgagatcctgctgggcaaggccaccctgtacgccgtgctggtgtctgccctggtgctgatggctatggtcaagcggaaggacagccggggacgcgccaagagaagcggatctggcgtgaagcagaccctgaatttcgacctgctgaagctggctggcgacgtggaatccaacccaggccctactagtatggactggatttggcgcatccttttccttgtcggcgctgctaccggcgcgcattccgggccccagctccagctgcaagagtctggacctggcctggtcaagcctagcgagacactgagcctgacctgtaccgtgtccggcgatagcatcagcagcggcgattactactggggctggatcagacagcctcctggcaaaggactggaatggatcggccacatctactacagcggcgtgacctactacaaccccagcctgaagtccagagtgaccatcagcgtggacaccagccggaaccagttctccctgaagctgtctagcgtgacagccgccgataccgccgtgtactactgcaccagagaggacagcagcaactggcggagtagaggccagggaacactggtcacagttagctctggatccggcggaggcggaagtggaggcggaggatctggcggcggaggctctttcgaacaggtgcagctggtgcagtctggggccgaagtgaagaaaaccggcagcagcgtgaaggtgtcctgcaaggccagcggctacacctttaccgaccacgccattcacgtgtggcggcaggctccaggacaggccctggaatggatgggccacttcagccccggcaacaccgacatcaagtacaacgacaagttcaagggcagagtgaccctgaccgtggaccgcagcatgagcaccgcctacatggaactgagcagcctgcggagcgaggacaccgccatgtactattgcaagaccagcaccttctttttcgactactggggccagggaacaatggtcaccgtgtccagcacgcgtgaggacctgaagaacgtgttcccacctgaggtggccgtgttcgagcctagcgaggccgagatcagccacacccagaaagccaccctcgtgtgcctggctaccggcttctaccccgaccatgtggaactgtcttggtgggtcaacggcaaagaggtgcacagcggcgtgtgtaccgacccccagccactgaaagaacagcccgccctgaacgacagccggtactgcctgagcagcagactgagagtgtccgccaccttctggcagaacccccggaaccacttcagatgccaggtgcagttctacggcctgagcgagaacgacgagtggacccaggacagagccaagcccgtgacccagatcgtgtctgccgaagcctggggcagagccgattgcgacgtgaagctggtggaaaagagcttcgagacagacaccaacctgaacttccagaacctgagcgtgatcggcttcagaatcctgctgctgaaagtggccggctttaacctgctgatgaccctgcggctgtggtccagc

SEQ ID NO: 4846 - DNA, 2691 bp, synthetic construct
  source 1..2691: mol_type = other DNA
atggccttaccagtgaccgccttgctcctgccgctggccttgctgctccacgccgccaggccggaagtgcagctggttgaatctggcggaggactggttcagcctggcggatctctgagactgtcttgtgccgccagcggcttcagcttcagcgacttttggatgagctgggtccgacaggcccctggcaaaggacttgaatgggtcgccacaatcagccaggccggcagcgagaaggactacgtggactctgtgaagggcagattcaccatcagccgggacaacgccaagaagtccctgtacctccagatgaacagcctgagagccgaggacaccgccgtgtactattgtgcctctggcgtgtacagcttcgactacagaggccagggcaccctggtcacagtctcttctggtaccggcggaggcggatctggcggcggaggtagcggtggcggaggatctgaattcgacatccagatgacccagagccccagcagcctgtctgccagcgtgggcgacagagtgaccatcacatgcaaggccagccaggacgtgtccattgccgtggcctggtatcagcagaagcccggcaaggcccccaaggtgctgatctacagcgccagctacagatacaccggcgtgcccgacagattcagcggctctggcagcggcaccgacttcaccttcaccatcagctccctccagcccgaggatattgccgtgtactactgccagcagcactacatcacccccctgacctttggcggaggcaccaaggtggaaatcaagctcgagatccagaaccctgatcctgccgtgtaccagctgcgggatagcaagagcagcgacaagagcgtgtgtctgttcaccgacttcgacagccagaccaacgtgtcccagagcaaggactccgacgtgtacatcaccgataagtgcgtgctggacatgcggagcatggacttcaagagcaactccgccgtggcctggtccaacaagtccgatttcgcctgcgccaacgccttcaacaacagcattatccccgaggacacattcttcccaagccccgagagcagctgcggctttaccagcgagagctaccagcagggcgtgctgagcgccaccatcctgtacgagatcctgctgggcaaggccaccctgtacgccgtgctggtgtctgccctggtgctgatggctatggtcaagcggaaggacagccggggacgcgccaagagaagcggatctggcgtgaagcagaccctgaatttcgacctgctgaagctggctggcgacgtggaatccaacccaggccctactagtatggactggatttggcgcatccttttccttgtcggcgctgctaccggcgcgcattccgggccccagctccagctgcaagagtctggacctggcctggtcaagcctagcgagacactgagcctgacctgtaccgtgtccggcgatagcatcagcagcggcgattactactggggctggatcagacagcctcctggcaaaggactggaatggatcggccacatctactacagcggcgtgacctactacaaccccagcctgaagtccagagtgaccatcagcgtggacaccagccggaaccagttctccctgaagctgtctagcgtgacagccgccgataccgccgtgtactactgcaccagagaggacagcagcaactggcggagtagaggccagggaacactggtcacagttagctctggatccggcggaggcggaagtggaggcggaggatctggcggcggaggctctttcgaacagatccaactggtgcagagcggccacgaagtgaagaaacctggggccagcgtgaaggtgtcctgcaaagccagcggctacacctttaccaactacggcatgaactgggtgcgccaggcccctggacagggcctggaatggatgggctggatcaacaccaagaccggcgagcccacctacgccgaagagttcaagggcagattcgtgttcagcctggaaaccagcgcctccaccgcctacctccagatcagctctctgaaggccgaggacaccgccatgtacttttgcggcagaggcggctacggcagcagctactggtacttcgatgtgtggggccagggcaccaccgtgaccgtgtcatctacgcgtgaggacctgaagaacgtgttcccacctgaggtggccgtgttcgagcctagcgaggccgagatcagccacacccagaaagccaccctcgtgtgcctggctaccggcttctaccccgaccatgtggaactgtcttggtgggtcaacggcaaagaggtgcacagcggcgtgtgtaccgacccccagccactgaaagaacagcccgccctgaacgacagccggtactgcctgagcagcagactgagagtgtccgccaccttctggcagaacccccggaaccacttcagatgccaggtgcagttctacggcctgagcgagaacgacgagtggacccaggacagagccaagcccgtgacccagatcgtgtctgccgaagcctggggcagagccgattgcgacgtgaagctggtggaaaagagcttcgagacagacaccaacctgaacttccagaacctgagcgtgatcggcttcagaatcctgctgctgaaagtggccggctttaacctgctgatgaccctgcggctgtggtccagc

SEQ ID NO: 4847 - DNA, 2697 bp, synthetic construct
  source 1..2697: mol_type = other DNA
atggccttaccagtgaccgccttgctcctgccgctggccttgctgctccacgccgccaggccggaagtgcagctggttgaatctggcggaggactggttcagcctggcggatctctgagactgtcttgtgccgccagcggcttcagcttcagcgacttttggatgagctgggtccgacaggcccctggcaaaggacttgaatgggtcgccacaatcagccaggccggcagcgagaaggactacgtggactctgtgaagggcagattcaccatcagccgggacaacgccaagaagtccctgtacctccagatgaacagcctgagagccgaggacaccgccgtgtactattgtgcctctggcgtgtacagcttcgactacagaggccagggcaccctggtcacagtctcttctggtaccggcggaggcggatctggcggcggaggtagcggtggcggaggatctgaattcgacatcgtgatgacccagagccccgatagcctggccgtgtctctgggagagagagccaccatcaactgccgggccagcaagagcgtgtccaccagcggctacagctacatgcactggtatcagcagaagcccggccagccccccaagctgctgatctacctggcctccaacctggaaagcggcgtgcccgatagattcagcggcagcggctctggcaccgacttcaccctgaccatcagttctcttcaggccgaggacgtggccgtgtactactgccagcacagcagagagctgccctacaccttcggccagggcaccaagctggaaatcaagctcgagatccagaaccctgatcctgccgtgtaccagctgcgggatagcaagagcagcgacaagagcgtgtgtctgttcaccgacttcgacagccagaccaacgtgtcccagagcaaggactccgacgtgtacatcaccgataagtgcgtgctggacatgcggagcatggacttcaagagcaactccgccgtggcctggtccaacaagtccgatttcgcctgcgccaacgccttcaacaacagcattatccccgaggacacattcttcccaagccccgagagcagctgcggctttaccagcgagagctaccagcagggcgtgctgagcgccaccatcctgtacgagatcctgctgggcaaggccaccctgtacgccgtgctggtgtctgccctggtgctgatggctatggtcaagcggaaggacagccggggacgcgccaagagaagcggatctggcgtgaagcagaccctgaatttcgacctgctgaagctggctggcgacgtggaatccaacccaggccctactagtatggactggatttggcgcatccttttccttgtcggcgctgctaccggcgcgcattccgggccccagctccagctgcaagagtctggacctggcctggtcaagcctagcgagacactgagcctgacctgtaccgtgtccggcgatagcatcagcagcggcgattactactggggctggatcagacagcctcctggcaaaggactggaatggatcggccacatctactacagcggcgtgacctactacaaccccagcctgaagtccagagtgaccatcagcgtggacaccagccggaaccagttctccctgaagctgtctagcgtgacagccgccgataccgccgtgtactactgcaccagagaggacagcagcaactggcggagtagaggccagggaacactggtcacagttagctctggatccggcggaggcggaagtggaggcggaggatctggcggcggaggctctttcgaacaggtgcaactccaggaatctggccctggccttgtgaagcccagcgagacactgagcctgacctgtaccgtgtccggcggcagcatcagctcttacggcgtgcactggattcggcagcctccaggcaagggcctggaatggatcggcgtgatctggacctccggcgtgaccgactacaacagcgccctgatgggcagagtgaccatctccgtggacaccagcaagaaccagttcagcctgaagctgagcagcgtgacagccgccgataccgccgtgtattattgcgccagagatggcgactacgaccgctacacaatggactactggggccagggaacccttgtgaccgtgtcctctacgcgtgaggacctgaagaacgtgttcccacctgaggtggccgtgttcgagcctagcgaggccgagatcagccacacccagaaagccaccctcgtgtgcctggctaccggcttctaccccgaccatgtggaactgtcttggtgggtcaacggcaaagaggtgcacagcggcgtgtgtaccgacccccagccactgaaagaacagcccgccctgaacgacagccggtactgcctgagcagcagactgagagtgtccgccaccttctggcagaacccccggaaccacttcagatgccaggtgcagttctacggcctgagcgagaacgacgagtggacccaggacagagccaagcccgtgacccagatcgtgtctgccgaagcctggggcagagccgattgcgacgtgaagctggtggaaaagagcttcgagacagacaccaacctgaacttccagaacctgagcgtgatcggcttcagaatcctgctgctgaaagtggccggctttaacctgctgatgaccctgcggctgtggtccagc

SEQ ID NO: 4848 - DNA, 2697 bp, synthetic construct
  source 1..2697: mol_type = other DNA
atggccttaccagtgaccgccttgctcctgccgctggccttgctgctccacgccgccaggccggaagtgcagctggttgaatctggcggaggactggttcagcctggcggatctctgagactgtcttgtgccgccagcggcttcagcttcagcgacttttggatgagctgggtccgacaggcccctggcaaaggacttgaatgggtcgccacaatcagccaggccggcagcgagaaggactacgtggactctgtgaagggcagattcaccatcagccgggacaacgccaagaagtccctgtacctccagatgaacagcctgagagccgaggacaccgccgtgtactattgtgcctctggcgtgtacagcttcgactacagaggccagggcaccctggtcacagtctcttctggtaccggcggaggcggatctggcggcggaggtagcggtggcggaggatctgaattcgacatccagatgacccagagccccagcagcctgtctgccagcgtgggcgacagagtgaccatcacctgtagagccagccagagcatcggcaccagcctgcactggtatcagcagaagcctggcaaggcccccaagctgctgattaagttcgccagcagactgcagagcggcgtgcccagcagattttctggcagcggctccggcaccgacttcaccctgacaatcagctccctgcagcccgaggacttcgccacctactactgccagcagagccccggcttccctccaacctttggacagggcaccaagctggaaatcaagcggctcgagatccagaaccctgatcctgccgtgtaccagctgcgggatagcaagagcagcgacaagagcgtgtgtctgttcaccgacttcgacagccagaccaacgtgtcccagagcaaggactccgacgtgtacatcaccgataagtgcgtgctggacatgcggagcatggacttcaagagcaactccgccgtggcctggtccaacaagtccgatttcgcctgcgccaacgccttcaacaacagcattatccccgaggacacattcttcccaagccccgagagcagctgcggctttaccagcgagagctaccagcagggcgtgctgagcgccaccatcctgtacgagatcctgctgggcaaggccaccctgtacgccgtgctggtgtctgccctggtgctgatggctatggtcaagcggaaggacagccggggacgcgccaagagaagcggatctggcgtgaagcagaccctgaatttcgacctgctgaagctggctggcgacgtggaatccaacccaggccctactagtatggactggatttggcgcatccttttccttgtcggcgctgctaccggcgcgcattccgggccccagctccagctgcaagagtctggacctggcctggtcaagcctagcgagacactgagcctgacctgtaccgtgtccggcgatagcatcagcagcggcgattactactggggctggatcagacagcctcctggcaaaggactggaatggatcggccacatctactacagcggcgtgacctactacaaccccagcctgaagtccagagtgaccatcagcgtggacaccagccggaaccagttctccctgaagctgtctagcgtgacagccgccgataccgccgtgtactactgcaccagagaggacagcagcaactggcggagtagaggccagggaacactggtcacagttagctctggatccggcggaggcggaagtggaggcggaggatctggcggcggaggctctttcgaacaggtgcaactggtggaatctggcggcggacttgtgaagccaggcggcagcctgagactgagctgtgccgccagcggcttcagcatcaccaccagcggctactactggacctggatcagacagttccccggcaagggcctggaatggatgggctacatcggctacaacagcaagacctactacaaccccgccctgaagtcccggatcaccatcagcagagacaacgccaagaacagcctgtacctgcagatgaactccctgagagccgaggataccgccgtgtactactgcgccagatccctgtacggcggctacaaggacgccttcgatagctggggccagggaacccttgtgaccgtgtctagcacgcgtgaggacctgaagaacgtgttcccacctgaggtggccgtgttcgagcctagcgaggccgagatcagccacacccagaaagccaccctcgtgtgcctggctaccggcttctaccccgaccatgtggaactgtcttggtgggtcaacggcaaagaggtgcacagcggcgtgtgtaccgacccccagccactgaaagaacagcccgccctgaacgacagccggtactgcctgagcagcagactgagagtgtccgccaccttctggcagaacccccggaaccacttcagatgccaggtgcagttctacggcctgagcgagaacgacgagtggacccaggacagagccaagcccgtgacccagatcgtgtctgccgaagcctggggcagagccgattgcgacgtgaagctggtggaaaagagcttcgagacagacaccaacctgaacttccagaacctgagcgtgatcggcttcagaatcctgctgctgaaagtggccggctttaacctgctgatgaccctgcggctgtggtccagc

SEQ ID NO: 4849 - DNA, 2712 bp, synthetic construct
  source 1..2712: mol_type = other DNA
atggccttaccagtgaccgccttgctcctgccgctggccttgctgctccacgccgccaggccggaagtgcagctggttgaatctggcggaggactggttcagcctggcggatctctgagactgtcttgtgccgccagcggcttcagcttcagcgacttttggatgagctgggtccgacaggcccctggcaaaggacttgaatgggtcgccacaatcagccaggccggcagcgagaaggactacgtggactctgtgaagggcagattcaccatcagccgggacaacgccaagaagtccctgtacctccagatgaacagcctgagagccgaggacaccgccgtgtactattgtgcctctggcgtgtacagcttcgactacagaggccagggcaccctggtcacagtctcttctggtaccggcggaggcggatctggcggcggaggtagcggtggcggaggatctgaattcgacgagatcgtgctgacccagagccctctgagcctgcctgtgacacctggcgagcctgccagcatctcctgtagaagcagccagagcctgctgcacagcatcggctacaactacctggactggtatctccagaagcccggccagagcccccaactgctgatctacctgggcagcaacagagccagcggcgtgcccgatagattttccggcagcggctccggcaccgacttcaccctgaagatcagccgggtggaagccgaggacgtgggcgtgtactactgtatgcaggccctccagacccccctgacctttggcggaggcaccaaggtggaaatcaagcggctcgagatccagaaccctgatcctgccgtgtaccagctgcgggatagcaagagcagcgacaagagcgtgtgtctgttcaccgacttcgacagccagaccaacgtgtcccagagcaaggactccgacgtgtacatcaccgataagtgcgtgctggacatgcggagcatggacttcaagagcaactccgccgtggcctggtccaacaagtccgatttcgcctgcgccaacgccttcaacaacagcattatccccgaggacacattcttcccaagccccgagagcagctgcggctttaccagcgagagctaccagcagggcgtgctgagcgccaccatcctgtacgagatcctgctgggcaaggccaccctgtacgccgtgctggtgtctgccctggtgctgatggctatggtcaagcggaaggacagccggggacgcgccaagagaagcggatctggcgtgaagcagaccctgaatttcgacctgctgaagctggctggcgacgtggaatccaacccaggccctactagtatggactggatttggcgcatccttttccttgtcggcgctgctaccggcgcgcattccgggccccagctccagctgcaagagtctggacctggcctggtcaagcctagcgagacactgagcctgacctgtaccgtgtccggcgatagcatcagcagcggcgattactactggggctggatcagacagcctcctggcaaaggactggaatggatcggccacatctactacagcggcgtgacctactacaaccccagcctgaagtccagagtgaccatcagcgtggacaccagccggaaccagttctccctgaagctgtctagcgtgacagccgccgataccgccgtgtactactgcaccagagaggacagcagcaactggcggagtagaggccagggaacactggtcacagttagctctggatccggcggaggcggaagtggaggcggaggatctggcggcggaggctctttcgaagaagtgcaactggtggaaagcggaggcggcgtggtgcagcctggaagaagcctgagactgagctgtgccgccagcggcttcaccttccggtcctacggaatgcactgggtgcgccaggcccctggcaaaggactggaatgggtggccgtgatctcctacgacggctccaacaagtactacaccgacagcgtgaacggcagattcaccatcagcagagacaacagcaagaacaccctgtacctccagatgaacagcctgcgggccgaggacaccgccgtgtactattgtgctagaggcggaggctactacgagacaagcggccctgattactggggccagggcacactcgtgaccgtgtctagtacgcgtgaggacctgaagaacgtgttcccacctgaggtggccgtgttcgagcctagcgaggccgagatcagccacacccagaaagccaccctcgtgtgcctggctaccggcttctaccccgaccatgtggaactgtcttggtgggtcaacggcaaagaggtgcacagcggcgtgtgtaccgacccccagccactgaaagaacagcccgccctgaacgacagccggtactgcctgagcagcagactgagagtgtccgccaccttctggcagaacccccggaaccacttcagatgccaggtgcagttctacggcctgagcgagaacgacgagtggacccaggacagagccaagcccgtgacccagatcgtgtctgccgaagcctggggcagagccgattgcgacgtgaagctggtggaaaagagcttcgagacagacaccaacctgaacttccagaacctgagcgtgatcggcttcagaatcctgctgctgaaagtggccggctttaacctgctgatgaccctgcggctgtggtccagc

SEQ ID NO: 4850 - DNA, 2706 bp, synthetic construct
  source 1..2706: mol_type = other DNA
atggccttaccagtgaccgccttgctcctgccgctggccttgctgctccacgccgccaggccggaagtgcagctggttgaatctggcggaggactggttcagcctggcggatctctgagactgtcttgtgccgccagcggcttcagcttcagcgacttttggatgagctgggtccgacaggcccctggcaaaggacttgaatgggtcgccacaatcagccaggccggcagcgagaaggactacgtggactctgtgaagggcagattcaccatcagccgggacaacgccaagaagtccctgtacctccagatgaacagcctgagagccgaggacaccgccgtgtactattgtgcctctggcgtgtacagcttcgactacagaggccagggcaccctggtcacagtctcttctggtaccggcggaggcggatctggcggcggaggtagcggtggcggaggatctgaattcgacgacgtcgtgatgacccagagccctctgagcctgcctgtgacacctggcgagcctgccagcatctcctgtagaagcagccagagcctgctgcacagcatcggctacaactacctgcactggtttctccagaagcccggccagagcccccaactgctgatctacctgggcagcaacagagccagcggcgtgcccgatagattttccggcagcggctccggcaccgacttcaccctgaagatcagccgggtggaagccgaggacgtgggcgtgtactactgtatgcaggccctccagacccctcccacctttggacagggcaccagactggaaatcaagcggctcgagatccagaaccctgatcctgccgtgtaccagctgcgggatagcaagagcagcgacaagagcgtgtgtctgttcaccgacttcgacagccagaccaacgtgtcccagagcaaggactccgacgtgtacatcaccgataagtgcgtgctggacatgcggagcatggacttcaagagcaactccgccgtggcctggtccaacaagtccgatttcgcctgcgccaacgccttcaacaacagcattatccccgaggacacattcttcccaagccccgagagcagctgcggctttaccagcgagagctaccagcagggcgtgctgagcgccaccatcctgtacgagatcctgctgggcaaggccaccctgtacgccgtgctggtgtctgccctggtgctgatggctatggtcaagcggaaggacagccggggacgcgccaagagaagcggatctggcgtgaagcagaccctgaatttcgacctgctgaagctggctggcgacgtggaatccaacccaggccctactagtatggactggatttggcgcatccttttccttgtcggcgctgctaccggcgcgcattccgggccccagctccagctgcaagagtctggacctggcctggtcaagcctagcgagacactgagcctgacctgtaccgtgtccggcgatagcatcagcagcggcgattactactggggctggatcagacagcctcctggcaaaggactggaatggatcggccacatctactacagcggcgtgacctactacaaccccagcctgaagtccagagtgaccatcagcgtggacaccagccggaaccagttctccctgaagctgtctagcgtgacagccgccgataccgccgtgtactactgcaccagagaggacagcagcaactggcggagtagaggccagggaacactggtcacagttagctctggatccggcggaggcggaagtggaggcggaggatctggcggcggaggctctttcgaacaactccaactccaggaaagcggccctggcctcgtgaagcctagcggcacactgagcctgacatgtgccgtgtctggcggcagcatcagcagcagcaactggtggtcttgggtgcgccagcctcctggcaagggcctggaatggatcggcgaaatctaccacagcggcagcaccaactacaaccccagcctgaagtccagagtgaccatcagcgtggacaagagcaagaaccagttctccctgaagctgagcagcgtgacagccgccgataccgccgtgtactattgcgtgggcagcccctacggcgactacgtgctggattattggggccagggcaccctcgtgaccgtgtctagtacgcgtgaggacctgaagaacgtgttcccacctgaggtggccgtgttcgagcctagcgaggccgagatcagccacacccagaaagccaccctcgtgtgcctggctaccggcttctaccccgaccatgtggaactgtcttggtgggtcaacggcaaagaggtgcacagcggcgtgtgtaccgacccccagccactgaaagaacagcccgccctgaacgacagccggtactgcctgagcagcagactgagagtgtccgccaccttctggcagaacccccggaaccacttcagatgccaggtgcagttctacggcctgagcgagaacgacgagtggacccaggacagagccaagcccgtgacccagatcgtgtctgccgaagcctggggcagagccgattgcgacgtgaagctggtggaaaagagcttcgagacagacaccaacctgaacttccagaacctgagcgtgatcggcttcagaatcctgctgctgaaagtggccggctttaacctgctgatgaccctgcggctgtggtccagc

SEQ ID NO: 4851 - DNA, 2700 bp, synthetic construct
  source 1..2700: mol_type = other DNA
atggccttaccagtgaccgccttgctcctgccgctggccttgctgctccacgccgccaggccggaagtgcagctggttgaatctggcggaggactggttcagcctggcggatctctgagactgtcttgtgccgccagcggcttcagcttcagcgacttttggatgagctgggtccgacaggcccctggcaaaggacttgaatgggtcgccacaatcagccaggccggcagcgagaaggactacgtggactctgtgaagggcagattcaccatcagccgggacaacgccaagaagtccctgtacctccagatgaacagcctgagagccgaggacaccgccgtgtactattgtgcctctggcgtgtacagcttcgactacagaggccagggcaccctggtcacagtctcttctggtaccggcggaggcggatctggcggcggaggtagcggtggcggaggatctgaattcgacgagatcgtgctgacacagagccctggcaccctgagcctgtctctgggagagagagccacactgagctgtcgggccagccagtctatcagcagcagcttcctggcctggtatcagcagaagcccggccaggcccctaagctgctgatctacgccgccagcacaagagccaccggcatccccgatagattcagcggctctggcagcggcaccgacttcaccctgaccatcagcagactggaacccgaggacttcgccgtgtactactgccagcagtacggcagaagcctgagcttcggcggaggcaccaaggtggaagtgaagctcgagatccagaaccctgatcctgccgtgtaccagctgcgggatagcaagagcagcgacaagagcgtgtgtctgttcaccgacttcgacagccagaccaacgtgtcccagagcaaggactccgacgtgtacatcaccgataagtgcgtgctggacatgcggagcatggacttcaagagcaactccgccgtggcctggtccaacaagtccgatttcgcctgcgccaacgccttcaacaacagcattatccccgaggacacattcttcccaagccccgagagcagctgcggctttaccagcgagagctaccagcagggcgtgctgagcgccaccatcctgtacgagatcctgctgggcaaggccaccctgtacgccgtgctggtgtctgccctggtgctgatggctatggtcaagcggaaggacagccggggacgcgccaagagaagcggatctggcgtgaagcagaccctgaatttcgacctgctgaagctggctggcgacgtggaatccaacccaggccctactagtatggactggatttggcgcatccttttccttgtcggcgctgctaccggcgcgcattccgggccccagctccagctgcaagagtctggacctggcctggtcaagcctagcgagacactgagcctgacctgtaccgtgtccggcgatagcatcagcagcggcgattactactggggctggatcagacagcctcctggcaaaggactggaatggatcggccacatctactacagcggcgtgacctactacaaccccagcctgaagtccagagtgaccatcagcgtggacaccagccggaaccagttctccctgaagctgtctagcgtgacagccgccgataccgccgtgtactactgcaccagagaggacagcagcaactggcggagtagaggccagggaacactggtcacagttagctctggatccggcggaggcggaagtggaggcggaggatctggcggcggaggctctttcgaacaggtgcaactccagcagtctggccccggactcgtgaagcctagccagacactgagcctgacctgcgccatcagcggcgatagcgtgtccggcaatagcgccacctggaactggatcagacagagcccatctcggggcctggaatggctgggccggacctactaccgcagcaagtggaaccacgactacgccgagagcgtgaagtcccggatcaccatcaaccccgacaccagcaagaaccagttctccttgcaactgaacagcgtgacccccgaggacacagccgtgtattattgcgccagaggcgacagcagctcttggtacgccttcgactattggggccagggcaccctcgtgaccgtgtctagtacgcgtgaggacctgaagaacgtgttcccacctgaggtggccgtgttcgagcctagcgaggccgagatcagccacacccagaaagccaccctcgtgtgcctggctaccggcttctaccccgaccatgtggaactgtcttggtgggtcaacggcaaagaggtgcacagcggcgtgtgtaccgacccccagccactgaaagaacagcccgccctgaacgacagccggtactgcctgagcagcagactgagagtgtccgccaccttctggcagaacccccggaaccacttcagatgccaggtgcagttctacggcctgagcgagaacgacgagtggacccaggacagagccaagcccgtgacccagatcgtgtctgccgaagcctggggcagagccgattgcgacgtgaagctggtggaaaagagcttcgagacagacaccaacctgaacttccagaacctgagcgtgatcggcttcagaatcctgctgctgaaagtggccggctttaacctgctgatgaccctgcggctgtggtccagc

SEQ ID NO: 4852 - DNA, 2697 bp, synthetic construct
  source 1..2697: mol_type = other DNA
atggccttaccagtgaccgccttgctcctgccgctggccttgctgctccacgccgccaggccggaagtgcagctggttgaatctggcggaggactggttcagcctggcggatctctgagactgtcttgtgccgccagcggcttcagcttcagcgacttttggatgagctgggtccgacaggcccctggcaaaggacttgaatgggtcgccacaatcagccaggccggcagcgagaaggactacgtggactctgtgaagggcagattcaccatcagccgggacaacgccaagaagtccctgtacctccagatgaacagcctgagagccgaggacaccgccgtgtactattgtgcctctggcgtgtacagcttcgactacagaggccagggcaccctggtcacagtctcttctggtaccggcggaggcggatctggcggcggaggtagcggtggcggaggatctgaattcgaccagagcgtcgtgacacagcctcctagcgtgtcagtggcccctggcaagaccgccagaatcacctgtggccggaacaacatcggcagcaagagcgtgcactggtatcagcagaagcccggccaggctcctgtgctggtggtgtacgacgacagcgacagacccagcggcatccccgagagattcagcggcagcaactccggcaataccgccaccctgaccatcagcagagtggaagccggcgacgaggccgactactactgccaagtgtgggacagcagcagcgatcacgtggtgtttggcggaggcaccaagctgacagtgctgggtctcgagatccagaaccctgatcctgccgtgtaccagctgcgggatagcaagagcagcgacaagagcgtgtgtctgttcaccgacttcgacagccagaccaacgtgtcccagagcaaggactccgacgtgtacatcaccgataagtgcgtgctggacatgcggagcatggacttcaagagcaactccgccgtggcctggtccaacaagtccgatttcgcctgcgccaacgccttcaacaacagcattatccccgaggacacattcttcccaagccccgagagcagctgcggctttaccagcgagagctaccagcagggcgtgctgagcgccaccatcctgtacgagatcctgctgggcaaggccaccctgtacgccgtgctggtgtctgccctggtgctgatggctatggtcaagcggaaggacagccggggacgcgccaagagaagcggatctggcgtgaagcagaccctgaatttcgacctgctgaagctggctggcgacgtggaatccaacccaggccctactagtatggactggatttggcgcatccttttccttgtcggcgctgctaccggcgcgcattccgggccccagctccagctgcaagagtctggacctggcctggtcaagcctagcgagacactgagcctgacctgtaccgtgtccggcgatagcatcagcagcggcgattactactggggctggatcagacagcctcctggcaaaggactggaatggatcggccacatctactacagcggcgtgacctactacaaccccagcctgaagtccagagtgaccatcagcgtggacaccagccggaaccagttctccctgaagctgtctagcgtgacagccgccgataccgccgtgtactactgcaccagagaggacagcagcaactggcggagtagaggccagggaacactggtcacagttagctctggatccggcggaggcggaagtggaggcggaggatctggcggcggaggctctttcgaagtgcaactggtgcagtctggcggaggggtcatgcggcctggcggatctctgagactgtcttgtgccgccagcggcttcaccttcgacgactacggcatgagctgggtgcgccaggcccctggaaaaggcctggaatgggtgtccggcatcaactggaatggcggcagcaccggctacgccgattctgtgcggggcagattcaccatcagccgggacaacgccaagaacagcctgtacctgcagatgaactccctgcgggccgaggacaccgccctgtactattgcgccagagagcggggctacggctaccacgaccctcacgattattggggccagggcacccttgttaccgtgtcctctacgcgtgaggacctgaagaacgtgttcccacctgaggtggccgtgttcgagcctagcgaggccgagatcagccacacccagaaagccaccctcgtgtgcctggctaccggcttctaccccgaccatgtggaactgtcttggtgggtcaacggcaaagaggtgcacagcggcgtgtgtaccgacccccagccactgaaagaacagcccgccctgaacgacagccggtactgcctgagcagcagactgagagtgtccgccaccttctggcagaacccccggaaccacttcagatgccaggtgcagttctacggcctgagcgagaacgacgagtggacccaggacagagccaagcccgtgacccagatcgtgtctgccgaagcctggggcagagccgattgcgacgtgaagctggtggaaaagagcttcgagacagacaccaacctgaacttccagaacctgagcgtgatcggcttcagaatcctgctgctgaaagtggccggctttaacctgctgatgaccctgcggctgtggtccagc

SEQ ID NO: 4853 - DNA, 2736 bp, synthetic construct
  source 1..2736: mol_type = other DNA
atggccttaccagtgaccgccttgctcctgccgctggccttgctgctccacgccgccaggccggaagtgcagctggttgaatctggcggaggactggttcagcctggcggatctctgagactgtcttgtgccgccagcggcttcagcttcagcgacttttggatgagctgggtccgacaggcccctggcaaaggacttgaatgggtcgccacaatcagccaggccggcagcgagaaggactacgtggactctgtgaagggcagattcaccatcagccgggacaacgccaagaagtccctgtacctccagatgaacagcctgagagccgaggacaccgccgtgtactattgtgcctctggcgtgtacagcttcgactacagaggccagggcaccctggtcacagtctcttctggtaccggcggaggcggatctggcggcggaggtagcggtggcggaggatctgaattcgaacagaaactcatcagtgaagaagacctggaattccaggctgtcgtgacacagcctcctagcgcctctggcacaccaggccagagagtgaccatctcctgtagcggcagcagcagcaacatcggcagcaacaccgtgaactggtatcagcaggtgcccggcaccgctcccaagctgctgatctacagcaacaaccagcggcccagcggcgtgcccgatagattttctggcagcaagagcggcaccagcgccagcctggctatctctggactccagtccgaggacgaggccgactactattgcgccgcctgggacgatagcctgaacggctgggtgttcggcggaggcaccaagctgacagtgctgctcgagatccagaaccctgatcctgccgtgtaccagctgcgggatagcaagagcagcgacaagagcgtgtgtctgttcaccgacttcgacagccagaccaacgtgtcccagagcaaggactccgacgtgtacatcaccgataagtgcgtgctggacatgcggagcatggacttcaagagcaactccgccgtggcctggtccaacaagtccgatttcgcctgcgccaacgccttcaacaacagcattatccccgaggacacattcttcccaagccccgagagcagctgcggctttaccagcgagagctaccagcagggcgtgctgagcgccaccatcctgtacgagatcctgctgggcaaggccaccctgtacgccgtgctggtgtctgccctggtgctgatggctatggtcaagcggaaggacagccggggacgcgccaagagaagcggatctggcgtgaagcagaccctgaatttcgacctgctgaagctggctggcgacgtggaatccaacccaggccctactagtatggactggatttggcgcatccttttccttgtcggcgctgctaccggcgcgcattccgggccccagctccagctgcaagagtctggacctggcctggtcaagcctagcgagacactgagcctgacctgtaccgtgtccggcgatagcatcagcagcggcgattactactggggctggatcagacagcctcctggcaaaggactggaatggatcggccacatctactacagcggcgtgacctactacaaccccagcctgaagtccagagtgaccatcagcgtggacaccagccggaaccagttctccctgaagctgtctagcgtgacagccgccgataccgccgtgtactactgcaccagagaggacagcagcaactggcggagtagaggccagggaacactggtcacagttagctctggatccggcggaggcggaagtggaggcggaggatctggcggcggaggctctttcgaacagatgcaactggtgcagagcggagccgaagtgaaagagcctggcgagagcctgcggatctcctgcaagggcagcggctacagcttcaccaatttctggatctcttgggtgcgccagatgcccggcaagggcctggaatggatgggcagagtggaccccggctactcctacagcacctacagccctagcttccagggccacgtgaccatcagcgccgacaagagcaccagcaccgcctacctccagtggaacagcctgaaggccagcgacaccgccatgtactactgcgccagagtgcagtacagcggctattacgattggttcgacccctggggccagggcacactcgtgacagtgtcaagcacgcgtgaggacctgaagaacgtgttcccacctgaggtggccgtgttcgagcctagcgaggccgagatcagccacacccagaaagccaccctcgtgtgcctggctaccggcttctaccccgaccatgtggaactgtcttggtgggtcaacggcaaagaggtgcacagcggcgtgtgtaccgacccccagccactgaaagaacagcccgccctgaacgacagccggtactgcctgagcagcagactgagagtgtccgccaccttctggcagaacccccggaaccacttcagatgccaggtgcagttctacggcctgagcgagaacgacgagtggacccaggacagagccaagcccgtgacccagatcgtgtctgccgaagcctggggcagagccgattgcgacgtgaagctggtggaaaagagcttcgagacagacaccaacctgaacttccagaacctgagcgtgatcggcttcagaatcctgctgctgaaagtggccggctttaacctgctgatgaccctgcggctgtggtccagc

SEQ ID NO: 4854 - DNA, 2718 bp, synthetic construct
  source 1..2718: mol_type = other DNA
atggccttaccagtgaccgccttgctcctgccgctggccttgctgctccacgccgccaggccggaagtgcagctggttgaatctggcggaggactggttcagcctggcggatctctgagactgtcttgtgccgccagcggcttcagcttcagcgacttttggatgagctgggtccgacaggcccctggcaaaggacttgaatgggtcgccacaatcagccaggccggcagcgagaaggactacgtggactctgtgaagggcagattcaccatcagccgggacaacgccaagaagtccctgtacctccagatgaacagcctgagagccgaggacaccgccgtgtactattgtgcctctggcgtgtacagcttcgactacagaggccagggcaccctggtcacagtctcttctggtaccggcggaggcggatctggcggcggaggtagcggtggcggaggatctgaattcgaacagaaactcatcagtgaagaagacctggaattcgacatccagatgacccagagccccagcacactgagcgccagcgtgggcgacagagtgaccatcacctgtcgggccagccagaacatcaacaagtggctggcctggtatcagcagaggcccggaaaagccccccagctgctgatctacaaggccagcagcctggaaagcggcgtgcccagcagattttctggcagcggctctggcaccgagtacaccctgaccatcagctccctccagcccgacgacttcgccacctactactgccagcagtacaacagctacgccaccttcggccagggcaccaaggtggaaatcaagagactcgagatccagaaccctgatcctgccgtgtaccagctgcgggatagcaagagcagcgacaagagcgtgtgtctgttcaccgacttcgacagccagaccaacgtgtcccagagcaaggactccgacgtgtacatcaccgataagtgcgtgctggacatgcggagcatggacttcaagagcaactccgccgtggcctggtccaacaagtccgatttcgcctgcgccaacgccttcaacaacagcattatccccgaggacacattcttcccaagccccgagagcagctgcggctttaccagcgagagctaccagcagggcgtgctgagcgccaccatcctgtacgagatcctgctgggcaaggccaccctgtacgccgtgctggtgtctgccctggtgctgatggctatggtcaagcggaaggacagccggggacgcgccaagagaagcggatctggcgtgaagcagaccctgaatttcgacctgctgaagctggctggcgacgtggaatccaacccaggccctactagtatggactggatttggcgcatccttttccttgtcggcgctgctaccggcgcgcattccgggccccagctccagctgcaagagtctggacctggcctggtcaagcctagcgagacactgagcctgacctgtaccgtgtccggcgatagcatcagcagcggcgattactactggggctggatcagacagcctcctggcaaaggactggaatggatcggccacatctactacagcggcgtgacctactacaaccccagcctgaagtccagagtgaccatcagcgtggacaccagccggaaccagttctccctgaagctgtctagcgtgacagccgccgataccgccgtgtactactgcaccagagaggacagcagcaactggcggagtagaggccagggaacactggtcacagttagctctggatccggcggaggcggaagtggaggcggaggatctggcggcggaggctctttcgaacaggtgcagctggtgcagtctggggccgaagtgaagaagcctggcgagagcctgaagatcagctgcaagggctccggctacaacttctctaacaagtggatcggctgggtgcgccagctgcctggcagaggactggaatggatcgccatcatctaccccggctacagcgacatcacctacagccccagcttccagggccgcgtgacaatcagcgccgacaccagcatcaacaccgcctacctgcactggcacagcctgaaggccagcgacaccgccatgtactactgcgtgcggcatacagccctggctggcttcgattattggggcctgggcaccctcgtgaccgtgtctagtacgcgtgaggacctgaagaacgtgttcccacctgaggtggccgtgttcgagcctagcgaggccgagatcagccacacccagaaagccaccctcgtgtgcctggctaccggcttctaccccgaccatgtggaactgtcttggtgggtcaacggcaaagaggtgcacagcggcgtgtgtaccgacccccagccactgaaagaacagcccgccctgaacgacagccggtactgcctgagcagcagactgagagtgtccgccaccttctggcagaacccccggaaccacttcagatgccaggtgcagttctacggcctgagcgagaacgacgagtggacccaggacagagccaagcccgtgacccagatcgtgtctgccgaagcctggggcagagccgattgcgacgtgaagctggtggaaaagagcttcgagacagacaccaacctgaacttccagaacctgagcgtgatcggcttcagaatcctgctgctgaaagtggccggctttaacctgctgatgaccctgcggctgtggtccagc

SEQ ID NO: 4855 - DNA, 2694 bp, synthetic construct
  source 1..2694: mol_type = other DNA
atggccttaccagtgaccgccttgctcctgccgctggccttgctgctccacgccgccaggccggaagtgcagctggttgaatctggcggaggactggttcagcctggcggatctctgagactgtcttgtgccgccagcggcttcagcttcagcgacttttggatgagctgggtccgacaggcccctggcaaaggacttgaatgggtcgccacaatcagccaggccggcagcgagaaggactacgtggactctgtgaagggcagattcaccatcagccgggacaacgccaagaagtccctgtacctccagatgaacagcctgagagccgaggacaccgccgtgtactattgtgcctctggcgtgtacagcttcgactacagaggccagggcaccctggtcacagtctcttctggtaccggcggaggcggatctggcggcggaggtagcggtggcggaggatctgaattcgacatcgtgctgacacagagccctgcttctctggccgtgtctctgggacagagagccaccatcagctgtagagccagcgagagcgtggacaactacggcaacaccttcatgcactggtatcagcagaagcccggccagcctcctaagctgctgatctacagagccagcaacctggaaagcggcatccccgccagattttctggcagcggcagcagaaccgacttcaccctgaccatcaatcccgtggaagccgacgacgtggcaacctactactgccagcagagcaacgaggaccctcctacatttggagccggcaccaagctggaactgaaactcgagatccagaaccctgatcctgccgtgtaccagctgcgggatagcaagagcagcgacaagagcgtgtgtctgttcaccgacttcgacagccagaccaacgtgtcccagagcaaggactccgacgtgtacatcaccgataagtgcgtgctggacatgcggagcatggacttcaagagcaactccgccgtggcctggtccaacaagtccgatttcgcctgcgccaacgccttcaacaacagcattatccccgaggacacattcttcccaagccccgagagcagctgcggctttaccagcgagagctaccagcagggcgtgctgagcgccaccatcctgtacgagatcctgctgggcaaggccaccctgtacgccgtgctggtgtctgccctggtgctgatggctatggtcaagcggaaggacagccggggacgcgccaagagaagcggatctggcgtgaagcagaccctgaatttcgacctgctgaagctggctggcgacgtggaatccaacccaggccctactagtatggactggatttggcgcatccttttccttgtcggcgctgctaccggcgcgcattccgggccccagctccagctgcaagagtctggacctggcctggtcaagcctagcgagacactgagcctgacctgtaccgtgtccggcgatagcatcagcagcggcgattactactggggctggatcagacagcctcctggcaaaggactggaatggatcggccacatctactacagcggcgtgacctactacaaccccagcctgaagtccagagtgaccatcagcgtggacaccagccggaaccagttctccctgaagctgtctagcgtgacagccgccgataccgccgtgtactactgcaccagagaggacagcagcaactggcggagtagaggccagggaacactggtcacagttagctctggatccggcggaggcggaagtggaggcggaggatctggcggcggaggctctttcgaacagattcagctggtgcagtctggccccgagctgaagaaacctggcgagacagtgaagatcagctgcaaggccagcggctacatcttcaccaattacggcatgaactgggtcaagcaggcccctggcaagagcttcaagtggatgggctggatcaacacctacaccggcgagagcacatacagcgccgacttcaagggcagattcgccttcagcctggaaaccagcgccagcacagcctacctgcacatcaacgacctgaagaacgaggacaccgccacctacttttgcgccagaagcggcggctacgaccctatggattattggggccagggcaccagcgtgaccgtttcttctacgcgtgaggacctgaagaacgtgttcccacctgaggtggccgtgttcgagcctagcgaggccgagatcagccacacccagaaagccaccctcgtgtgcctggctaccggcttctaccccgaccatgtggaactgtcttggtgggtcaacggcaaagaggtgcacagcggcgtgtgtaccgacccccagccactgaaagaacagcccgccctgaacgacagccggtactgcctgagcagcagactgagagtgtccgccaccttctggcagaacccccggaaccacttcagatgccaggtgcagttctacggcctgagcgagaacgacgagtggacccaggacagagccaagcccgtgacccagatcgtgtctgccgaagcctggggcagagccgattgcgacgtgaagctggtggaaaagagcttcgagacagacaccaacctgaacttccagaacctgagcgtgatcggcttcagaatcctgctgctgaaagtggccggctttaacctgctgatgaccctgcggctgtggtccagc

SEQ ID NO: 4856 - DNA, 2691 bp, synthetic construct
  source 1..2691: mol_type = other DNA
atggccttaccagtgaccgccttgctcctgccgctggccttgctgctccacgccgccaggccggaagtgcagctggttgaatctggcggaggactggttcagcctggcggatctctgagactgtcttgtgccgccagcggcttcagcttcagcgacttttggatgagctgggtccgacaggcccctggcaaaggacttgaatgggtcgccacaatcagccaggccggcagcgagaaggactacgtggactctgtgaagggcagattcaccatcagccgggacaacgccaagaagtccctgtacctccagatgaacagcctgagagccgaggacaccgccgtgtactattgtgcctctggcgtgtacagcttcgactacagaggccagggcaccctggtcacagtctcttctggtaccggcggaggcggatctggcggcggaggtagcggtggcggaggatctgaattcgacgagatcgtgctgacacagagccctggcaccctgagcctgtctccaggcgaaagagccacactgagctgtcgggccagccagagcgtgtccaatacctacctggcctggtatcaccagaggcccggacaggctccccggctgctgatctatggcgcttctagcagagccaccggcatccccgatagattcagcggctctggcagcggcaccgacttcgccctgacaatcagctccctggaacccgaggacttcgccgtgtactactgccagcagtacagcaactcctggaccttcggccagggcaccaaggtggaaatcaagagactcgagatccagaaccctgatcctgccgtgtaccagctgcgggatagcaagagcagcgacaagagcgtgtgtctgttcaccgacttcgacagccagaccaacgtgtcccagagcaaggactccgacgtgtacatcaccgataagtgcgtgctggacatgcggagcatggacttcaagagcaactccgccgtggcctggtccaacaagtccgatttcgcctgcgccaacgccttcaacaacagcattatccccgaggacacattcttcccaagccccgagagcagctgcggctttaccagcgagagctaccagcagggcgtgctgagcgccaccatcctgtacgagatcctgctgggcaaggccaccctgtacgccgtgctggtgtctgccctggtgctgatggctatggtcaagcggaaggacagccggggacgcgccaagagaagcggatctggcgtgaagcagaccctgaatttcgacctgctgaagctggctggcgacgtggaatccaacccaggccctactagtatggactggatttggcgcatccttttccttgtcggcgctgctaccggcgcgcattccgggccccagctccagctgcaagagtctggacctggcctggtcaagcctagcgagacactgagcctgacctgtaccgtgtccggcgatagcatcagcagcggcgattactactggggctggatcagacagcctcctggcaaaggactggaatggatcggccacatctactacagcggcgtgacctactacaaccccagcctgaagtccagagtgaccatcagcgtggacaccagccggaaccagttctccctgaagctgtctagcgtgacagccgccgataccgccgtgtactactgcaccagagaggacagcagcaactggcggagtagaggccagggaacactggtcacagttagctctggatccggcggaggcggaagtggaggcggaggatctggcggcggaggctctttcgaacaggtgcaactggtggaatctggcgggggagtggtgcagcctggcagaagcctgagactgtcttgtgccgccagcggcttcaccttcagcagctacgacatgcactgggtgcgccaggcccctggcaaaggactggaatgggtggccgtgatctcctacgacggcaccaacgagtattacgccgacagcgtgaagggccggttcaccatctccagagacaccagcaagaacaccctgtacctccagatgaacagcctgcgggccgaggacacagccgtgtattattgcgccagagagcggtacttcgactggtccttcgactactggggccagggaaccctggtgtccgtgtctagtacgcgtgaggacctgaagaacgtgttcccacctgaggtggccgtgttcgagcctagcgaggccgagatcagccacacccagaaagccaccctcgtgtgcctggctaccggcttctaccccgaccatgtggaactgtcttggtgggtcaacggcaaagaggtgcacagcggcgtgtgtaccgacccccagccactgaaagaacagcccgccctgaacgacagccggtactgcctgagcagcagactgagagtgtccgccaccttctggcagaacccccggaaccacttcagatgccaggtgcagttctacggcctgagcgagaacgacgagtggacccaggacagagccaagcccgtgacccagatcgtgtctgccgaagcctggggcagagccgattgcgacgtgaagctggtggaaaagagcttcgagacagacaccaacctgaacttccagaacctgagcgtgatcggcttcagaatcctgctgctgaaagtggccggctttaacctgctgatgaccctgcggctgtggtccagc

SEQ ID NO: 4857 - DNA, 2688 bp, synthetic construct
  source 1..2688: mol_type = other DNA
atggccttaccagtgaccgccttgctcctgccgctggccttgctgctccacgccgccaggccggaagtgcagctggttgaatctggcggaggactggttcagcctggcggatctctgagactgtcttgtgccgccagcggcttcagcttcagcgacttttggatgagctgggtccgacaggcccctggcaaaggacttgaatgggtcgccacaatcagccaggccggcagcgagaaggactacgtggactctgtgaagggcagattcaccatcagccgggacaacgccaagaagtccctgtacctccagatgaacagcctgagagccgaggacaccgccgtgtactattgtgcctctggcgtgtacagcttcgactacagaggccagggcaccctggtcacagtctcttctggtaccggcggaggcggatctggcggcggaggtagcggtggcggaggatctgaattcgacgagctgacacaggaccctgctgtgtctgttgccctgggccagacagtgcggattacctgtcaaggcgacagcctgagaagcaactacgccaactggtatcagcagaagcccggacaggctcccgtgctggttatctacggccagaacaacagacccagcggcatccccgatagattcagcggctctagctctggcaataccgccagcctgacaatcactggcgctcaggctgccgatgaggccgactactactgcgatagcagagtgtccaccggcaatcacgtggtgtttggcggcggaacaaagctgacagtgctcggacaactcgagatccagaaccctgatcctgccgtgtaccagctgcgggatagcaagagcagcgacaagagcgtgtgtctgttcaccgacttcgacagccagaccaacgtgtcccagagcaaggactccgacgtgtacatcaccgataagtgcgtgctggacatgcggagcatggacttcaagagcaactccgccgtggcctggtccaacaagtccgatttcgcctgcgccaacgccttcaacaacagcattatccccgaggacacattcttcccaagccccgagagcagctgcggctttaccagcgagagctaccagcagggcgtgctgagcgccaccatcctgtacgagatcctgctgggcaaggccaccctgtacgccgtgctggtgtctgccctggtgctgatggctatggtcaagcggaaggacagccggggacgcgccaagagaagcggatctggcgtgaagcagaccctgaatttcgacctgctgaagctggctggcgacgtggaatccaacccaggccctactagtatggactggatttggcgcatccttttccttgtcggcgctgctaccggcgcgcattccgggccccagctccagctgcaagagtctggacctggcctggtcaagcctagcgagacactgagcctgacctgtaccgtgtccggcgatagcatcagcagcggcgattactactggggctggatcagacagcctcctggcaaaggactggaatggatcggccacatctactacagcggcgtgacctactacaaccccagcctgaagtccagagtgaccatcagcgtggacaccagccggaaccagttctccctgaagctgtctagcgtgacagccgccgataccgccgtgtactactgcaccagagaggacagcagcaactggcggagtagaggccagggaacactggtcacagttagctctggatccggcggaggcggaagtggaggcggaggatctggcggcggaggctctttcgaagaagttcagctggtgcagagcggagccgaagtgaagaaacctggggcctctgtgaaggtgtcctgcaaggcttccggctacacctttaccagctacgccatgcactgggtccgacaggcacctggacaacggcttgaatggatgggctggatcaacgccggcaacggcaacaccaagtacagccagaaattccagggccgcgtgaccatcaccagagatacaagcgccagcaccgcctacatggaactgtctagcctgagatccgaggacaccgccgtgtactactgtgccagagacatcagctacggcagcttcgactattggggccagggcacactggtcaccgttagctctacgcgtgaggacctgaagaacgtgttcccacctgaggtggccgtgttcgagcctagcgaggccgagatcagccacacccagaaagccaccctcgtgtgcctggctaccggcttctaccccgaccatgtggaactgtcttggtgggtcaacggcaaagaggtgcacagcggcgtgtgtaccgacccccagccactgaaagaacagcccgccctgaacgacagccggtactgcctgagcagcagactgagagtgtccgccaccttctggcagaacccccggaaccacttcagatgccaggtgcagttctacggcctgagcgagaacgacgagtggacccaggacagagccaagcccgtgacccagatcgtgtctgccgaagcctggggcagagccgattgcgacgtgaagctggtggaaaagagcttcgagacagacaccaacctgaacttccagaacctgagcgtgatcggcttcagaatcctgctgctgaaagtggccggctttaacctgctgatgaccctgcggctgtggtccagc

SEQ ID NO: 4858 - DNA, 2694 bp, synthetic construct
  source 1..2694: mol_type = other DNA
atggccttaccagtgaccgccttgctcctgccgctggccttgctgctccacgccgccaggccggaagtgcagctggttgaatctggcggaggactggttcagcctggcggatctctgagactgtcttgtgccgccagcggcttcagcttcagcgacttttggatgagctgggtccgacaggcccctggcaaaggacttgaatgggtcgccacaatcagccaggccggcagcgagaaggactacgtggactctgtgaagggcagattcaccatcagccgggacaacgccaagaagtccctgtacctccagatgaacagcctgagagccgaggacaccgccgtgtactattgtgcctctggcgtgtacagcttcgactacagaggccagggcaccctggtcacagtctcttctggtaccggcggaggcggatctggcggcggaggtagcggtggcggaggatctgaattcgacgacatcgtgctgacacagacaccagccacactgagcgtgacacctggcgattctgtgtccctgagctgtagagccagccagagcatcagcaacaacctgcactggtatcagcagaagtcccacgagagccccagactgctgattaagaacgccagccagtctatcagcggcatccccagcaagtttagcggctctggcagcggcaccgacttcaccctgagaatcaacagcgtggaaaccgaggacttcgggatgtacttctgccagcagagcaatagctggccctacacatttggctccggcaccaagctggaaatcaaactcgagatccagaaccctgatcctgccgtgtaccagctgcgggatagcaagagcagcgacaagagcgtgtgtctgttcaccgacttcgacagccagaccaacgtgtcccagagcaaggactccgacgtgtacatcaccgataagtgcgtgctggacatgcggagcatggacttcaagagcaactccgccgtggcctggtccaacaagtccgatttcgcctgcgccaacgccttcaacaacagcattatccccgaggacacattcttcccaagccccgagagcagctgcggctttaccagcgagagctaccagcagggcgtgctgagcgccaccatcctgtacgagatcctgctgggcaaggccaccctgtacgccgtgctggtgtctgccctggtgctgatggctatggtcaagcggaaggacagccggggacgcgccaagagaagcggatctggcgtgaagcagaccctgaatttcgacctgctgaagctggctggcgacgtggaatccaacccaggccctactagtatggactggatttggcgcatccttttccttgtcggcgctgctaccggcgcgcattccgggccccagctccagctgcaagagtctggacctggcctggtcaagcctagcgagacactgagcctgacctgtaccgtgtccggcgatagcatcagcagcggcgattactactggggctggatcagacagcctcctggcaaaggactggaatggatcggccacatctactacagcggcgtgacctactacaaccccagcctgaagtccagagtgaccatcagcgtggacaccagccggaaccagttctccctgaagctgtctagcgtgacagccgccgataccgccgtgtactactgcaccagagaggacagcagcaactggcggagtagaggccagggaacactggtcacagttagctctggatccggcggaggcggaagtggaggcggaggatctggcggcggaggctctttcgaacaagtgaagctgcaacagagcggacccgagctggttaagccaggcgcttccgtgaagattagctgcaaggccagcggctacagcttcaccggctactacatgcactgggtcaagcagagccacggcaacatcctggactggatcggctacatctacccctacaacggcgtgtccagctacaaccagaagttcaagggcaaagccactctgaccgtggacaagagcagcagcaccgcctacatggaactgagaagcctgaccagcgaggacagcgccgtgtactattgtgccagagagcggggcctgtaccagctcagagcaatggattattggggccagggcaccagcgtgaccgtttcttctacgcgtgaggacctgaagaacgtgttcccacctgaggtggccgtgttcgagcctagcgaggccgagatcagccacacccagaaagccaccctcgtgtgcctggctaccggcttctaccccgaccatgtggaactgtcttggtgggtcaacggcaaagaggtgcacagcggcgtgtgtaccgacccccagccactgaaagaacagcccgccctgaacgacagccggtactgcctgagcagcagactgagagtgtccgccaccttctggcagaacccccggaaccacttcagatgccaggtgcagttctacggcctgagcgagaacgacgagtggacccaggacagagccaagcccgtgacccagatcgtgtctgccgaagcctggggcagagccgattgcgacgtgaagctggtggaaaagagcttcgagacagacaccaacctgaacttccagaacctgagcgtgatcggcttcagaatcctgctgctgaaagtggccggctttaacctgctgatgaccctgcggctgtggtccagc

SEQ ID NO: 4859 - DNA, 2667 bp, synthetic construct
  source 1..2667: mol_type = other DNA
atggccttaccagtgaccgccttgctcctgccgctggccttgctgctccacgccgccaggccggaagtgcagctggttgaatctggcggaggactggttcagcctggcggatctctgagactgtcttgtgccgccagcggcttcagcttcagcgacttttggatgagctgggtccgacaggcccctggcaaaggacttgaatgggtcgccacaatcagccaggccggcagcgagaaggactacgtggactctgtgaagggcagattcaccatcagccgggacaacgccaagaagtccctgtacctccagatgaacagcctgagagccgaggacaccgccgtgtactattgtgcctctggcgtgtacagcttcgactacagaggccagggcaccctggtcacagtctcttctggtaccggcggaggcggatctggcggcggaggtagcggtggcggaggatctgaattcgacgacatcgtgatgacacagacccctgccatcatgagcgcctctccaggccagaaagtgaccatcacatgtagcgccagcagcagcgtgaactacatgcactggtatcagcagaagctgggcagcagccccaagctgtggatctacgataccagcaaactggcccctggcgtgccagccagattttctggttctggcagcggcaccagctacagcctgacaatcagcagcatggaagccgaggatgccgccagctacttctgccatcagtggtctagctacccctacacctttggctccggcaccaagctggaaatcaaactcgagatccagaaccctgatcctgccgtgtaccagctgcgggatagcaagagcagcgacaagagcgtgtgtctgttcaccgacttcgacagccagaccaacgtgtcccagagcaaggactccgacgtgtacatcaccgataagtgcgtgctggacatgcggagcatggacttcaagagcaactccgccgtggcctggtccaacaagtccgatttcgcctgcgccaacgccttcaacaacagcattatccccgaggacacattcttcccaagccccgagagcagctgcggctttaccagcgagagctaccagcagggcgtgctgagcgccaccatcctgtacgagatcctgctgggcaaggccaccctgtacgccgtgctggtgtctgccctggtgctgatggctatggtcaagcggaaggacagccggggacgcgccaagagaagcggatctggcgtgaagcagaccctgaatttcgacctgctgaagctggctggcgacgtggaatccaacccaggccctactagtatggactggatttggcgcatccttttccttgtcggcgctgctaccggcgcgcattccgggccccagctccagctgcaagagtctggacctggcctggtcaagcctagcgagacactgagcctgacctgtaccgtgtccggcgatagcatcagcagcggcgattactactggggctggatcagacagcctcctggcaaaggactggaatggatcggccacatctactacagcggcgtgacctactacaaccccagcctgaagtccagagtgaccatcagcgtggacaccagccggaaccagttctccctgaagctgtctagcgtgacagccgccgataccgccgtgtactactgcaccagagaggacagcagcaactggcggagtagaggccagggaacactggtcacagttagctctggatccggcggaggcggaagtggaggcggaggatctggcggcggaggctctttcgaagaagttcagctccaagagtctggccccgacctggtcaagcctagccaaagcctgagcctgacctgtaccgtgaccggctacagcatcacaagcggctatggatggcactggatcagacagttccccggcaacaaactggaatggatgggctacatccactacagcggcagcaccacctacaatcccagcctgaagtcccggatcagcatcagcagagacaccagcaagaaccagttcttcctgcaactgaacagcgtgaccaccgaggacaccgccacctactattgtgctcggagcctgagatattggggccagggcacaaccctgaccgtgtcatctacgcgtgaggacctgaagaacgtgttcccacctgaggtggccgtgttcgagcctagcgaggccgagatcagccacacccagaaagccaccctcgtgtgcctggctaccggcttctaccccgaccatgtggaactgtcttggtgggtcaacggcaaagaggtgcacagcggcgtgtgtaccgacccccagccactgaaagaacagcccgccctgaacgacagccggtactgcctgagcagcagactgagagtgtccgccaccttctggcagaacccccggaaccacttcagatgccaggtgcagttctacggcctgagcgagaacgacgagtggacccaggacagagccaagcccgtgacccagatcgtgtctgccgaagcctggggcagagccgattgcgacgtgaagctggtggaaaagagcttcgagacagacaccaacctgaacttccagaacctgagcgtgatcggcttcagaatcctgctgctgaaagtggccggctttaacctgctgatgaccctgcggctgtggtccagc

SEQ ID NO: 4860 - DNA, 2676 bp, synthetic construct
  source 1..2676: mol_type = other DNA
atggccttaccagtgaccgccttgctcctgccgctggccttgctgctccacgccgccaggccggaagtgcagctggttgaatctggcggaggactggttcagcctggcggatctctgagactgtcttgtgccgccagcggcttcagcttcagcgacttttggatgagctgggtccgacaggcccctggcaaaggacttgaatgggtcgccacaatcagccaggccggcagcgagaaggactacgtggactctgtgaagggcagattcaccatcagccgggacaacgccaagaagtccctgtacctccagatgaacagcctgagagccgaggacaccgccgtgtactattgtgcctctggcgtgtacagcttcgactacagaggccagggcaccctggtcacagtctcttctggtaccggcggaggcggatctggcggcggaggtagcggtggcggaggatctgaattcgacgacatccagatgacacagagccctagcagcctgtctgccagcgtgggagacagagtgaccatcacctgtagcgccaccagcagcatcagctacatgcactggtatcagcagaagcccggcaaggcccctaaaggctggatctacgataccagcaaactggcccacggcgtgcccagcagattttctggttctggcagcggcaccgacttcaccctgacaatatctagcctccagcctgaggacttcgccacctactactgccaccagagaagaagctaccccttcaccttcggccagggcaccaaggtggaaatcaaactcgagatccagaaccctgatcctgccgtgtaccagctgcgggatagcaagagcagcgacaagagcgtgtgtctgttcaccgacttcgacagccagaccaacgtgtcccagagcaaggactccgacgtgtacatcaccgataagtgcgtgctggacatgcggagcatggacttcaagagcaactccgccgtggcctggtccaacaagtccgatttcgcctgcgccaacgccttcaacaacagcattatccccgaggacacattcttcccaagccccgagagcagctgcggctttaccagcgagagctaccagcagggcgtgctgagcgccaccatcctgtacgagatcctgctgggcaaggccaccctgtacgccgtgctggtgtctgccctggtgctgatggctatggtcaagcggaaggacagccggggacgcgccaagagaagcggatctggcgtgaagcagaccctgaatttcgacctgctgaagctggctggcgacgtggaatccaacccaggccctactagtatggactggatttggcgcatccttttccttgtcggcgctgctaccggcgcgcattccgggccccagctccagctgcaagagtctggacctggcctggtcaagcctagcgagacactgagcctgacctgtaccgtgtccggcgatagcatcagcagcggcgattactactggggctggatcagacagcctcctggcaaaggactggaatggatcggccacatctactacagcggcgtgacctactacaaccccagcctgaagtccagagtgaccatcagcgtggacaccagccggaaccagttctccctgaagctgtctagcgtgacagccgccgataccgccgtgtactactgcaccagagaggacagcagcaactggcggagtagaggccagggaacactggtcacagttagctctggatccggcggaggcggaagtggaggcggaggatctggcggcggaggctctttcgaagaagtgcaactggttcagagcggagccgaagtgaagaaacctggggcctctgtgaaggtgtcctgcaaggcttccggctacacctttaccaatttctggattcactgggtccgacaggctccaggccaaggactggaatggatcggagagatcgaccccagcgacagctacaccaactacaaccagaaattcaaaggccgggtcaccatcaccagagacaccagcacaagcaccgcctacctggaactgagcagcctgagaagcgaggacaccgccgtgtactactgcgccagggaaatcaccaccgtggattattggggccagggaaccctggtcaccgtgtcatctacgcgtgaggacctgaagaacgtgttcccacctgaggtggccgtgttcgagcctagcgaggccgagatcagccacacccagaaagccaccctcgtgtgcctggctaccggcttctaccccgaccatgtggaactgtcttggtgggtcaacggcaaagaggtgcacagcggcgtgtgtaccgacccccagccactgaaagaacagcccgccctgaacgacagccggtactgcctgagcagcagactgagagtgtccgccaccttctggcagaacccccggaaccacttcagatgccaggtgcagttctacggcctgagcgagaacgacgagtggacccaggacagagccaagcccgtgacccagatcgtgtctgccgaagcctggggcagagccgattgcgacgtgaagctggtggaaaagagcttcgagacagacaccaacctgaacttccagaacctgagcgtgatcggcttcagaatcctgctgctgaaagtggccggctttaacctgctgatgaccctgcggctgtggtccagc

SEQ ID NO: 4861 - DNA, 2697 bp, synthetic construct
  source 1..2697: mol_type = other DNA
atggccttaccagtgaccgccttgctcctgccgctggccttgctgctccacgccgccaggccggaagtgcagctggttgaatctggcggaggactggttcagcctggcggatctctgagactgtcttgtgccgccagcggcttcagcttcagcgacttttggatgagctgggtccgacaggcccctggcaaaggacttgaatgggtcgccacaatcagccaggccggcagcgagaaggactacgtggactctgtgaagggcagattcaccatcagccgggacaacgccaagaagtccctgtacctccagatgaacagcctgagagccgaggacaccgccgtgtactattgtgcctctggcgtgtacagcttcgactacagaggccagggcaccctggtcacagtctcttctggtaccggcggaggcggatctggcggcggaggtagcggtggcggaggatctgaattcgacgacatccagatgacacagagccctagcagcctgtctgccagcgtgggagacagagtgaccatcacatgcaaggccagccagggcttcaacaaatacgtggcctggtatcagcagaagcccggcaaggctcctaagctgctgatctactacaccagcacactccagcctggcgtgcccagcagattttctggctctggcagcggcagagactacaccctgacaatatccagcctccagccagaggacttcgccacctactactgtctccagtacggcaacctgctgtacgcctttggacagggcaccaaggtggaaatcaagagactcgagatccagaaccctgatcctgccgtgtaccagctgcgggatagcaagagcagcgacaagagcgtgtgtctgttcaccgacttcgacagccagaccaacgtgtcccagagcaaggactccgacgtgtacatcaccgataagtgcgtgctggacatgcggagcatggacttcaagagcaactccgccgtggcctggtccaacaagtccgatttcgcctgcgccaacgccttcaacaacagcattatccccgaggacacattcttcccaagccccgagagcagctgcggctttaccagcgagagctaccagcagggcgtgctgagcgccaccatcctgtacgagatcctgctgggcaaggccaccctgtacgccgtgctggtgtctgccctggtgctgatggctatggtcaagcggaaggacagccggggacgcgccaagagaagcggatctggcgtgaagcagaccctgaatttcgacctgctgaagctggctggcgacgtggaatccaacccaggccctactagtatggactggatttggcgcatccttttccttgtcggcgctgctaccggcgcgcattccgggccccagctccagctgcaagagtctggacctggcctggtcaagcctagcgagacactgagcctgacctgtaccgtgtccggcgatagcatcagcagcggcgattactactggggctggatcagacagcctcctggcaaaggactggaatggatcggccacatctactacagcggcgtgacctactacaaccccagcctgaagtccagagtgaccatcagcgtggacaccagccggaaccagttctccctgaagctgtctagcgtgacagccgccgataccgccgtgtactactgcaccagagaggacagcagcaactggcggagtagaggccagggaacactggtcacagttagctctggatccggcggaggcggaagtggaggcggaggatctggcggcggaggctctttcgaagaagttcagcttgtgcagagcggagccgaagtgaagaaacctggggcctctgtgaaggtgtcctgcaaagccagcggctacacctttaccagctactggatcggctgggtccgacaggctcctggacaaggactggaatggatcggcgacatctatcccggcggaggctacaccaactacaacgagaagttcaagggccgcgtgacaatcaccagagacacctctacaagcaccgcctacctggaactgagcagcctgagaagcgaggacaccgccgtgtactactgcgccagactggatggcagcagctacagaggcgctatggattcttggggccagggcacactggtcaccgtttcttctacgcgtgaggacctgaagaacgtgttcccacctgaggtggccgtgttcgagcctagcgaggccgagatcagccacacccagaaagccaccctcgtgtgcctggctaccggcttctaccccgaccatgtggaactgtcttggtgggtcaacggcaaagaggtgcacagcggcgtgtgtaccgacccccagccactgaaagaacagcccgccctgaacgacagccggtactgcctgagcagcagactgagagtgtccgccaccttctggcagaacccccggaaccacttcagatgccaggtgcagttctacggcctgagcgagaacgacgagtggacccaggacagagccaagcccgtgacccagatcgtgtctgccgaagcctggggcagagccgattgcgacgtgaagctggtggaaaagagcttcgagacagacaccaacctgaacttccagaacctgagcgtgatcggcttcagaatcctgctgctgaaagtggccggctttaacctgctgatgaccctgcggctgtggtccagc

SEQ ID NO: 4862 - DNA, 2685 bp, synthetic construct
  source 1..2685: mol_type = other DNA
atggccttaccagtgaccgccttgctcctgccgctggccttgctgctccacgccgccaggccggaagtgcagctggttgaatctggcggaggactggttcagcctggcggatctctgagactgtcttgtgccgccagcggcttcagcttcagcgacttttggatgagctgggtccgacaggcccctggcaaaggacttgaatgggtcgccacaatcagccaggccggcagcgagaaggactacgtggactctgtgaagggcagattcaccatcagccgggacaacgccaagaagtccctgtacctccagatgaacagcctgagagccgaggacaccgccgtgtactattgtgcctctggcgtgtacagcttcgactacagaggccagggcaccctggtcacagtctcttctggtaccggcggaggcggatctggcggcggaggtagcggtggcggaggatctgaattcgacgacatccagatgacacagagccctagcagcctgtctgccagcgtgggagacagagtgaccatcacctgtagagccagccaggacatccggtactacctgaactggtatcagcagaagcccggcaaggcccctaagctgctgatctatgtggcctccagcctccagagcggagtgccttctagattttctggcagcggctccggcaccgagtttaccctgacagtgtctagcttgcagcccgaggacttcgccacctactactgcctgcaagtgtacagcacccctcggacctttggacagggcaccaaggtggaaatcaaactcgagatccagaaccctgatcctgccgtgtaccagctgcgggatagcaagagcagcgacaagagcgtgtgtctgttcaccgacttcgacagccagaccaacgtgtcccagagcaaggactccgacgtgtacatcaccgataagtgcgtgctggacatgcggagcatggacttcaagagcaactccgccgtggcctggtccaacaagtccgatttcgcctgcgccaacgccttcaacaacagcattatccccgaggacacattcttcccaagccccgagagcagctgcggctttaccagcgagagctaccagcagggcgtgctgagcgccaccatcctgtacgagatcctgctgggcaaggccaccctgtacgccgtgctggtgtctgccctggtgctgatggctatggtcaagcggaaggacagccggggacgcgccaagagaagcggatctggcgtgaagcagaccctgaatttcgacctgctgaagctggctggcgacgtggaatccaacccaggccctactagtatggactggatttggcgcatccttttccttgtcggcgctgctaccggcgcgcattccgggccccagctccagctgcaagagtctggacctggcctggtcaagcctagcgagacactgagcctgacctgtaccgtgtccggcgatagcatcagcagcggcgattactactggggctggatcagacagcctcctggcaaaggactggaatggatcggccacatctactacagcggcgtgacctactacaaccccagcctgaagtccagagtgaccatcagcgtggacaccagccggaaccagttctccctgaagctgtctagcgtgacagccgccgataccgccgtgtactactgcaccagagaggacagcagcaactggcggagtagaggccagggaacactggtcacagttagctctggatccggcggaggcggaagtggaggcggaggatctggcggcggaggctctttcgaagaagtgcagcttgttgaatctggcggcggactggctaagcctggcggatctctgagactgtcttgtgccgccagcggcttccggttcaccttcaacaactactacatggactgggtccgacaggcccctggacaaggacttgaatgggtgtccagaatcagcagcagcggcgaccctacttggtacgccgattctgtgaagggcagattcaccatcagcagagagaacgccaagaacaccctgttcctccagatgaactccctgagagccgaggacaccgccgtgtactattgtgcctctctgaccaccggcagcgattcttggggacagggcgtgctggttaccgtgtcatctacgcgtgaggacctgaagaacgtgttcccacctgaggtggccgtgttcgagcctagcgaggccgagatcagccacacccagaaagccaccctcgtgtgcctggctaccggcttctaccccgaccatgtggaactgtcttggtgggtcaacggcaaagaggtgcacagcggcgtgtgtaccgacccccagccactgaaagaacagcccgccctgaacgacagccggtactgcctgagcagcagactgagagtgtccgccaccttctggcagaacccccggaaccacttcagatgccaggtgcagttctacggcctgagcgagaacgacgagtggacccaggacagagccaagcccgtgacccagatcgtgtctgccgaagcctggggcagagccgattgcgacgtgaagctggtggaaaagagcttcgagacagacaccaacctgaacttccagaacctgagcgtgatcggcttcagaatcctgctgctgaaagtggccggctttaacctgctgatgaccctgcggctgtggtccagc

SEQ ID NO: 4863 - DNA, 2685 bp, synthetic construct
  source 1..2685: mol_type = other DNA
atggccttaccagtgaccgccttgctcctgccgctggccttgctgctccacgccgccaggccggaagtgcagctggttgaatctggcggaggactggttcagcctggcggatctctgagactgtcttgtgccgccagcggcttcagcttcagcgacttttggatgagctgggtccgacaggcccctggcaaaggacttgaatgggtcgccacaatcagccaggccggcagcgagaaggactacgtggactctgtgaagggcagattcaccatcagccgggacaacgccaagaagtccctgtacctccagatgaacagcctgagagccgaggacaccgccgtgtactattgtgcctctggcgtgtacagcttcgactacagaggccagggcaccctggtcacagtctcttctggtaccggcggaggcggatctggcggcggaggtagcggtggcggaggatctgaattcgagatcgtgatgacacagagccccgccacactgagtgtgtctccaggcgaaagagccacactgtcctgtagagccagccagagcgtgtccagaaacctggcctggtatcagcagaagcctggacaggctccccggctgttgatctacggcgcttctacaagagccaccggcattcccgccagattttctggctctggcagcggcaccgagttcaccctgacaatcggaagcctccagagcgaggacttcgccgtgtactactgccagcagtacaagacctggcctcggacctttggacagggcaccaacgtggaaatcaaactcgagatccagaaccctgatcctgccgtgtaccagctgcgggatagcaagagcagcgacaagagcgtgtgtctgttcaccgacttcgacagccagaccaacgtgtcccagagcaaggactccgacgtgtacatcaccgataagtgcgtgctggacatgcggagcatggacttcaagagcaactccgccgtggcctggtccaacaagtccgatttcgcctgcgccaacgccttcaacaacagcattatccccgaggacacattcttcccaagccccgagagcagctgcggctttaccagcgagagctaccagcagggcgtgctgagcgccaccatcctgtacgagatcctgctgggcaaggccaccctgtacgccgtgctggtgtctgccctggtgctgatggctatggtcaagcggaaggacagccggggacgcgccaagagaagcggatctggcgtgaagcagaccctgaatttcgacctgctgaagctggctggcgacgtggaatccaacccaggccctactagtatggactggatttggcgcatccttttccttgtcggcgctgctaccggcgcgcattccgggccccagctccagctgcaagagtctggacctggcctggtcaagcctagcgagacactgagcctgacctgtaccgtgtccggcgatagcatcagcagcggcgattactactggggctggatcagacagcctcctggcaaaggactggaatggatcggccacatctactacagcggcgtgacctactacaaccccagcctgaagtccagagtgaccatcagcgtggacaccagccggaaccagttctccctgaagctgtctagcgtgacagccgccgataccgccgtgtactactgcaccagagaggacagcagcaactggcggagtagaggccagggaacactggtcacagttagctctggatccggcggaggcggaagtggaggcggaggatctggcggcggaggctctttcgaacaagttcagctgcaacaatggggagccggcctgctgaagcctagcgaaacactgtctctgacctgcgccgtgttcggcggctctttcagcggctactactggtcctggatcagacagcctcctggcaaaggactggaatggatcggcgagatcaaccaccggggcaacaccaacgacaaccccagcctgaaaagcagagtgaccatcagcgtggacaccagcaagaaccagttcgccctgaagctgagcagcgtgacagccgctgataccgccgtgtattattgcgccagagagcggggctacacctacggcaatttcgatcactggggccagggcaccctggtcacagtttcttctacgcgtgaggacctgaagaacgtgttcccacctgaggtggccgtgttcgagcctagcgaggccgagatcagccacacccagaaagccaccctcgtgtgcctggctaccggcttctaccccgaccatgtggaactgtcttggtgggtcaacggcaaagaggtgcacagcggcgtgtgtaccgacccccagccactgaaagaacagcccgccctgaacgacagccggtactgcctgagcagcagactgagagtgtccgccaccttctggcagaacccccggaaccacttcagatgccaggtgcagttctacggcctgagcgagaacgacgagtggacccaggacagagccaagcccgtgacccagatcgtgtctgccgaagcctggggcagagccgattgcgacgtgaagctggtggaaaagagcttcgagacagacaccaacctgaacttccagaacctgagcgtgatcggcttcagaatcctgctgctgaaagtggccggctttaacctgctgatgaccctgcggctgtggtccagc

SEQ ID NO: 4864 - DNA, 2688 bp, synthetic construct
  source 1..2688: mol_type = other DNA
atggccttaccagtgaccgccttgctcctgccgctggccttgctgctccacgccgccaggccggaagtgcagctggttgaatctggcggaggactggttcagcctggcggatctctgagactgtcttgtgccgccagcggcttcagcttcagcgacttttggatgagctgggtccgacaggcccctggcaaaggacttgaatgggtcgccacaatcagccaggccggcagcgagaaggactacgtggactctgtgaagggcagattcaccatcagccgggacaacgccaagaagtccctgtacctccagatgaacagcctgagagccgaggacaccgccgtgtactattgtgcctctggcgtgtacagcttcgactacagaggccagggcaccctggtcacagtctcttctggtaccggcggaggcggatctggcggcggaggtagcggtggcggaggatctgaattcgagatcgtgatgacccctagcagcgccacactgagtgtgtctccaggcgaaagagccacactgtcctgtagagccagccagagcgtgtccagaaacctggcctggtatcagcagaagcctggacaggctccccggctgttgatctacggcgcttctacaagagccaccggcattcccgccagattttctggctctggcagcggcaccgagttcaccctgacaatctctagcctccagagcgaggacttcgccgtgtactactgccaccagtacagcaactggatgtgcagcttcggccagggcaccaagctggaaatcaaactcgagatccagaaccctgatcctgccgtgtaccagctgcgggatagcaagagcagcgacaagagcgtgtgtctgttcaccgacttcgacagccagaccaacgtgtcccagagcaaggactccgacgtgtacatcaccgataagtgcgtgctggacatgcggagcatggacttcaagagcaactccgccgtggcctggtccaacaagtccgatttcgcctgcgccaacgccttcaacaacagcattatccccgaggacacattcttcccaagccccgagagcagctgcggctttaccagcgagagctaccagcagggcgtgctgagcgccaccatcctgtacgagatcctgctgggcaaggccaccctgtacgccgtgctggtgtctgccctggtgctgatggctatggtcaagcggaaggacagccggggacgcgccaagagaagcggatctggcgtgaagcagaccctgaatttcgacctgctgaagctggctggcgacgtggaatccaacccaggccctactagtatggactggatttggcgcatccttttccttgtcggcgctgctaccggcgcgcattccgggccccagctccagctgcaagagtctggacctggcctggtcaagcctagcgagacactgagcctgacctgtaccgtgtccggcgatagcatcagcagcggcgattactactggggctggatcagacagcctcctggcaaaggactggaatggatcggccacatctactacagcggcgtgacctactacaaccccagcctgaagtccagagtgaccatcagcgtggacaccagccggaaccagttctccctgaagctgtctagcgtgacagccgccgataccgccgtgtactactgcaccagagaggacagcagcaactggcggagtagaggccagggaacactggtcacagttagctctggatccggcggaggcggaagtggaggcggaggatctggcggcggaggctctttcgaagaagttcagctccttgagtcaggtggcggcctggttcaacctggcggatctctgagactgagctgtgccgccagcggcttcacctttagcagatacgccatgaactgggtccgacaggcccctggcaaaggactggaatgggtgtccggcatctctggaagcggcggcagaacctactacgccgattctgtgaagggcagattcaccatcagccgggacaacagcaagaacaccctgtacctccagatgaacagcctgagagccgaggacacagccgtgtattattgcgccaaggaccgggacttttggagcggcccttttgactattggggccagggaaccctggtcaccgttagctctacgcgtgaggacctgaagaacgtgttcccacctgaggtggccgtgttcgagcctagcgaggccgagatcagccacacccagaaagccaccctcgtgtgcctggctaccggcttctaccccgaccatgtggaactgtcttggtgggtcaacggcaaagaggtgcacagcggcgtgtgtaccgacccccagccactgaaagaacagcccgccctgaacgacagccggtactgcctgagcagcagactgagagtgtccgccaccttctggcagaacccccggaaccacttcagatgccaggtgcagttctacggcctgagcgagaacgacgagtggacccaggacagagccaagcccgtgacccagatcgtgtctgccgaagcctggggcagagccgattgcgacgtgaagctggtggaaaagagcttcgagacagacaccaacctgaacttccagaacctgagcgtgatcggcttcagaatcctgctgctgaaagtggccggctttaacctgctgatgaccctgcggctgtggtccagc

SEQ ID NO: 4865 - DNA, 2703 bp, synthetic construct
  source 1..2703: mol_type = other DNA
atggccttaccagtgaccgccttgctcctgccgctggccttgctgctccacgccgccaggccggaagtgcagctggttgaatctggcggaggactggttcagcctggcggatctctgagactgtcttgtgccgccagcggcttcagcttcagcgacttttggatgagctgggtccgacaggcccctggcaaaggacttgaatgggtcgccacaatcagccaggccggcagcgagaaggactacgtggactctgtgaagggcagattcaccatcagccgggacaacgccaagaagtccctgtacctccagatgaacagcctgagagccgaggacaccgccgtgtactattgtgcctctggcgtgtacagcttcgactacagaggccagggcaccctggtcacagtctcttctggtaccggcggaggcggatctggcggcggaggtagcggtggcggaggatctgaattcgacatccagatgacccagagccccagcagcctgtctgccagcgtgggcgacagagtgaccatcacatgcaaggccagcaagaacatcagaagctacctggcctggtatcagcagaagcccggcaaggcccccaagctgctgatctacagcggcagcacactgcacagcggcgtgcccagcagattttccggctctggcagcggcaccgacttcaccctgaccatctctagcctccagcccgaggacttcgccacctactactgccagcagcaccacgagtaccccctgacattcggccagggcaccaaggtggaaatcaagagactcgagatccagaaccctgatcctgccgtgtaccagctgcgggatagcaagagcagcgacaagagcgtgtgtctgttcaccgacttcgacagccagaccaacgtgtcccagagcaaggactccgacgtgtacatcaccgataagtgcgtgctggacatgcggagcatggacttcaagagcaactccgccgtggcctggtccaacaagtccgatttcgcctgcgccaacgccttcaacaacagcattatccccgaggacacattcttcccaagccccgagagcagctgcggctttaccagcgagagctaccagcagggcgtgctgagcgccaccatcctgtacgagatcctgctgggcaaggccaccctgtacgccgtgctggtgtctgccctggtgctgatggctatggtcaagcggaaggacagccggggacgcgccaagagaagcggatctggcgtgaagcagaccctgaatttcgacctgctgaagctggctggcgacgtggaatccaacccaggccctactagtatggactggatttggcgcatccttttccttgtcggcgctgctaccggcgcgcattccgggccccagctccagctgcaagagtctggacctggcctggtcaagcctagcgagacactgagcctgacctgtaccgtgtccggcgatagcatcagcagcggcgattactactggggctggatcagacagcctcctggcaaaggactggaatggatcggccacatctactacagcggcgtgacctactacaaccccagcctgaagtccagagtgaccatcagcgtggacaccagccggaaccagttctccctgaagctgtctagcgtgacagccgccgataccgccgtgtactactgcaccagagaggacagcagcaactggcggagtagaggccagggaacactggtcacagttagctctggatccggcggaggcggaagtggaggcggaggatctggcggcggaggctctttcgaacaggtgcaactccaggaatctggccccggactcgtgaagcccagcgagacactgagcctgacctgtaccgtgtccggctacaccatcaccagcggctacgactggtcctggatcagacagcctcctggcaagggcctggaatggatcggctacatcaactacggcggctccaccaactacaagcccagcctgggaagccgcgtgacaatcagcgtggacacctccaagaaccagttcagcctgaagctgagcagcgtgacagccgccgataccgccgtgtactactgcgcccggtacaacgagtacaagagctacatctacgattggtacttcgacttctggggccagggaaccctcgtgaccgtgtctagtacgcgtgaggacctgaagaacgtgttcccacctgaggtggccgtgttcgagcctagcgaggccgagatcagccacacccagaaagccaccctcgtgtgcctggctaccggcttctaccccgaccatgtggaactgtcttggtgggtcaacggcaaagaggtgcacagcggcgtgtgtaccgacccccagccactgaaagaacagcccgccctgaacgacagccggtactgcctgagcagcagactgagagtgtccgccaccttctggcagaacccccggaaccacttcagatgccaggtgcagttctacggcctgagcgagaacgacgagtggacccaggacagagccaagcccgtgacccagatcgtgtctgccgaagcctggggcagagccgattgcgacgtgaagctggtggaaaagagcttcgagacagacaccaacctgaacttccagaacctgagcgtgatcggcttcagaatcctgctgctgaaagtggccggctttaacctgctgatgaccctgcggctgtggtccagc

SEQ ID NO: 4866 - DNA, 2709 bp, synthetic construct
  source 1..2709: mol_type = other DNA
atggccttaccagtgaccgccttgctcctgccgctggccttgctgctccacgccgccaggccggaagtgcagctggttgaatctggcggaggactggttcagcctggcggatctctgagactgtcttgtgccgccagcggcttcagcttcagcgacttttggatgagctgggtccgacaggcccctggcaaaggacttgaatgggtcgccacaatcagccaggccggcagcgagaaggactacgtggactctgtgaagggcagattcaccatcagccgggacaacgccaagaagtccctgtacctccagatgaacagcctgagagccgaggacaccgccgtgtactattgtgcctctggcgtgtacagcttcgactacagaggccagggcaccctggtcacagtctcttctggtaccggcggaggcggatctggcggcggaggtagcggtggcggaggatctgaattccagtctgtggtcacacagcctccatccgtgtctgctgcccctggacagaaagtgaccatctcctgtagcggcagcagcagcaacatcggcaacaactacgtgtcctggtatcagcagctccccggcacagctcccaaactgctgatctacgacaacaacaagcggcccagcggcatccccgatagattttctggcagcaagagcggcaccagcgccacactgggaattaccggacttcagacaggcgacgaggccgactactactgtggcacatgggatggcagcctgtacaccatgcttttcggcggaggcaccaagctgacagtgcttctcgagatccagaaccctgatcctgccgtgtaccagctgcgggatagcaagagcagcgacaagagcgtgtgtctgttcaccgacttcgacagccagaccaacgtgtcccagagcaaggactccgacgtgtacatcaccgataagtgcgtgctggacatgcggagcatggacttcaagagcaactccgccgtggcctggtccaacaagtccgatttcgcctgcgccaacgccttcaacaacagcattatccccgaggacacattcttcccaagccccgagagcagctgcggctttaccagcgagagctaccagcagggcgtgctgagcgccaccatcctgtacgagatcctgctgggcaaggccaccctgtacgccgtgctggtgtctgccctggtgctgatggctatggtcaagcggaaggacagccggggacgcgccaagagaagcggatctggcgtgaagcagaccctgaatttcgacctgctgaagctggctggcgacgtggaatccaacccaggccctactagtatggactggatttggcgcatccttttccttgtcggcgctgctaccggcgcgcattccgggccccagctccagctgcaagagtctggacctggcctggtcaagcctagcgagacactgagcctgacctgtaccgtgtccggcgatagcatcagcagcggcgattactactggggctggatcagacagcctcctggcaaaggactggaatggatcggccacatctactacagcggcgtgacctactacaaccccagcctgaagtccagagtgaccatcagcgtggacaccagccggaaccagttctccctgaagctgtctagcgtgacagccgccgataccgccgtgtactactgcaccagagaggacagcagcaactggcggagtagaggccagggaacactggtcacagttagctctggatccggcggaggcggaagtggaggcggaggatctggcggcggaggctctttcgaagaagtgcaactggtggaatctggcggcggactggttaagcctggcggatctctgagactgtcttgtgccgccagcggcttcaccttcagcaatgcctggatgagctgggttcgacaggcccctggaaaaggactggaatgggtcggattcatccggtccaaagcctacggcggcaccacagaatatgccgcctctgtgaagggcagattcaccatcagccgggacgacagcaagtctatcgcctacctccagatgaacaacctgaaaaccgaggacaccgccgtgtactactgcgccagagatggcctgtacagcagctcttggtacgacagcgattactggggccagggcacactggtcacagtgtcatctacgcgtgaggacctgaagaacgtgttcccacctgaggtggccgtgttcgagcctagcgaggccgagatcagccacacccagaaagccaccctcgtgtgcctggctaccggcttctaccccgaccatgtggaactgtcttggtgggtcaacggcaaagaggtgcacagcggcgtgtgtaccgacccccagccactgaaagaacagcccgccctgaacgacagccggtactgcctgagcagcagactgagagtgtccgccaccttctggcagaacccccggaaccacttcagatgccaggtgcagttctacggcctgagcgagaacgacgagtggacccaggacagagccaagcccgtgacccagatcgtgtctgccgaagcctggggcagagccgattgcgacgtgaagctggtggaaaagagcttcgagacagacaccaacctgaacttccagaacctgagcgtgatcggcttcagaatcctgctgctgaaagtggccggctttaacctgctgatgaccctgcggctgtggtccagc

SEQ ID NO: 4867 - DNA, 2724 bp, synthetic construct
  source 1..2724: mol_type = other DNA
atggccttaccagtgaccgccttgctcctgccgctggccttgctgctccacgccgccaggccggaagtgcagctggttgaatctggcggaggactggttcagcctggcggatctctgagactgtcttgtgccgccagcggcttcagcttcagcgacttttggatgagctgggtccgacaggcccctggcaaaggacttgaatgggtcgccacaatcagccaggccggcagcgagaaggactacgtggactctgtgaagggcagattcaccatcagccgggacaacgccaagaagtccctgtacctccagatgaacagcctgagagccgaggacaccgccgtgtactattgtgcctctggcgtgtacagcttcgactacagaggccagggcaccctggtcacagtctcttctggtaccggcggaggcggatctggcggcggaggtagcggtggcggaggatctgaattccagtctgtgctgacacagcctcctagtgtgtctggcgctcctggacagagagtgaccatctcttgtaccggcagcagcagcaatatcggagccggctatgacgtgcactggtatcagcagctccctggcacagcccctaaactgctgatcttcggcaacagcaacagacccagcggcgtgcccgatagattcagcggctttaagagcggcacaagcgccagcctggctatcactggactgcaagccgaggacgaggccgactacttctgccagagctacgatagcagcctgagcggcagcggagtgtttggcacaggcaccaaagtgacagtgcttggcctcgagatccagaaccctgatcctgccgtgtaccagctgcgggatagcaagagcagcgacaagagcgtgtgtctgttcaccgacttcgacagccagaccaacgtgtcccagagcaaggactccgacgtgtacatcaccgataagtgcgtgctggacatgcggagcatggacttcaagagcaactccgccgtggcctggtccaacaagtccgatttcgcctgcgccaacgccttcaacaacagcattatccccgaggacacattcttcccaagccccgagagcagctgcggctttaccagcgagagctaccagcagggcgtgctgagcgccaccatcctgtacgagatcctgctgggcaaggccaccctgtacgccgtgctggtgtctgccctggtgctgatggctatggtcaagcggaaggacagccggggacgcgccaagagaagcggatctggcgtgaagcagaccctgaatttcgacctgctgaagctggctggcgacgtggaatccaacccaggccctactagtatggactggatttggcgcatccttttccttgtcggcgctgctaccggcgcgcattccgggccccagctccagctgcaagagtctggacctggcctggtcaagcctagcgagacactgagcctgacctgtaccgtgtccggcgatagcatcagcagcggcgattactactggggctggatcagacagcctcctggcaaaggactggaatggatcggccacatctactacagcggcgtgacctactacaaccccagcctgaagtccagagtgaccatcagcgtggacaccagccggaaccagttctccctgaagctgtctagcgtgacagccgccgataccgccgtgtactactgcaccagagaggacagcagcaactggcggagtagaggccagggaacactggtcacagttagctctggatccggcggaggcggaagtggaggcggaggatctggcggcggaggctctttcgaacaaatgcaactggttcaaagcggcggtggcctggtgcaacctggaagaagtctgagactgagctgtgccgccagcggcttcaccttcgatgattacgccatgcactgggtccgacaggcccctggaaaaggactggaatgggtgtccggcatctcctggaatagcggctctatcggctacgccgacagcgtgaagggcagattcaccatcagccgggacaacgccaagaacagcctgtacctccagatgaactccctgagagccgaggatacagccctgtactactgcgccaaggacatccacagcggcagctactacggcctgctgtactacgctatggacgtgtggggccagggcacaaccgtgacagtttcttctacgcgtgaggacctgaagaacgtgttcccacctgaggtggccgtgttcgagcctagcgaggccgagatcagccacacccagaaagccaccctcgtgtgcctggctaccggcttctaccccgaccatgtggaactgtcttggtgggtcaacggcaaagaggtgcacagcggcgtgtgtaccgacccccagccactgaaagaacagcccgccctgaacgacagccggtactgcctgagcagcagactgagagtgtccgccaccttctggcagaacccccggaaccacttcagatgccaggtgcagttctacggcctgagcgagaacgacgagtggacccaggacagagccaagcccgtgacccagatcgtgtctgccgaagcctggggcagagccgattgcgacgtgaagctggtggaaaagagcttcgagacagacaccaacctgaacttccagaacctgagcgtgatcggcttcagaatcctgctgctgaaagtggccggctttaacctgctgatgaccctgcggctgtggtccagc

SEQ ID NO: 4868 - DNA, 2724 bp, synthetic construct
  source 1..2724: mol_type = other DNA
atggccttaccagtgaccgccttgctcctgccgctggccttgctgctccacgccgccaggccggaagtgcagctggttgaatctggcggaggactggttcagcctggcggatctctgagactgtcttgtgccgccagcggcttcagcttcagcgacttttggatgagctgggtccgacaggcccctggcaaaggacttgaatgggtcgccacaatcagccaggccggcagcgagaaggactacgtggactctgtgaagggcagattcaccatcagccgggacaacgccaagaagtccctgtacctccagatgaacagcctgagagccgaggacaccgccgtgtactattgtgcctctggcgtgtacagcttcgactacagaggccagggcaccctggtcacagtctcttctggtaccggcggaggcggatctggcggcggaggtagcggtggcggaggatctgaattcctgcctgttctgacacagcctccatctgcctctggcacacctggacagagagtgaccatcagctgtagcggcagaagcagcaacatcggcagcaacagcgtgaactggtacagacagcttcctggcgctgcccctaagctgctgatctacagcaacaaccagcggcctcctggcgtgccagtcagattttctggcagcaagagcggcacaagcgccagcctggctatttctggactccagtctgaggacgaggccacctactactgtgccacctgggacgacaacctgaacgtgcactacgtgttcggcaccggcaccaaagtgacagtgcttggaagtagactcgagatccagaaccctgatcctgccgtgtaccagctgcgggatagcaagagcagcgacaagagcgtgtgtctgttcaccgacttcgacagccagaccaacgtgtcccagagcaaggactccgacgtgtacatcaccgataagtgcgtgctggacatgcggagcatggacttcaagagcaactccgccgtggcctggtccaacaagtccgatttcgcctgcgccaacgccttcaacaacagcattatccccgaggacacattcttcccaagccccgagagcagctgcggctttaccagcgagagctaccagcagggcgtgctgagcgccaccatcctgtacgagatcctgctgggcaaggccaccctgtacgccgtgctggtgtctgccctggtgctgatggctatggtcaagcggaaggacagccggggacgcgccaagagaagcggatctggcgtgaagcagaccctgaatttcgacctgctgaagctggctggcgacgtggaatccaacccaggccctactagtatggactggatttggcgcatccttttccttgtcggcgctgctaccggcgcgcattccgggccccagctccagctgcaagagtctggacctggcctggtcaagcctagcgagacactgagcctgacctgtaccgtgtccggcgatagcatcagcagcggcgattactactggggctggatcagacagcctcctggcaaaggactggaatggatcggccacatctactacagcggcgtgacctactacaaccccagcctgaagtccagagtgaccatcagcgtggacaccagccggaaccagttctccctgaagctgtctagcgtgacagccgccgataccgccgtgtactactgcaccagagaggacagcagcaactggcggagtagaggccagggaacactggtcacagttagctctggatccggcggaggcggaagtggaggcggaggatctggcggcggaggctctttcgaacttgaaatggctcaggtgcagctggtgcagagcggagccgaagtgaagaaacctggcagcagcgtgaaggtgtcctgcaaagcttctggcggcaccttcagcagctacgccatctcttgggttcgacaggcccctggacaaggactggaatggatgggcagaatcatccccatcctgggaatcgccaactacgcccagaaattccagggcagagtgacaatcaccgccgacaagagcaccagcaccgcctacatggaactgagcagcctgagaagcgaggacaccgccgtgtactattgtgcaagaggcggctactacagccacgacatgtggagcgaagattggggccagggcacactggtcacagtgtcatctacgcgtgaggacctgaagaacgtgttcccacctgaggtggccgtgttcgagcctagcgaggccgagatcagccacacccagaaagccaccctcgtgtgcctggctaccggcttctaccccgaccatgtggaactgtcttggtgggtcaacggcaaagaggtgcacagcggcgtgtgtaccgacccccagccactgaaagaacagcccgccctgaacgacagccggtactgcctgagcagcagactgagagtgtccgccaccttctggcagaacccccggaaccacttcagatgccaggtgcagttctacggcctgagcgagaacgacgagtggacccaggacagagccaagcccgtgacccagatcgtgtctgccgaagcctggggcagagccgattgcgacgtgaagctggtggaaaagagcttcgagacagacaccaacctgaacttccagaacctgagcgtgatcggcttcagaatcctgctgctgaaagtggccggctttaacctgctgatgaccctgcggctgtggtccagc

SEQ ID NO: 4869 - DNA, 2706 bp, synthetic construct
  source 1..2706: mol_type = other DNA
atggccttaccagtgaccgccttgctcctgccgctggccttgctgctccacgccgccaggccggaagtgcagctggttgaatctggcggaggactggttcagcctggcggatctctgagactgtcttgtgccgccagcggcttcagcttcagcgacttttggatgagctgggtccgacaggcccctggcaaaggacttgaatgggtcgccacaatcagccaggccggcagcgagaaggactacgtggactctgtgaagggcagattcaccatcagccgggacaacgccaagaagtccctgtacctccagatgaacagcctgagagccgaggacaccgccgtgtactattgtgcctctggcgtgtacagcttcgactacagaggccagggcaccctggtcacagtctcttctggtaccggcggaggcggatctggcggcggaggtagcggtggcggaggatctgaattcgacttcgtgatgacacagagccctgatagcctggccgtgtctctcggcgagcgagtgaccatgagctgcaagtctagccagagcctgctgaacagcggcaaccagaagaactacctgacctggtatcagcagaagcccggccagcctcctaagctgctgatctactgggccagcaccagagaaagcggcgtgcccgatagattttctggctctggcagcggcaccgacttcaccctgacaatttctagcctgcaagccgaggacgtggccgtgtactactgccagaacgactacagctacccctacaccttcggccagggcaccaagctggaaatcaaactcgagatccagaaccctgatcctgccgtgtaccagctgcgggatagcaagagcagcgacaagagcgtgtgtctgttcaccgacttcgacagccagaccaacgtgtcccagagcaaggactccgacgtgtacatcaccgataagtgcgtgctggacatgcggagcatggacttcaagagcaactccgccgtggcctggtccaacaagtccgatttcgcctgcgccaacgccttcaacaacagcattatccccgaggacacattcttcccaagccccgagagcagctgcggctttaccagcgagagctaccagcagggcgtgctgagcgccaccatcctgtacgagatcctgctgggcaaggccaccctgtacgccgtgctggtgtctgccctggtgctgatggctatggtcaagcggaaggacagccggggacgcgccaagagaagcggatctggcgtgaagcagaccctgaatttcgacctgctgaagctggctggcgacgtggaatccaacccaggccctactagtatggactggatttggcgcatccttttccttgtcggcgctgctaccggcgcgcattccgggccccagctccagctgcaagagtctggacctggcctggtcaagcctagcgagacactgagcctgacctgtaccgtgtccggcgatagcatcagcagcggcgattactactggggctggatcagacagcctcctggcaaaggactggaatggatcggccacatctactacagcggcgtgacctactacaaccccagcctgaagtccagagtgaccatcagcgtggacaccagccggaaccagttctccctgaagctgtctagcgtgacagccgccgataccgccgtgtactactgcaccagagaggacagcagcaactggcggagtagaggccagggaacactggtcacagttagctctggatccggcggaggcggaagtggaggcggaggatctggcggcggaggctctttcgaagaagtgcaactggttcagagcggagccgagctgaagaaacctggggccagcgtgaaggtgtcctgtaaagccagcggctacacctttaccgactactacatgaaatgggtccgacaggccccaggccagggactcgaatggatcggcgatattatccccagcaacggggccaccttctacaaccagaaattcaagggccgcgtgaccatcaccgtggacaagagcacaagcaccgcctacatggaactgagcagcctgagaagcgaggacaccgccgtgtattattgcgccagaagccatctgctgcgggccagttggttcgcctattggggacagggaaccctggtcaccgttagctctacgcgtgaggacctgaagaacgtgttcccacctgaggtggccgtgttcgagcctagcgaggccgagatcagccacacccagaaagccaccctcgtgtgcctggctaccggcttctaccccgaccatgtggaactgtcttggtgggtcaacggcaaagaggtgcacagcggcgtgtgtaccgacccccagccactgaaagaacagcccgccctgaacgacagccggtactgcctgagcagcagactgagagtgtccgccaccttctggcagaacccccggaaccacttcagatgccaggtgcagttctacggcctgagcgagaacgacgagtggacccaggacagagccaagcccgtgacccagatcgtgtctgccgaagcctggggcagagccgattgcgacgtgaagctggtggaaaagagcttcgagacagacaccaacctgaacttccagaacctgagcgtgatcggcttcagaatcctgctgctgaaagtggccggctttaacctgctgatgaccctgcggctgtggtccagc

SEQ ID NO: 4870 - DNA, 2706 bp, synthetic construct
  source 1..2706: mol_type = other DNA
atggccttaccagtgaccgccttgctcctgccgctggccttgctgctccacgccgccaggccggaagtgcagctggttgaatctggcggaggactggttcagcctggcggatctctgagactgtcttgtgccgccagcggcttcagcttcagcgacttttggatgagctgggtccgacaggcccctggcaaaggacttgaatgggtcgccacaatcagccaggccggcagcgagaaggactacgtggactctgtgaagggcagattcaccatcagccgggacaacgccaagaagtccctgtacctccagatgaacagcctgagagccgaggacaccgccgtgtactattgtgcctctggcgtgtacagcttcgactacagaggccagggcaccctggtcacagtctcttctggtaccggcggaggcggatctggcggcggaggtagcggtggcggaggatctgaattcgacttcgtgatgacacagagccctgatagcctggccgtgtctctcggcgagcgagtgaccatgagctgcaagtctagccagagcctgctgaacagcggcaaccagaagaactacctgacctggtatcagcagaagcccggccagcctcctaagctgctgatctactgggccagcaccagagaaagcggcgtgcccgatagattttctggctctggcagcggcaccgacttcaccctgacaatttctagcctgcaagccgaggacgtggccgtgtactactgccagaacgactacagctacccctacaccttcggccagggcaccaagctggaaatcaaactcgagatccagaaccctgatcctgccgtgtaccagctgcgggatagcaagagcagcgacaagagcgtgtgtctgttcaccgacttcgacagccagaccaacgtgtcccagagcaaggactccgacgtgtacatcaccgataagtgcgtgctggacatgcggagcatggacttcaagagcaactccgccgtggcctggtccaacaagtccgatttcgcctgcgccaacgccttcaacaacagcattatccccgaggacacattcttcccaagccccgagagcagctgcggctttaccagcgagagctaccagcagggcgtgctgagcgccaccatcctgtacgagatcctgctgggcaaggccaccctgtacgccgtgctggtgtctgccctggtgctgatggctatggtcaagcggaaggacagccggggacgcgccaagagaagcggatctggcgtgaagcagaccctgaatttcgacctgctgaagctggctggcgacgtggaatccaacccaggccctactagtatggactggatttggcgcatccttttccttgtcggcgctgctaccggcgcgcattccgggccccagctccagctgcaagagtctggacctggcctggtcaagcctagcgagacactgagcctgacctgtaccgtgtccggcgatagcatcagcagcggcgattactactggggctggatcagacagcctcctggcaaaggactggaatggatcggccacatctactacagcggcgtgacctactacaaccccagcctgaagtccagagtgaccatcagcgtggacaccagccggaaccagttctccctgaagctgtctagcgtgacagccgccgataccgccgtgtactactgcaccagagaggacagcagcaactggcggagtagaggccagggaacactggtcacagttagctctggatccggcggaggcggaagtggaggcggaggatctggcggcggaggctctttcgaacaagtgcaactggttcagagcggagccgagctgaagaaacctggggccagcgtgaaggtgtcctgtaaagccagcggctacacctttaccgactactacatgaaatgggtccgacaggccccaggccagggactcgaatggatcggcgatattatccccagcaacggggccaccttctacaaccagaaattcaagggccgcgtgaccatcaccgtggacaagagcacaagcaccgcctacatggaactgagcagcctgagaagcgaggacaccgccgtgtattattgcgccagaagccatctgctgcgggccagttggttcgcctattggggacagggaaccctggtcaccgttagctctacgcgtgaggacctgaagaacgtgttcccacctgaggtggccgtgttcgagcctagcgaggccgagatcagccacacccagaaagccaccctcgtgtgcctggctaccggcttctaccccgaccatgtggaactgtcttggtgggtcaacggcaaagaggtgcacagcggcgtgtgtaccgacccccagccactgaaagaacagcccgccctgaacgacagccggtactgcctgagcagcagactgagagtgtccgccaccttctggcagaacccccggaaccacttcagatgccaggtgcagttctacggcctgagcgagaacgacgagtggacccaggacagagccaagcccgtgacccagatcgtgtctgccgaagcctggggcagagccgattgcgacgtgaagctggtggaaaagagcttcgagacagacaccaacctgaacttccagaacctgagcgtgatcggcttcagaatcctgctgctgaaagtggccggctttaacctgctgatgaccctgcggctgtggtccagc

SEQ ID NO: 4871 - DNA, 2676 bp, synthetic construct
  source 1..2676: mol_type = other DNA
atggccttaccagtgaccgccttgctcctgccgctggccttgctgctccacgccgccaggccggaagtgcagctggttgaatctggcggaggactggttcagcctggcggatctctgagactgtcttgtgccgccagcggcttcagcttcagcgacttttggatgagctgggtccgacaggcccctggcaaaggacttgaatgggtcgccacaatcagccaggccggcagcgagaaggactacgtggactctgtgaagggcagattcaccatcagccgggacaacgccaagaagtccctgtacctccagatgaacagcctgagagccgaggacaccgccgtgtactattgtgcctctggcgtgtacagcttcgactacagaggccagggcaccctggtcacagtctcttctggtaccggcggaggcggatctggcggcggaggtagcggtggcggaggatctgaattcgacgtgcagatcacacagagccctagctacctggctgcctctcctggcgagacaatcaccatcaactgtcgggccagcaagagcatcagcaaggacctggcctggtatcaagagaagcccggcaagaccaacaagctgctgatctacagcggcagcacactccagtctggcatccccagcagattttccggctctggcagcggcaccgatttcaccctgaccataagcagcctggaacctgaggacttcgccatgtactactgccagcagcacaacaagtacccctacacctttggcggaggcaccaagctggaaatcaagagactcgagatccagaaccctgatcctgccgtgtaccagctgcgggatagcaagagcagcgacaagagcgtgtgtctgttcaccgacttcgacagccagaccaacgtgtcccagagcaaggactccgacgtgtacatcaccgataagtgcgtgctggacatgcggagcatggacttcaagagcaactccgccgtggcctggtccaacaagtccgatttcgcctgcgccaacgccttcaacaacagcattatccccgaggacacattcttcccaagccccgagagcagctgcggctttaccagcgagagctaccagcagggcgtgctgagcgccaccatcctgtacgagatcctgctgggcaaggccaccctgtacgccgtgctggtgtctgccctggtgctgatggctatggtcaagcggaaggacagccggggacgcgccaagagaagcggatctggcgtgaagcagaccctgaatttcgacctgctgaagctggctggcgacgtggaatccaacccaggccctactagtatggactggatttggcgcatccttttccttgtcggcgctgctaccggcgcgcattccgggccccagctccagctgcaagagtctggacctggcctggtcaagcctagcgagacactgagcctgacctgtaccgtgtccggcgatagcatcagcagcggcgattactactggggctggatcagacagcctcctggcaaaggactggaatggatcggccacatctactacagcggcgtgacctactacaaccccagcctgaagtccagagtgaccatcagcgtggacaccagccggaaccagttctccctgaagctgtctagcgtgacagccgccgataccgccgtgtactactgcaccagagaggacagcagcaactggcggagtagaggccagggaacactggtcacagttagctctggatccggcggaggcggaagtggaggcggaggatctggcggcggaggctctttcgaacaagttcaactgcaacagcctggggccgagcttgttagacctggcgcttctgtgaagctgagctgcaaggccagcggctacaccttcaccagctactggatgaactgggtcaagcagcggcctgaccagggcctcgaatggatcggcagaatcgacccctacgacagcgagacacactacaaccagaagttcaaggacaaggccatcctgaccgtggacaagagcagctccaccgcctacatgcaactgagcagcctgacctctgaggatagcgccgtgtactattgcgccagaggcaactgggacgactattggggccagggcacaaccctgacagtgtctagtacgcgtgaggacctgaagaacgtgttcccacctgaggtggccgtgttcgagcctagcgaggccgagatcagccacacccagaaagccaccctcgtgtgcctggctaccggcttctaccccgaccatgtggaactgtcttggtgggtcaacggcaaagaggtgcacagcggcgtgtgtaccgacccccagccactgaaagaacagcccgccctgaacgacagccggtactgcctgagcagcagactgagagtgtccgccaccttctggcagaacccccggaaccacttcagatgccaggtgcagttctacggcctgagcgagaacgacgagtggacccaggacagagccaagcccgtgacccagatcgtgtctgccgaagcctggggcagagccgattgcgacgtgaagctggtggaaaagagcttcgagacagacaccaacctgaacttccagaacctgagcgtgatcggcttcagaatcctgctgctgaaagtggccggctttaacctgctgatgaccctgcggctgtggtccagc

SEQ ID NO: 4872 - DNA, 2682 bp, synthetic construct
  source 1..2682: mol_type = other DNA
atggccttaccagtgaccgccttgctcctgccgctggccttgctgctccacgccgccaggccggaagtgcagctggttgaatctggcggaggactggttcagcctggcggatctctgagactgtcttgtgccgccagcggcttcagcttcagcgacttttggatgagctgggtccgacaggcccctggcaaaggacttgaatgggtcgccacaatcagccaggccggcagcgagaaggactacgtggactctgtgaagggcagattcaccatcagccgggacaacgccaagaagtccctgtacctccagatgaacagcctgagagccgaggacaccgccgtgtactattgtgcctctggcgtgtacagcttcgactacagaggccagggcaccctggtcacagtctcttctggtaccggcggaggcggatctggcggcggaggtagcggtggcggaggatctgaattcgagatcgtgctgacacagagccctaccagcatgacagcctctccaggcgagcaagtgaccatcacctgtagagccagcagcagcatcaactacatgcactggtatcagcagaagcctggcgcaagccccagaccttggatctacgagacaagcaagctggcctccggcgtgcccgatagattttctggatctgccagcggcaccagctacagcctgaccatcaacaacatggaagccgaggacgccgccacctactactgccagcagtggaattacccctcctggacctttggcggaggcaccaagctggaacttaaactcgagatccagaaccctgatcctgccgtgtaccagctgcgggatagcaagagcagcgacaagagcgtgtgtctgttcaccgacttcgacagccagaccaacgtgtcccagagcaaggactccgacgtgtacatcaccgataagtgcgtgctggacatgcggagcatggacttcaagagcaactccgccgtggcctggtccaacaagtccgatttcgcctgcgccaacgccttcaacaacagcattatccccgaggacacattcttcccaagccccgagagcagctgcggctttaccagcgagagctaccagcagggcgtgctgagcgccaccatcctgtacgagatcctgctgggcaaggccaccctgtacgccgtgctggtgtctgccctggtgctgatggctatggtcaagcggaaggacagccggggacgcgccaagagaagcggatctggcgtgaagcagaccctgaatttcgacctgctgaagctggctggcgacgtggaatccaacccaggccctactagtatggactggatttggcgcatccttttccttgtcggcgctgctaccggcgcgcattccgggccccagctccagctgcaagagtctggacctggcctggtcaagcctagcgagacactgagcctgacctgtaccgtgtccggcgatagcatcagcagcggcgattactactggggctggatcagacagcctcctggcaaaggactggaatggatcggccacatctactacagcggcgtgacctactacaaccccagcctgaagtccagagtgaccatcagcgtggacaccagccggaaccagttctccctgaagctgtctagcgtgacagccgccgataccgccgtgtactactgcaccagagaggacagcagcaactggcggagtagaggccagggaacactggtcacagttagctctggatccggcggaggcggaagtggaggcggaggatctggcggcggaggctctttcgaagaagtgcagctcgttgagtctggtggcggactggttcagcctggaagaagcctgaagctgagctgtgccgccagcggcttcaccttcagcgactacaatatggcctgggtccgacaggcccctaagaaaggactggaatgggtcgccaccatcctgtacgatggcggcagaacctactaccggggcagcgtgaagggcagattcaccatcagcagagacaacgccaagagcaccctgtacctgcggatggactctctgagaagcgaggataccgccacatattactgtgccacacacagccggggcaccgactactttgattattggggccagggcgtgatggttaccgtgtctagtacgcgtgaggacctgaagaacgtgttcccacctgaggtggccgtgttcgagcctagcgaggccgagatcagccacacccagaaagccaccctcgtgtgcctggctaccggcttctaccccgaccatgtggaactgtcttggtgggtcaacggcaaagaggtgcacagcggcgtgtgtaccgacccccagccactgaaagaacagcccgccctgaacgacagccggtactgcctgagcagcagactgagagtgtccgccaccttctggcagaacccccggaaccacttcagatgccaggtgcagttctacggcctgagcgagaacgacgagtggacccaggacagagccaagcccgtgacccagatcgtgtctgccgaagcctggggcagagccgattgcgacgtgaagctggtggaaaagagcttcgagacagacaccaacctgaacttccagaacctgagcgtgatcggcttcagaatcctgctgctgaaagtggccggctttaacctgctgatgaccctgcggctgtggtccagc

SEQ ID NO: 4873 - DNA, 2709 bp, synthetic construct
  source 1..2709: mol_type = other DNA
atggccttaccagtgaccgccttgctcctgccgctggccttgctgctccacgccgccaggccggaagtgcagctggttgaatctggcggaggactggttcagcctggcggatctctgagactgtcttgtgccgccagcggcttcagcttcagcgacttttggatgagctgggtccgacaggcccctggcaaaggacttgaatgggtcgccacaatcagccaggccggcagcgagaaggactacgtggactctgtgaagggcagattcaccatcagccgggacaacgccaagaagtccctgtacctccagatgaacagcctgagagccgaggacaccgccgtgtactattgtgcctctggcgtgtacagcttcgactacagaggccagggcaccctggtcacagtctcttctggtaccggcggaggcggatctggcggcggaggtagcggtggcggaggatctgaattcgacatcgtgatgacacagagcccttctagcctggccgtgtctgagggcgagacagtgaccatcaactgcaagagcagccagagcttcctgtctagcggcgacggcaagaattacgtggcctggtatcagtacaagcccggacagagccccaagctgctgatctactgggccagcacaagacagagcggcgtgcccgatagattcatcggctctggcagcggcaccgacttcaccctgacaatctctacagtgcaggccgaggacctggctatctactactgccagcagtattacgacacccctctgacctttggctccggcaccaagctggaaatcaaactcgagatccagaaccctgatcctgccgtgtaccagctgcgggatagcaagagcagcgacaagagcgtgtgtctgttcaccgacttcgacagccagaccaacgtgtcccagagcaaggactccgacgtgtacatcaccgataagtgcgtgctggacatgcggagcatggacttcaagagcaactccgccgtggcctggtccaacaagtccgatttcgcctgcgccaacgccttcaacaacagcattatccccgaggacacattcttcccaagccccgagagcagctgcggctttaccagcgagagctaccagcagggcgtgctgagcgccaccatcctgtacgagatcctgctgggcaaggccaccctgtacgccgtgctggtgtctgccctggtgctgatggctatggtcaagcggaaggacagccggggacgcgccaagagaagcggatctggcgtgaagcagaccctgaatttcgacctgctgaagctggctggcgacgtggaatccaacccaggccctactagtatggactggatttggcgcatccttttccttgtcggcgctgctaccggcgcgcattccgggccccagctccagctgcaagagtctggacctggcctggtcaagcctagcgagacactgagcctgacctgtaccgtgtccggcgatagcatcagcagcggcgattactactggggctggatcagacagcctcctggcaaaggactggaatggatcggccacatctactacagcggcgtgacctactacaaccccagcctgaagtccagagtgaccatcagcgtggacaccagccggaaccagttctccctgaagctgtctagcgtgacagccgccgataccgccgtgtactactgcaccagagaggacagcagcaactggcggagtagaggccagggaacactggtcacagttagctctggatccggcggaggcggaagtggaggcggaggatctggcggcggaggctctttcgaagaagtgaagctgcaagagtctggccccagcctggtgcagagtagccaaacactgagcctgacctgtaccgtgtccggctttagcctgaccagctaccacatccactgggtccgacagacccctggcaaaggactggaatggatgggcgtgatgtggagcgacggcgacaccagctataacagcgccctgaagtcccggctgagcatcagcagagatacaagccagagccaggtgttcctgaagatgaacagcctccagaccgaggacaccgccacctactattgtgccagaggctactacagcagctacctgtacctttggttcgcctattggggccagggcaccctggttacagtcagctctacgcgtgaggacctgaagaacgtgttcccacctgaggtggccgtgttcgagcctagcgaggccgagatcagccacacccagaaagccaccctcgtgtgcctggctaccggcttctaccccgaccatgtggaactgtcttggtgggtcaacggcaaagaggtgcacagcggcgtgtgtaccgacccccagccactgaaagaacagcccgccctgaacgacagccggtactgcctgagcagcagactgagagtgtccgccaccttctggcagaacccccggaaccacttcagatgccaggtgcagttctacggcctgagcgagaacgacgagtggacccaggacagagccaagcccgtgacccagatcgtgtctgccgaagcctggggcagagccgattgcgacgtgaagctggtggaaaagagcttcgagacagacaccaacctgaacttccagaacctgagcgtgatcggcttcagaatcctgctgctgaaagtggccggctttaacctgctgatgaccctgcggctgtggtccagc

SEQ ID NO: 4874 - DNA, 2721 bp, synthetic construct
  source 1..2721: mol_type = other DNA
atggccttaccagtgaccgccttgctcctgccgctggccttgctgctccacgccgccaggccggaagtgcagctggttgaatctggcggaggactggttcagcctggcggatctctgagactgtcttgtgccgccagcggcttcagcttcagcgacttttggatgagctgggtccgacaggcccctggcaaaggacttgaatgggtcgccacaatcagccaggccggcagcgagaaggactacgtggactctgtgaagggcagattcaccatcagccgggacaacgccaagaagtccctgtacctccagatgaacagcctgagagccgaggacaccgccgtgtactattgtgcctctggcgtgtacagcttcgactacagaggccagggcaccctggtcacagtctcttctggtaccggcggaggcggatctggcggcggaggtagcggtggcggaggatctgaattcgacgtgctgatgacccagacacctgtgtctctgccagtgtctctcggaggccaggtgtccatctcctgtagaagcagccagagcctggtgcactccgacggcgatacctacctgcactggtatctccagaagcctggacagagccctcagctcctgatctaccgggtgtccaacagattcagcggcgtgcccgatagattttccggcagcggctctggcaccgacttcaccctgaagatcagcagagtggaacccgaggacctgggcctgtactactgtctccagaccacacacttcccaccttggacctttggcggaggcaccaagctggaaatgaaactcgagatccagaaccctgatcctgccgtgtaccagctgcgggatagcaagagcagcgacaagagcgtgtgtctgttcaccgacttcgacagccagaccaacgtgtcccagagcaaggactccgacgtgtacatcaccgataagtgcgtgctggacatgcggagcatggacttcaagagcaactccgccgtggcctggtccaacaagtccgatttcgcctgcgccaacgccttcaacaacagcattatccccgaggacacattcttcccaagccccgagagcagctgcggctttaccagcgagagctaccagcagggcgtgctgagcgccaccatcctgtacgagatcctgctgggcaaggccaccctgtacgccgtgctggtgtctgccctggtgctgatggctatggtcaagcggaaggacagccggggacgcgccaagagaagcggatctggcgtgaagcagaccctgaatttcgacctgctgaagctggctggcgacgtggaatccaacccaggccctactagtatggactggatttggcgcatccttttccttgtcggcgctgctaccggcgcgcattccgggccccagctccagctgcaagagtctggacctggcctggtcaagcctagcgagacactgagcctgacctgtaccgtgtccggcgatagcatcagcagcggcgattactactggggctggatcagacagcctcctggcaaaggactggaatggatcggccacatctactacagcggcgtgacctactacaaccccagcctgaagtccagagtgaccatcagcgtggacaccagccggaaccagttctccctgaagctgtctagcgtgacagccgccgataccgccgtgtactactgcaccagagaggacagcagcaactggcggagtagaggccagggaacactggtcacagttagctctggatccggcggaggcggaagtggaggcggaggatctggcggcggaggctctttcgaacaggttcagctccagcagtctggacccgagcttagaaggccaggatctagcgtcagactgagctgcaaggccagcggctaccggatcaaggacttcctgatccactggattaagaacagacccgagcacggcctggaatggatcggatggattgaccctgaggacggcgagactaagtacgcccagaagttccagaccaaggccacactgaccgccgacacctctagcaacaccgcctacatgcaactgagcagcctgaccagcgaggacaccgccacctacttttgtgctagatggggcgacgtgtactacggcctgatgagaggccatgtgatggatgcctggggccagggaacaagcgtgacagtctcttctacgcgtgaggacctgaagaacgtgttcccacctgaggtggccgtgttcgagcctagcgaggccgagatcagccacacccagaaagccaccctcgtgtgcctggctaccggcttctaccccgaccatgtggaactgtcttggtgggtcaacggcaaagaggtgcacagcggcgtgtgtaccgacccccagccactgaaagaacagcccgccctgaacgacagccggtactgcctgagcagcagactgagagtgtccgccaccttctggcagaacccccggaaccacttcagatgccaggtgcagttctacggcctgagcgagaacgacgagtggacccaggacagagccaagcccgtgacccagatcgtgtctgccgaagcctggggcagagccgattgcgacgtgaagctggtggaaaagagcttcgagacagacaccaacctgaacttccagaacctgagcgtgatcggcttcagaatcctgctgctgaaagtggccggctttaacctgctgatgaccctgcggctgtggtccagc

SEQ ID NO: 4875 - DNA, 2706 bp, synthetic construct
  source 1..2706: mol_type = other DNA
atggccttaccagtgaccgccttgctcctgccgctggccttgctgctccacgccgccaggccggaagtgcagctggttgaatctggcggaggactggttcagcctggcggatctctgagactgtcttgtgccgccagcggcttcagcttcagcgacttttggatgagctgggtccgacaggcccctggcaaaggacttgaatgggtcgccacaatcagccaggccggcagcgagaaggactacgtggactctgtgaagggcagattcaccatcagccgggacaacgccaagaagtccctgtacctccagatgaacagcctgagagccgaggacaccgccgtgtactattgtgcctctggcgtgtacagcttcgactacagaggccagggcaccctggtcacagtctcttctggtaccggcggaggcggatctggcggcggaggtagcggtggcggaggatctgaattcgacatcgtgatgacacagagccccgccacactgtcactgtctccaggcgaaagagccacactgagctgtcggagcagcaagagcctccagaacgtgaacggcaacacctacctgtactggttccagcagaagcccggccagtctcctcagctcctgatctacagaatgagcaacctgaacagcggcgtgcccgacagattttctggcagcggaagcggcaccgagttcaccctgaccataagcagcctggaacctgaggacttcgccgtgtactactgtatgcagcacctggaataccccatcaccttcggagccggcaccaagctggaaatcaaactcgagatccagaaccctgatcctgccgtgtaccagctgcgggatagcaagagcagcgacaagagcgtgtgtctgttcaccgacttcgacagccagaccaacgtgtcccagagcaaggactccgacgtgtacatcaccgataagtgcgtgctggacatgcggagcatggacttcaagagcaactccgccgtggcctggtccaacaagtccgatttcgcctgcgccaacgccttcaacaacagcattatccccgaggacacattcttcccaagccccgagagcagctgcggctttaccagcgagagctaccagcagggcgtgctgagcgccaccatcctgtacgagatcctgctgggcaaggccaccctgtacgccgtgctggtgtctgccctggtgctgatggctatggtcaagcggaaggacagccggggacgcgccaagagaagcggatctggcgtgaagcagaccctgaatttcgacctgctgaagctggctggcgacgtggaatccaacccaggccctactagtatggactggatttggcgcatccttttccttgtcggcgctgctaccggcgcgcattccgggccccagctccagctgcaagagtctggacctggcctggtcaagcctagcgagacactgagcctgacctgtaccgtgtccggcgatagcatcagcagcggcgattactactggggctggatcagacagcctcctggcaaaggactggaatggatcggccacatctactacagcggcgtgacctactacaaccccagcctgaagtccagagtgaccatcagcgtggacaccagccggaaccagttctccctgaagctgtctagcgtgacagccgccgataccgccgtgtactactgcaccagagaggacagcagcaactggcggagtagaggccagggaacactggtcacagttagctctggatccggcggaggcggaagtggaggcggaggatctggcggcggaggctctttcgaagaagtgcaactggttgaatctggcggcggactggttaagcctggcggatctctgaagctgagctgtgccgccagcggctacacctttaccagctacgtgatgcactgggtccgacaggcccctggcaaaggacttgagtggatcggctacatcaacccctacaacgatggcaccaagtacaacgagaagttccagggcagagtgaccatcagctccgacaagagcatcagcaccgcctacatggaactgagcagcctgagaagcgaggataccgccatgtactattgcgccagaggcacctactactacggcaccagagtgttcgactactggggccagggaaccctggtcacagtctcttctacgcgtgaggacctgaagaacgtgttcccacctgaggtggccgtgttcgagcctagcgaggccgagatcagccacacccagaaagccaccctcgtgtgcctggctaccggcttctaccccgaccatgtggaactgtcttggtgggtcaacggcaaagaggtgcacagcggcgtgtgtaccgacccccagccactgaaagaacagcccgccctgaacgacagccggtactgcctgagcagcagactgagagtgtccgccaccttctggcagaacccccggaaccacttcagatgccaggtgcagttctacggcctgagcgagaacgacgagtggacccaggacagagccaagcccgtgacccagatcgtgtctgccgaagcctggggcagagccgattgcgacgtgaagctggtggaaaagagcttcgagacagacaccaacctgaacttccagaacctgagcgtgatcggcttcagaatcctgctgctgaaagtggccggctttaacctgctgatgaccctgcggctgtggtccagc

SEQ ID NO: 4876 - DNA, 2694 bp, synthetic construct
  source 1..2694: mol_type = other DNA
atggccttaccagtgaccgccttgctcctgccgctggccttgctgctccacgccgccaggccggaagtgcagctggttgaatctggcggaggactggttcagcctggcggatctctgagactgtcttgtgccgccagcggcttcagcttcagcgacttttggatgagctgggtccgacaggcccctggcaaaggacttgaatgggtcgccacaatcagccaggccggcagcgagaaggactacgtggactctgtgaagggcagattcaccatcagccgggacaacgccaagaagtccctgtacctccagatgaacagcctgagagccgaggacaccgccgtgtactattgtgcctctggcgtgtacagcttcgactacagaggccagggcaccctggtcacagtctcttctggtaccggcggaggcggatctggcggcggaggtagcggtggcggaggatctgaattcgacatccagatgacacagagccctagcagcctgtctgccagcgtgggagacagagtgaccatcacatgcaaggccagcgaccacatcaacaactggctggcctggtatcagcagaagcctggacaggcccctaagctgctgatctacggcgctaccacactggaaacaggcgtgcccagcagattttctggcagcggctctggcaccgactacaccctgacaatatccagcctccagcctgaggacttcgccacctactactgtcagcagagctggaacaccccttggacattcggccagggcaccaagctggaaatcaagagactcgagatccagaaccctgatcctgccgtgtaccagctgcgggatagcaagagcagcgacaagagcgtgtgtctgttcaccgacttcgacagccagaccaacgtgtcccagagcaaggactccgacgtgtacatcaccgataagtgcgtgctggacatgcggagcatggacttcaagagcaactccgccgtggcctggtccaacaagtccgatttcgcctgcgccaacgccttcaacaacagcattatccccgaggacacattcttcccaagccccgagagcagctgcggctttaccagcgagagctaccagcagggcgtgctgagcgccaccatcctgtacgagatcctgctgggcaaggccaccctgtacgccgtgctggtgtctgccctggtgctgatggctatggtcaagcggaaggacagccggggacgcgccaagagaagcggatctggcgtgaagcagaccctgaatttcgacctgctgaagctggctggcgacgtggaatccaacccaggccctactagtatggactggatttggcgcatccttttccttgtcggcgctgctaccggcgcgcattccgggccccagctccagctgcaagagtctggacctggcctggtcaagcctagcgagacactgagcctgacctgtaccgtgtccggcgatagcatcagcagcggcgattactactggggctggatcagacagcctcctggcaaaggactggaatggatcggccacatctactacagcggcgtgacctactacaaccccagcctgaagtccagagtgaccatcagcgtggacaccagccggaaccagttctccctgaagctgtctagcgtgacagccgccgataccgccgtgtactactgcaccagagaggacagcagcaactggcggagtagaggccagggaacactggtcacagttagctctggatccggcggaggcggaagtggaggcggaggatctggcggcggaggctctttcgaacaagttcagcttcaacagcctggcgctgagctggtcaaacctggcgcttctgtgaagatgagctgcaaagccagcggctacgccttcagcagctactggatcaactggatgaagcagaaacccggccagggactcgaatggatcggccaaatctatcccggcgacggcgacaccaactacaacggcaagttcaagggcagagccacactgaccgccgatacctctagcagcacagcctacatgcagctgagcagcctgaccagcgaagatagcgccgtgtacttctgtgcccggtccatcacaacagtcgtgggctgcgctatggactattggggccagggaacaagcgtgaccgtgtctagtacgcgtgaggacctgaagaacgtgttcccacctgaggtggccgtgttcgagcctagcgaggccgagatcagccacacccagaaagccaccctcgtgtgcctggctaccggcttctaccccgaccatgtggaactgtcttggtgggtcaacggcaaagaggtgcacagcggcgtgtgtaccgacccccagccactgaaagaacagcccgccctgaacgacagccggtactgcctgagcagcagactgagagtgtccgccaccttctggcagaacccccggaaccacttcagatgccaggtgcagttctacggcctgagcgagaacgacgagtggacccaggacagagccaagcccgtgacccagatcgtgtctgccgaagcctggggcagagccgattgcgacgtgaagctggtggaaaagagcttcgagacagacaccaacctgaacttccagaacctgagcgtgatcggcttcagaatcctgctgctgaaagtggccggctttaacctgctgatgaccctgcggctgtggtccagc

SEQ ID NO: 4877 - DNA, 2700 bp, synthetic construct
  source 1..2700: mol_type = other DNA
atggccttaccagtgaccgccttgctcctgccgctggccttgctgctccacgccgccaggccggaagtgcagctggttgaatctggcggaggactggttcagcctggcggatctctgagactgtcttgtgccgccagcggcttcagcttcagcgacttttggatgagctgggtccgacaggcccctggcaaaggacttgaatgggtcgccacaatcagccaggccggcagcgagaaggactacgtggactctgtgaagggcagattcaccatcagccgggacaacgccaagaagtccctgtacctccagatgaacagcctgagagccgaggacaccgccgtgtactattgtgcctctggcgtgtacagcttcgactacagaggccagggcaccctggtcacagtctcttctggtaccggcggaggcggatctggcggcggaggtagcggtggcggaggatctgaattccagatcgtgctgtctcagtctcctgccatcctgagcgcttccccaggcgagaaagtgaccatgacctgtagagccagcagcagcgtgtcctacatgcactggtatcagcagaagcccggcagcagccctaagccttggatctacgccaccagcaatctggcctctggcgtgccagccagattttctggctctggcagcggcaccagctacagcttcacaatcagcagagtggaagccgaggacgccgccacctactattgtcagcagtggaccttcaatcctcctaccttcggcggaggcacccggctggaaatcaaaagaacagtggctgctctcgagatccagaaccctgatcctgccgtgtaccagctgcgggatagcaagagcagcgacaagagcgtgtgtctgttcaccgacttcgacagccagaccaacgtgtcccagagcaaggactccgacgtgtacatcaccgataagtgcgtgctggacatgcggagcatggacttcaagagcaactccgccgtggcctggtccaacaagtccgatttcgcctgcgccaacgccttcaacaacagcattatccccgaggacacattcttcccaagccccgagagcagctgcggctttaccagcgagagctaccagcagggcgtgctgagcgccaccatcctgtacgagatcctgctgggcaaggccaccctgtacgccgtgctggtgtctgccctggtgctgatggctatggtcaagcggaaggacagccggggacgcgccaagagaagcggatctggcgtgaagcagaccctgaatttcgacctgctgaagctggctggcgacgtggaatccaacccaggccctactagtatggactggatttggcgcatccttttccttgtcggcgctgctaccggcgcgcattccgggccccagctccagctgcaagagtctggacctggcctggtcaagcctagcgagacactgagcctgacctgtaccgtgtccggcgatagcatcagcagcggcgattactactggggctggatcagacagcctcctggcaaaggactggaatggatcggccacatctactacagcggcgtgacctactacaaccccagcctgaagtccagagtgaccatcagcgtggacaccagccggaaccagttctccctgaagctgtctagcgtgacagccgccgataccgccgtgtactactgcaccagagaggacagcagcaactggcggagtagaggccagggaacactggtcacagttagctctggatccggcggaggcggaagtggaggcggaggatctggcggcggaggctctttcgaacaggcttatctgcaacagagcggagccgaactcgtcagacctggcgcttctgtgaagatgagctgcaaggccagcggctacaccttcaccagctataatatgcactgggtcaagcagacccctcggcagggactcgaatggatcggcggaatctatcccggcaacggcgacacctcctacaaccagaagttcaagggcaaagccacactgaccgtgggcaagagcagcagcaccgcctatatgcagctcagcagcctgaccagcgaggacagcgccgtgtacttctgcgccagatacgactacaactacgctatggactactggggccagggcaccagcgtgacagttagctctgccagcacgcgtgaggacctgaagaacgtgttcccacctgaggtggccgtgttcgagcctagcgaggccgagatcagccacacccagaaagccaccctcgtgtgcctggctaccggcttctaccccgaccatgtggaactgtcttggtgggtcaacggcaaagaggtgcacagcggcgtgtgtaccgacccccagccactgaaagaacagcccgccctgaacgacagccggtactgcctgagcagcagactgagagtgtccgccaccttctggcagaacccccggaaccacttcagatgccaggtgcagttctacggcctgagcgagaacgacgagtggacccaggacagagccaagcccgtgacccagatcgtgtctgccgaagcctggggcagagccgattgcgacgtgaagctggtggaaaagagcttcgagacagacaccaacctgaacttccagaacctgagcgtgatcggcttcagaatcctgctgctgaaagtggccggctttaacctgctgatgaccctgcggctgtggtccagc

SEQ ID NO: 4878 - DNA, 2694 bp, synthetic construct
  source 1..2694: mol_type = other DNA
atggccttaccagtgaccgccttgctcctgccgctggccttgctgctccacgccgccaggccggaagtgcagctggttgaatctggcggaggactggttcagcctggcggatctctgagactgtcttgtgccgccagcggcttcagcttcagcgacttttggatgagctgggtccgacaggcccctggcaaaggacttgaatgggtcgccacaatcagccaggccggcagcgagaaggactacgtggactctgtgaagggcagattcaccatcagccgggacaacgccaagaagtccctgtacctccagatgaacagcctgagagccgaggacaccgccgtgtactattgtgcctctggcgtgtacagcttcgactacagaggccagggcaccctggtcacagtctcttctggtaccggcggaggcggatctggcggcggaggtagcggtggcggaggatctgaattcgagatcgtgctgacacagagccctgccaccctgtctctgagccctggcgaaagagccaccctgagctgtagagccagccagagcgtgtccagctacctggcctggtatcagcagaagcccggccaggctccccggctgctgatctacgatgccagcaatagagccaccggcatccccgccagattttccggctctggcagcggcaccgacttcaccctgaccatcagctccctggaacccgaggacttcgccgtgtactactgccagcagcggagcaactggcccatcacattcggccagggcacccggctggaaatcaaactcgagatccagaaccctgatcctgccgtgtaccagctgcgggatagcaagagcagcgacaagagcgtgtgtctgttcaccgacttcgacagccagaccaacgtgtcccagagcaaggactccgacgtgtacatcaccgataagtgcgtgctggacatgcggagcatggacttcaagagcaactccgccgtggcctggtccaacaagtccgatttcgcctgcgccaacgccttcaacaacagcattatccccgaggacacattcttcccaagccccgagagcagctgcggctttaccagcgagagctaccagcagggcgtgctgagcgccaccatcctgtacgagatcctgctgggcaaggccaccctgtacgccgtgctggtgtctgccctggtgctgatggctatggtcaagcggaaggacagccggggacgcgccaagagaagcggatctggcgtgaagcagaccctgaatttcgacctgctgaagctggctggcgacgtggaatccaacccaggccctactagtatggactggatttggcgcatccttttccttgtcggcgctgctaccggcgcgcattccgggccccagctccagctgcaagagtctggacctggcctggtcaagcctagcgagacactgagcctgacctgtaccgtgtccggcgatagcatcagcagcggcgattactactggggctggatcagacagcctcctggcaaaggactggaatggatcggccacatctactacagcggcgtgacctactacaaccccagcctgaagtccagagtgaccatcagcgtggacaccagccggaaccagttctccctgaagctgtctagcgtgacagccgccgataccgccgtgtactactgcaccagagaggacagcagcaactggcggagtagaggccagggaacactggtcacagttagctctggatccggcggaggcggaagtggaggcggaggatctggcggcggaggctctttcgaagaggtgcagcttgttgagtctggcggaggactggtgcagcccgatagaagcctgagactgtcttgtgccgccagcggcttcaccttccacgattatgccatgcactgggtccgacaggcccctggcaaaggacttgaatgggtgtccaccatctcttggaacagcggcacaatcggctacgccgactctgtgaagggcagattcaccatcagccgggacaacgccaagaacagcctgtacctccagatgaactccctgagagccgaggacacagccctgtactactgcgccaaggacatccagtacggcaactactactacggcatggacgtgtggggccagggcacaacagtgacagtctcttctacgcgtgaggacctgaagaacgtgttcccacctgaggtggccgtgttcgagcctagcgaggccgagatcagccacacccagaaagccaccctcgtgtgcctggctaccggcttctaccccgaccatgtggaactgtcttggtgggtcaacggcaaagaggtgcacagcggcgtgtgtaccgacccccagccactgaaagaacagcccgccctgaacgacagccggtactgcctgagcagcagactgagagtgtccgccaccttctggcagaacccccggaaccacttcagatgccaggtgcagttctacggcctgagcgagaacgacgagtggacccaggacagagccaagcccgtgacccagatcgtgtctgccgaagcctggggcagagccgattgcgacgtgaagctggtggaaaagagcttcgagacagacaccaacctgaacttccagaacctgagcgtgatcggcttcagaatcctgctgctgaaagtggccggctttaacctgctgatgaccctgcggctgtggtccagc

SEQ ID NO: 4879 - DNA, 2679 bp, synthetic construct
  source 1..2679: mol_type = other DNA
atggccttaccagtgaccgccttgctcctgccgctggccttgctgctccacgccgccaggccggaagtgcagctggttgaatctggcggaggactggttcagcctggcggatctctgagactgtcttgtgccgccagcggcttcagcttcagcgacttttggatgagctgggtccgacaggcccctggcaaaggacttgaatgggtcgccacaatcagccaggccggcagcgagaaggactacgtggactctgtgaagggcagattcaccatcagccgggacaacgccaagaagtccctgtacctccagatgaacagcctgagagccgaggacaccgccgtgtactattgtgcctctggcgtgtacagcttcgactacagaggccagggcaccctggtcacagtctcttctggtaccggcggaggcggatctggcggcggaggtagcggtggcggaggatctgaattcgacatccagatgacacagagccctagcagcctgtctgccagcgtgggagatagagtgaccatcaactgcaaggccagccaggacatcaacagctacctgagctggttccagcagaagcctggcaaggcccctaagacactgatctaccgggccaacagactggtggatggcgtgccaagcagattttctggcagcggcagcggccaggattacaccctgacaatatccagcctccagcctgaggacttcgccacctactactgcctccagtacgacgagttccctctgacctttggcggaggcaccaaggtggaaatcaaactcgagatccagaaccctgatcctgccgtgtaccagctgcgggatagcaagagcagcgacaagagcgtgtgtctgttcaccgacttcgacagccagaccaacgtgtcccagagcaaggactccgacgtgtacatcaccgataagtgcgtgctggacatgcggagcatggacttcaagagcaactccgccgtggcctggtccaacaagtccgatttcgcctgcgccaacgccttcaacaacagcattatccccgaggacacattcttcccaagccccgagagcagctgcggctttaccagcgagagctaccagcagggcgtgctgagcgccaccatcctgtacgagatcctgctgggcaaggccaccctgtacgccgtgctggtgtctgccctggtgctgatggctatggtcaagcggaaggacagccggggacgcgccaagagaagcggatctggcgtgaagcagaccctgaatttcgacctgctgaagctggctggcgacgtggaatccaacccaggccctactagtatggactggatttggcgcatccttttccttgtcggcgctgctaccggcgcgcattccgggccccagctccagctgcaagagtctggacctggcctggtcaagcctagcgagacactgagcctgacctgtaccgtgtccggcgatagcatcagcagcggcgattactactggggctggatcagacagcctcctggcaaaggactggaatggatcggccacatctactacagcggcgtgacctactacaaccccagcctgaagtccagagtgaccatcagcgtggacaccagccggaaccagttctccctgaagctgtctagcgtgacagccgccgataccgccgtgtactactgcaccagagaggacagcagcaactggcggagtagaggccagggaacactggtcacagttagctctggatccggcggaggcggaagtggaggcggaggatctggcggcggaggctctttcgaacaggtgcaactggtgcagtctggggccgaagtgaagaaacctggggcctctgtgaaggtgtcctgcaaagccagcggctacacctttaccaactacgacatcaactgggtccgacaggctccaggccaaggactggaatggatcggctggatctatcctggcgacggcagcaccaagtacaacgagaagttcaaggccaaggccacactgaccgccgataccagcacaagcaccgcctacatggaactgcggagcctgagaagcgacgacaccgccgtgtactattgtgcctccggctacgaggacgctatggactattggggccagggcaccaccgtgacagtgtctagtacgcgtgaggacctgaagaacgtgttcccacctgaggtggccgtgttcgagcctagcgaggccgagatcagccacacccagaaagccaccctcgtgtgcctggctaccggcttctaccccgaccatgtggaactgtcttggtgggtcaacggcaaagaggtgcacagcggcgtgtgtaccgacccccagccactgaaagaacagcccgccctgaacgacagccggtactgcctgagcagcagactgagagtgtccgccaccttctggcagaacccccggaaccacttcagatgccaggtgcagttctacggcctgagcgagaacgacgagtggacccaggacagagccaagcccgtgacccagatcgtgtctgccgaagcctggggcagagccgattgcgacgtgaagctggtggaaaagagcttcgagacagacaccaacctgaacttccagaacctgagcgtgatcggcttcagaatcctgctgctgaaagtggccggctttaacctgctgatgaccctgcggctgtggtccagc

SEQ ID NO: 4880 - DNA, 2685 bp, synthetic construct
  source 1..2685: mol_type = other DNA
atggccttaccagtgaccgccttgctcctgccgctggccttgctgctccacgccgccaggccggaagtgcagctggttgaatctggcggaggactggttcagcctggcggatctctgagactgtcttgtgccgccagcggcttcagcttcagcgacttttggatgagctgggtccgacaggcccctggcaaaggacttgaatgggtcgccacaatcagccaggccggcagcgagaaggactacgtggactctgtgaagggcagattcaccatcagccgggacaacgccaagaagtccctgtacctccagatgaacagcctgagagccgaggacaccgccgtgtactattgtgcctctggcgtgtacagcttcgactacagaggccagggcaccctggtcacagtctcttctggtaccggcggaggcggatctggcggcggaggtagcggtggcggaggatctgaattcgacatcgtgatgacccagacacctctgagcctgagcgtgacacctggacagcctgccagcattagctgcaagagcagccagtctctgctggacggcgacggcaagacctacctgaattggctgctccagaagcctggacagagccctcagcggctgatctacctggtgtccaagctggatagcggcgtgcccgatagattttctggcagcggctctggcaccgacttcaccctgaagatcagcagagtggaagccgaggacgtgggcgtgtactactgttggcagggcacacacttccccagaacattcggccagggcacaaagctggaaatcaaactcgagatccagaaccctgatcctgccgtgtaccagctgcgggatagcaagagcagcgacaagagcgtgtgtctgttcaccgacttcgacagccagaccaacgtgtcccagagcaaggactccgacgtgtacatcaccgataagtgcgtgctggacatgcggagcatggacttcaagagcaactccgccgtggcctggtccaacaagtccgatttcgcctgcgccaacgccttcaacaacagcattatccccgaggacacattcttcccaagccccgagagcagctgcggctttaccagcgagagctaccagcagggcgtgctgagcgccaccatcctgtacgagatcctgctgggcaaggccaccctgtacgccgtgctggtgtctgccctggtgctgatggctatggtcaagcggaaggacagccggggacgcgccaagagaagcggatctggcgtgaagcagaccctgaatttcgacctgctgaagctggctggcgacgtggaatccaacccaggccctactagtatggactggatttggcgcatccttttccttgtcggcgctgctaccggcgcgcattccgggccccagctccagctgcaagagtctggacctggcctggtcaagcctagcgagacactgagcctgacctgtaccgtgtccggcgatagcatcagcagcggcgattactactggggctggatcagacagcctcctggcaaaggactggaatggatcggccacatctactacagcggcgtgacctactacaaccccagcctgaagtccagagtgaccatcagcgtggacaccagccggaaccagttctccctgaagctgtctagcgtgacagccgccgataccgccgtgtactactgcaccagagaggacagcagcaactggcggagtagaggccagggaacactggtcacagttagctctggatccggcggaggcggaagtggaggcggaggatctggcggcggaggctctttcgaacaagtgcaactggttcagagcggagccgaagtgaagaaacctggggcctctgtgaaggtgtcctgcaaggccagcggctacaccttcaaggacacctacatccactgggtccgacaggcccctggacaaggacttgagtggatgggcagaatcgaccccgccaacggcaacaccaaatacgaccccaagttccagggcagagtgaccatgaccagagacaccagcatcagcaccgcctacatggaactgagccggctgagatccgatgacaccgccgtgtactattgcgctagaagaggcggagtggattggggccagggaacactggttaccgtgtctagtacgcgtgaggacctgaagaacgtgttcccacctgaggtggccgtgttcgagcctagcgaggccgagatcagccacacccagaaagccaccctcgtgtgcctggctaccggcttctaccccgaccatgtggaactgtcttggtgggtcaacggcaaagaggtgcacagcggcgtgtgtaccgacccccagccactgaaagaacagcccgccctgaacgacagccggtactgcctgagcagcagactgagagtgtccgccaccttctggcagaacccccggaaccacttcagatgccaggtgcagttctacggcctgagcgagaacgacgagtggacccaggacagagccaagcccgtgacccagatcgtgtctgccgaagcctggggcagagccgattgcgacgtgaagctggtggaaaagagcttcgagacagacaccaacctgaacttccagaacctgagcgtgatcggcttcagaatcctgctgctgaaagtggccggctttaacctgctgatgaccctgcggctgtggtccagc

SEQ ID NO: 4881 - DNA, 2688 bp, synthetic construct
  source 1..2688: mol_type = other DNA
atggccttaccagtgaccgccttgctcctgccgctggccttgctgctccacgccgccaggccggaagtgcagctggttgaatctggcggaggactggttcagcctggcggatctctgagactgtcttgtgccgccagcggcttcagcttcagcgacttttggatgagctgggtccgacaggcccctggcaaaggacttgaatgggtcgccacaatcagccaggccggcagcgagaaggactacgtggactctgtgaagggcagattcaccatcagccgggacaacgccaagaagtccctgtacctccagatgaacagcctgagagccgaggacaccgccgtgtactattgtgcctctggcgtgtacagcttcgactacagaggccagggcaccctggtcacagtctcttctggtaccggcggaggcggatctggcggcggaggtagcggtggcggaggatctgaattcgacatccagatgacacagagccctagcagcctgtctgccagcgtgggagacagagtgaccatcacatgcaaggccagccaggatgtgtctacagccgtggcctggttccagcagaagcctggaaaagcccctaagctgctgatctacagccccagctacagatacaccggcgtgcccagcagattttctggcagcggctctggcaccgacttcaccctgacaatatccagcctccagcctgaggacttcacctactactgccagcagctctacagcaccccttacacattcggccagggcaccaaggtggaaatcaaactcgagatccagaaccctgatcctgccgtgtaccagctgcgggatagcaagagcagcgacaagagcgtgtgtctgttcaccgacttcgacagccagaccaacgtgtcccagagcaaggactccgacgtgtacatcaccgataagtgcgtgctggacatgcggagcatggacttcaagagcaactccgccgtggcctggtccaacaagtccgatttcgcctgcgccaacgccttcaacaacagcattatccccgaggacacattcttcccaagccccgagagcagctgcggctttaccagcgagagctaccagcagggcgtgctgagcgccaccatcctgtacgagatcctgctgggcaaggccaccctgtacgccgtgctggtgtctgccctggtgctgatggctatggtcaagcggaaggacagccggggacgcgccaagagaagcggatctggcgtgaagcagaccctgaatttcgacctgctgaagctggctggcgacgtggaatccaacccaggccctactagtatggactggatttggcgcatccttttccttgtcggcgctgctaccggcgcgcattccgggccccagctccagctgcaagagtctggacctggcctggtcaagcctagcgagacactgagcctgacctgtaccgtgtccggcgatagcatcagcagcggcgattactactggggctggatcagacagcctcctggcaaaggactggaatggatcggccacatctactacagcggcgtgacctactacaaccccagcctgaagtccagagtgaccatcagcgtggacaccagccggaaccagttctccctgaagctgtctagcgtgacagccgccgataccgccgtgtactactgcaccagagaggacagcagcaactggcggagtagaggccagggaacactggtcacagttagctctggatccggcggaggcggaagtggaggcggaggatctggcggcggaggctctttcgaagaagtgcaactggttcagagcggagccgaagtgaagaaacctggggcctctgtgaaggtgtcctgcaaagccagcggctacacctttaccgactactacctggacgtggtcgtgcggcaagctcctggacaaggactggaatggatcggcagagtgaacccctacaacggcggcaccatctacaaccagaaattcaagggaagagtgaccctgaccagagacaccagcacctccacagcctacctggaactgagcagcctgagaagcgaagataccgccgtgtactactgcgccagggaccactacagatatgaccctctgctggactactggggccagggaaccctggttacagtgtctagtacgcgtgaggacctgaagaacgtgttcccacctgaggtggccgtgttcgagcctagcgaggccgagatcagccacacccagaaagccaccctcgtgtgcctggctaccggcttctaccccgaccatgtggaactgtcttggtgggtcaacggcaaagaggtgcacagcggcgtgtgtaccgacccccagccactgaaagaacagcccgccctgaacgacagccggtactgcctgagcagcagactgagagtgtccgccaccttctggcagaacccccggaaccacttcagatgccaggtgcagttctacggcctgagcgagaacgacgagtggacccaggacagagccaagcccgtgacccagatcgtgtctgccgaagcctggggcagagccgattgcgacgtgaagctggtggaaaagagcttcgagacagacaccaacctgaacttccagaacctgagcgtgatcggcttcagaatcctgctgctgaaagtggccggctttaacctgctgatgaccctgcggctgtggtccagc

SEQ ID NO: 4882 - DNA, 2706 bp, synthetic construct
  source 1..2706: mol_type = other DNA
atggccttaccagtgaccgccttgctcctgccgctggccttgctgctccacgccgccaggccggaagtgcagctggttgaatctggcggaggactggttcagcctggcggatctctgagactgtcttgtgccgccagcggcttcagcttcagcgacttttggatgagctgggtccgacaggcccctggcaaaggacttgaatgggtcgccacaatcagccaggccggcagcgagaaggactacgtggactctgtgaagggcagattcaccatcagccgggacaacgccaagaagtccctgtacctccagatgaacagcctgagagccgaggacaccgccgtgtactattgtgcctctggcgtgtacagcttcgactacagaggccagggcaccctggtcacagtctcttctggtaccggcggaggcggatctggcggcggaggtagcggtggcggaggatctgaattcgacatccagatgacacagagccctagcagcctgtctgccagcgtgggagacagagtgaccatcacctgtagagccagccagagcgtgtccaccagcagctacaactacatgcactggtatcagcagaagcccggcaagcctcctaagctgctgattaagtacgccagcaacctggaaagcggcgtgcccagcagattttctggcagcggctctggcaccgacttcaccctgacaatatccagcctccagcctgaggacttcgccacctactactgtcagcactcctgggagatccctctgacattcggccagggcaccaaggtggaaatcaaactcgagatccagaaccctgatcctgccgtgtaccagctgcgggatagcaagagcagcgacaagagcgtgtgtctgttcaccgacttcgacagccagaccaacgtgtcccagagcaaggactccgacgtgtacatcaccgataagtgcgtgctggacatgcggagcatggacttcaagagcaactccgccgtggcctggtccaacaagtccgatttcgcctgcgccaacgccttcaacaacagcattatccccgaggacacattcttcccaagccccgagagcagctgcggctttaccagcgagagctaccagcagggcgtgctgagcgccaccatcctgtacgagatcctgctgggcaaggccaccctgtacgccgtgctggtgtctgccctggtgctgatggctatggtcaagcggaaggacagccggggacgcgccaagagaagcggatctggcgtgaagcagaccctgaatttcgacctgctgaagctggctggcgacgtggaatccaacccaggccctactagtatggactggatttggcgcatccttttccttgtcggcgctgctaccggcgcgcattccgggccccagctccagctgcaagagtctggacctggcctggtcaagcctagcgagacactgagcctgacctgtaccgtgtccggcgatagcatcagcagcggcgattactactggggctggatcagacagcctcctggcaaaggactggaatggatcggccacatctactacagcggcgtgacctactacaaccccagcctgaagtccagagtgaccatcagcgtggacaccagccggaaccagttctccctgaagctgtctagcgtgacagccgccgataccgccgtgtactactgcaccagagaggacagcagcaactggcggagtagaggccagggaacactggtcacagttagctctggatccggcggaggcggaagtggaggcggaggatctggcggcggaggctctttcgaagaagtgcaactggttcagagcggagccgaagtgaagaaacctggggcctctgtgaaggtgtcctgcaaggccagcggctacagcttcaccgactattatatgcactgggtccgacaggctccaggccagggacttgagtggatcggcagaatcaacccctacaacggcgctgccttctacagccagaacttcaaggatagagtgaccctgaccgtggacaccagcaccagcacagcctacctggaactgagcagcctgagaagcgaggacaccgccgtgtactactgcgccattgagagaggcgctgacctggaaggctacgctatggattattggggccagggaaccctggtcaccgtgtcatctacgcgtgaggacctgaagaacgtgttcccacctgaggtggccgtgttcgagcctagcgaggccgagatcagccacacccagaaagccaccctcgtgtgcctggctaccggcttctaccccgaccatgtggaactgtcttggtgggtcaacggcaaagaggtgcacagcggcgtgtgtaccgacccccagccactgaaagaacagcccgccctgaacgacagccggtactgcctgagcagcagactgagagtgtccgccaccttctggcagaacccccggaaccacttcagatgccaggtgcagttctacggcctgagcgagaacgacgagtggacccaggacagagccaagcccgtgacccagatcgtgtctgccgaagcctggggcagagccgattgcgacgtgaagctggtggaaaagagcttcgagacagacaccaacctgaacttccagaacctgagcgtgatcggcttcagaatcctgctgctgaaagtggccggctttaacctgctgatgaccctgcggctgtggtccagc

SEQ ID NO: 4883 - DNA, 2700 bp, synthetic construct
  source 1..2700: mol_type = other DNA
atggccttaccagtgaccgccttgctcctgccgctggccttgctgctccacgccgccaggccggaagtgcagctggttgaatctggcggaggactggttcagcctggcggatctctgagactgtcttgtgccgccagcggcttcagcttcagcgacttttggatgagctgggtccgacaggcccctggcaaaggacttgaatgggtcgccacaatcagccaggccggcagcgagaaggactacgtggactctgtgaagggcagattcaccatcagccgggacaacgccaagaagtccctgtacctccagatgaacagcctgagagccgaggacaccgccgtgtactattgtgcctctggcgtgtacagcttcgactacagaggccagggcaccctggtcacagtctcttctggtaccggcggaggcggatctggcggcggaggtagcggtggcggaggatctgaattcgagatcgtgctgacacagtctccagccacactgagcgcttctccaggcgagagagtgaccctgacctgtagagccagcagcaacgtgatctccagctacgtgcactggtatcagcagaagcctggcagcagccccagactgtttctgtacagcaccagcaatctggcctccggcgtgccaagcagattttctggctctggcagcggcaccgacttcacctttaccatctctagcctggaagccgaggacgccgccacctactactgtcagcagtacagcggctaccctctgaccttcggccagggcacaagactggaaatcaaactcgagatccagaaccctgatcctgccgtgtaccagctgcgggatagcaagagcagcgacaagagcgtgtgtctgttcaccgacttcgacagccagaccaacgtgtcccagagcaaggactccgacgtgtacatcaccgataagtgcgtgctggacatgcggagcatggacttcaagagcaactccgccgtggcctggtccaacaagtccgatttcgcctgcgccaacgccttcaacaacagcattatccccgaggacacattcttcccaagccccgagagcagctgcggctttaccagcgagagctaccagcagggcgtgctgagcgccaccatcctgtacgagatcctgctgggcaaggccaccctgtacgccgtgctggtgtctgccctggtgctgatggctatggtcaagcggaaggacagccggggacgcgccaagagaagcggatctggcgtgaagcagaccctgaatttcgacctgctgaagctggctggcgacgtggaatccaacccaggccctactagtatggactggatttggcgcatccttttccttgtcggcgctgctaccggcgcgcattccgggccccagctccagctgcaagagtctggacctggcctggtcaagcctagcgagacactgagcctgacctgtaccgtgtccggcgatagcatcagcagcggcgattactactggggctggatcagacagcctcctggcaaaggactggaatggatcggccacatctactacagcggcgtgacctactacaaccccagcctgaagtccagagtgaccatcagcgtggacaccagccggaaccagttctccctgaagctgtctagcgtgacagccgccgataccgccgtgtactactgcaccagagaggacagcagcaactggcggagtagaggccagggaacactggtcacagttagctctggatccggcggaggcggaagtggaggcggaggatctggcggcggaggctctttcgaacaagttcagctgcaagagtctggccctggcctggtcaagcctagcgaaacactgagcctgacctgcgccgtgtctggctactctatcaccagcgcctactattggaactggatcagacagcctcctggcaaaggactggaatggatcggctacatcagctacgacggcagaaacaactacaaccccagcctgaagaaccggatcaccatcaatcccgacaccagcaagaaccagttcagcctccagctgaacagcgtgacccctgaggataccgccgtgtactactgtgccagagaaggcgactacgacgtgggcaactactacgctatggactactggggccagggaaccctggtcacagtctcttctacgcgtgaggacctgaagaacgtgttcccacctgaggtggccgtgttcgagcctagcgaggccgagatcagccacacccagaaagccaccctcgtgtgcctggctaccggcttctaccccgaccatgtggaactgtcttggtgggtcaacggcaaagaggtgcacagcggcgtgtgtaccgacccccagccactgaaagaacagcccgccctgaacgacagccggtactgcctgagcagcagactgagagtgtccgccaccttctggcagaacccccggaaccacttcagatgccaggtgcagttctacggcctgagcgagaacgacgagtggacccaggacagagccaagcccgtgacccagatcgtgtctgccgaagcctggggcagagccgattgcgacgtgaagctggtggaaaagagcttcgagacagacaccaacctgaacttccagaacctgagcgtgatcggcttcagaatcctgctgctgaaagtggccggctttaacctgctgatgaccctgcggctgtggtccagc

SEQ ID NO: 4884 - DNA, 2700 bp, synthetic construct
  source 1..2700: mol_type = other DNA
atggccttaccagtgaccgccttgctcctgccgctggccttgctgctccacgccgccaggccggaagtgcagctggttgaatctggcggaggactggttcagcctggcggatctctgagactgtcttgtgccgccagcggcttcagcttcagcgacttttggatgagctgggtccgacaggcccctggcaaaggacttgaatgggtcgccacaatcagccaggccggcagcgagaaggactacgtggactctgtgaagggcagattcaccatcagccgggacaacgccaagaagtccctgtacctccagatgaacagcctgagagccgaggacaccgccgtgtactattgtgcctctggcgtgtacagcttcgactacagaggccagggcaccctggtcacagtctcttctggtaccggcggaggcggatctggcggcggaggtagcggtggcggaggatctgaattcgagatcgtgctgacacagtctcccgccacactgtcactgtctccaggcgaaagagccacactgagctgtagagccagcagcaacgtgatctccagctacgtgcactggtatcagcagaagcctggacaggcccctcggctgctgatctacagcacaagcaatctggcctctggcatccccgccagattttctggctctggaagcggcaccgacttcaccctgaccataagcagcctggaacctgaggacttcgccgtgtactactgccagcagtatagcggctaccctctgaccttcggccagggcacaagactggaaatcaaactcgagatccagaaccctgatcctgccgtgtaccagctgcgggatagcaagagcagcgacaagagcgtgtgtctgttcaccgacttcgacagccagaccaacgtgtcccagagcaaggactccgacgtgtacatcaccgataagtgcgtgctggacatgcggagcatggacttcaagagcaactccgccgtggcctggtccaacaagtccgatttcgcctgcgccaacgccttcaacaacagcattatccccgaggacacattcttcccaagccccgagagcagctgcggctttaccagcgagagctaccagcagggcgtgctgagcgccaccatcctgtacgagatcctgctgggcaaggccaccctgtacgccgtgctggtgtctgccctggtgctgatggctatggtcaagcggaaggacagccggggacgcgccaagagaagcggatctggcgtgaagcagaccctgaatttcgacctgctgaagctggctggcgacgtggaatccaacccaggccctactagtatggactggatttggcgcatccttttccttgtcggcgctgctaccggcgcgcattccgggccccagctccagctgcaagagtctggacctggcctggtcaagcctagcgagacactgagcctgacctgtaccgtgtccggcgatagcatcagcagcggcgattactactggggctggatcagacagcctcctggcaaaggactggaatggatcggccacatctactacagcggcgtgacctactacaaccccagcctgaagtccagagtgaccatcagcgtggacaccagccggaaccagttctccctgaagctgtctagcgtgacagccgccgataccgccgtgtactactgcaccagagaggacagcagcaactggcggagtagaggccagggaacactggtcacagttagctctggatccggcggaggcggaagtggaggcggaggatctggcggcggaggctctttcgaagaagtgcaactggtggaaagtggcggcggactggtgcaacctggaagaagcctgagactgtcctgtgccgccagcggctactctatcacaagcgcctactactggaactgggtccgacaggctcctggcaaaggactggaatgggtgtcctacatcagctacgacggcagaaacaactacaaccccagcctgaagaaccgcttcaccatcagccgggacaacgccaagaagtccctgtacctccagatgaacagcctgagagccgaggacacagccctgtactattgcgccaaagagggcgactacgacgtcggcaactactacgctatggactactggggccagggaaccaccgtgactgtctcttctacgcgtgaggacctgaagaacgtgttcccacctgaggtggccgtgttcgagcctagcgaggccgagatcagccacacccagaaagccaccctcgtgtgcctggctaccggcttctaccccgaccatgtggaactgtcttggtgggtcaacggcaaagaggtgcacagcggcgtgtgtaccgacccccagccactgaaagaacagcccgccctgaacgacagccggtactgcctgagcagcagactgagagtgtccgccaccttctggcagaacccccggaaccacttcagatgccaggtgcagttctacggcctgagcgagaacgacgagtggacccaggacagagccaagcccgtgacccagatcgtgtctgccgaagcctggggcagagccgattgcgacgtgaagctggtggaaaagagcttcgagacagacaccaacctgaacttccagaacctgagcgtgatcggcttcagaatcctgctgctgaaagtggccggctttaacctgctgatgaccctgcggctgtggtccagc

SEQ ID NO: 4885 - DNA, 2697 bp, synthetic construct
  source 1..2697: mol_type = other DNA
atggccttaccagtgaccgccttgctcctgccgctggccttgctgctccacgccgccaggccggaagtgcagctggttgaatctggcggaggactggttcagcctggcggatctctgagactgtcttgtgccgccagcggcttcagcttcagcgacttttggatgagctgggtccgacaggcccctggcaaaggacttgaatgggtcgccacaatcagccaggccggcagcgagaaggactacgtggactctgtgaagggcagattcaccatcagccgggacaacgccaagaagtccctgtacctccagatgaacagcctgagagccgaggacaccgccgtgtactattgtgcctctggcgtgtacagcttcgactacagaggccagggcaccctggtcacagtctcttctggtaccggcggaggcggatctggcggcggaggtagcggtggcggaggatctgaattcgacgtggtcatgacacagaccccactgagcctgcctgtgtctctgggagatcaggccagcatctcctgtagaagcagccagagcctggtgcacagcaacggcaacacctacctgcggtggtatctccagaagcctggacagagccccaaggtgctgatctacaaggtgtccaacagagtgtccggcgtgcccgatagattttctggcagcggctctggcaccgacttcaccctgaagatcaatagagtggaagccgaggacctgggcgtgtacttctgtagccagagcacccatgtgccttggacctttggcggaggcaccaagctggaaatcaagctcgagatccagaaccctgatcctgccgtgtaccagctgcgggatagcaagagcagcgacaagagcgtgtgtctgttcaccgacttcgacagccagaccaacgtgtcccagagcaaggactccgacgtgtacatcaccgataagtgcgtgctggacatgcggagcatggacttcaagagcaactccgccgtggcctggtccaacaagtccgatttcgcctgcgccaacgccttcaacaacagcattatccccgaggacacattcttcccaagccccgagagcagctgcggctttaccagcgagagctaccagcagggcgtgctgagcgccaccatcctgtacgagatcctgctgggcaaggccaccctgtacgccgtgctggtgtctgccctggtgctgatggctatggtcaagcggaaggacagccggggacgcgccaagagaagcggatctggcgtgaagcagaccctgaatttcgacctgctgaagctggctggcgacgtggaatccaacccaggccctactagtatggactggatttggcgcatccttttccttgtcggcgctgctaccggcgcgcattccgggccccagctccagctgcaagagtctggacctggcctggtcaagcctagcgagacactgagcctgacctgtaccgtgtccggcgatagcatcagcagcggcgattactactggggctggatcagacagcctcctggcaaaggactggaatggatcggccacatctactacagcggcgtgacctactacaaccccagcctgaagtccagagtgaccatcagcgtggacaccagccggaaccagttctccctgaagctgtctagcgtgacagccgccgataccgccgtgtactactgcaccagagaggacagcagcaactggcggagtagaggccagggaacactggtcacagttagctctggatccggcggaggcggaagtggaggcggaggatctggcggcggaggctctttcgaaggcgtgaagctggacgagacaggcggaggacttgttcaacctggcggagccatgaagctgagctgtgtgaccagcggctttaccttcggccactactggatgaactgggtccgacagtcccctgagaaaggactggaatgggtcgcccagttcagaaacaagccctacaactacgaaacctactacagcgacagcgtgaagggcagattcaccatcagccgggacgacagcaagtccagcgtgtacctccagatgaacaacctgcgcgtggaagataccggcatctactactgtaccggggccagctacggcatggaatatctcggccagggcaccagcgtgaccgtgtctacaacgcgtgaggacctgaagaacgtgttcccacctgaggtggccgtgttcgagcctagcgaggccgagatcagccacacccagaaagccaccctcgtgtgcctggctaccggcttctaccccgaccatgtggaactgtcttggtgggtcaacggcaaagaggtgcacagcggcgtgtgtaccgacccccagccactgaaagaacagcccgccctgaacgacagccggtactgcctgagcagcagactgagagtgtccgccaccttctggcagaacccccggaaccacttcagatgccaggtgcagttctacggcctgagcgagaacgacgagtggacccaggacagagccaagcccgtgacccagatcgtgtctgccgaagcctggggcagagccgattgcgacgtgaagctggtggaaaagagcttcgagacagacaccaacctgaacttccagaacctgagcgtgatcggcttcagaatcctgctgctgaaagtggccggctttaacctgctgatgaccctgcggctgtggtccagc

SEQ ID NO: 4886 - DNA, 2715 bp, synthetic construct
  source 1..2715: mol_type = other DNA
atggccttaccagtgaccgccttgctcctgccgctggccttgctgctccacgccgccaggccggaagtgcagctggttgaatctggcggaggactggttcagcctggcggatctctgagactgtcttgtgccgccagcggcttcagcttcagcgacttttggatgagctgggtccgacaggcccctggcaaaggacttgaatgggtcgccacaatcagccaggccggcagcgagaaggactacgtggactctgtgaagggcagattcaccatcagccgggacaacgccaagaagtccctgtacctccagatgaacagcctgagagccgaggacaccgccgtgtactattgtgcctctggcgtgtacagcttcgactacagaggccagggcaccctggtcacagtctcttctggtaccggcggaggcggatctggcggcggaggtagcggtggcggaggatctgaattccaggtgcaactggtggaatctggcggcaatctggttcagcctggcggctctctgagactgtcttgtgccgccagcggcttcaccttcggcagcttttctatgagctgggtccgacaagctcctggcggaggacttgaatgggtggcaggactgtctgccagaagcagcctgacacactacgccgactctgtgaagggcagattcaccatcagccgggacaacgccaagaacagcgtgtacctccagatgaacagcctgagagtggaagataccgccgtgtactactgcgccagaagaagctacgacagcagcggctactggggccacttctacagctacatggatgtgtggggccagggcaccctggttacagtttctctcgagatccagaaccctgatcctgccgtgtaccagctgcgggatagcaagagcagcgacaagagcgtgtgtctgttcaccgacttcgacagccagaccaacgtgtcccagagcaaggactccgacgtgtacatcaccgataagtgcgtgctggacatgcggagcatggacttcaagagcaactccgccgtggcctggtccaacaagtccgatttcgcctgcgccaacgccttcaacaacagcattatccccgaggacacattcttcccaagccccgagagcagctgcggctttaccagcgagagctaccagcagggcgtgctgagcgccaccatcctgtacgagatcctgctgggcaaggccaccctgtacgccgtgctggtgtctgccctggtgctgatggctatggtcaagcggaaggacagccggggacgcgccaagagaagcggatctggcgtgaagcagaccctgaatttcgacctgctgaagctggctggcgacgtggaatccaacccaggccctactagtatggactggatttggcgcatccttttccttgtcggcgctgctaccggcgcgcattccgggccccagctccagctgcaagagtctggacctggcctggtcaagcctagcgagacactgagcctgacctgtaccgtgtccggcgatagcatcagcagcggcgattactactggggctggatcagacagcctcctggcaaaggactggaatggatcggccacatctactacagcggcgtgacctactacaaccccagcctgaagtccagagtgaccatcagcgtggacaccagccggaaccagttctccctgaagctgtctagcgtgacagccgccgataccgccgtgtactactgcaccagagaggacagcagcaactggcggagtagaggccagggaacactggtcacagttagctctggatccggcggaggcggaagtggaggcggaggatctggcggcggaggctctttcgaatctgtgctgacccagcctagctccgtgtctgctgctcctggacagaaagtgaccatctcctgtagcggcagcaccagcaacatcggcaacaactacgtgtcctggtatcagcagcaccccggcaaggcccctaagctgatgatctacgacgtgtccaagaggcccagcggcgtgccagatagattttccggcagcaagagcggcaacagcgccagcctggatattagcggactccagtctgaggacgaggccgactactattgcgccgcctgggatgatagcctgagcgagtttctgtttggcaccggcaccaagctgacagtgcttggaacgcgtgaggacctgaagaacgtgttcccacctgaggtggccgtgttcgagcctagcgaggccgagatcagccacacccagaaagccaccctcgtgtgcctggctaccggcttctaccccgaccatgtggaactgtcttggtgggtcaacggcaaagaggtgcacagcggcgtgtgtaccgacccccagccactgaaagaacagcccgccctgaacgacagccggtactgcctgagcagcagactgagagtgtccgccaccttctggcagaacccccggaaccacttcagatgccaggtgcagttctacggcctgagcgagaacgacgagtggacccaggacagagccaagcccgtgacccagatcgtgtctgccgaagcctggggcagagccgattgcgacgtgaagctggtggaaaagagcttcgagacagacaccaacctgaacttccagaacctgagcgtgatcggcttcagaatcctgctgctgaaagtggccggctttaacctgctgatgaccctgcggctgtggtccagc

SEQ ID NO: 4887 - DNA, 2700 bp, synthetic construct
  source 1..2700: mol_type = other DNA
atggccttaccagtgaccgccttgctcctgccgctggccttgctgctccacgccgccaggccggaagtgcagctggttgaatctggcggaggactggttcagcctggcggatctctgagactgtcttgtgccgccagcggcttcagcttcagcgacttttggatgagctgggtccgacaggcccctggcaaaggacttgaatgggtcgccacaatcagccaggccggcagcgagaaggactacgtggactctgtgaagggcagattcaccatcagccgggacaacgccaagaagtccctgtacctccagatgaacagcctgagagccgaggacaccgccgtgtactattgtgcctctggcgtgtacagcttcgactacagaggccagggcaccctggtcacagtctcttctggtaccggcggaggcggatctggcggcggaggtagcggtggcggaggatctgaattcgacgtggtcatgacacagagcccttctagcctgtctgccagcgtgggcgacagagtgacaatcacctgtcagagcagcctggacatcagccactacctgaactggtatcagcagaagcccggcaaggcccctaagctgctgatctacgacgccagcaatctggaaaccggcgtgcccagcagattttctggcagcggaagcggcacccacttcaccttcacaatatccagcctccagcctgaggacttcgccacctactactgccagcagtacgacaacctgcctctgacctttggcggaggcaccaagctggaaatcaagagactcgagatccagaaccctgatcctgccgtgtaccagctgcgggatagcaagagcagcgacaagagcgtgtgtctgttcaccgacttcgacagccagaccaacgtgtcccagagcaaggactccgacgtgtacatcaccgataagtgcgtgctggacatgcggagcatggacttcaagagcaactccgccgtggcctggtccaacaagtccgatttcgcctgcgccaacgccttcaacaacagcattatccccgaggacacattcttcccaagccccgagagcagctgcggctttaccagcgagagctaccagcagggcgtgctgagcgccaccatcctgtacgagatcctgctgggcaaggccaccctgtacgccgtgctggtgtctgccctggtgctgatggctatggtcaagcggaaggacagccggggacgcgccaagagaagcggatctggcgtgaagcagaccctgaatttcgacctgctgaagctggctggcgacgtggaatccaacccaggccctactagtatggactggatttggcgcatccttttccttgtcggcgctgctaccggcgcgcattccgggccccagctccagctgcaagagtctggacctggcctggtcaagcctagcgagacactgagcctgacctgtaccgtgtccggcgatagcatcagcagcggcgattactactggggctggatcagacagcctcctggcaaaggactggaatggatcggccacatctactacagcggcgtgacctactacaaccccagcctgaagtccagagtgaccatcagcgtggacaccagccggaaccagttctccctgaagctgtctagcgtgacagccgccgataccgccgtgtactactgcaccagagaggacagcagcaactggcggagtagaggccagggaacactggtcacagttagctctggatccggcggaggcggaagtggaggcggaggatctggcggcggaggctctttcgaacaagttcaactggttcaatcaggcggaggcgtggtgcaacctggtggctctctgagagtgtcttgtgctgcctctggcgtgaccctgagcgactatggaatgcactgggtccgacaggcccctggcaaaggacttgagtgggtcgccttcatcagaaacgacggcagcgacaagtattacgccgacagcgtgaagggcagattcaccatcagccgggacaacagcgagaaaaccgtgtctctccagatgtctagcctgagagccgaggacaccgccgtgtactactgtgccaagaatggcgagagcggccctctggactactggtatctggatctgtggggcagaggcaccctggtcacagtctcttctacgcgtgaggacctgaagaacgtgttcccacctgaggtggccgtgttcgagcctagcgaggccgagatcagccacacccagaaagccaccctcgtgtgcctggctaccggcttctaccccgaccatgtggaactgtcttggtgggtcaacggcaaagaggtgcacagcggcgtgtgtaccgacccccagccactgaaagaacagcccgccctgaacgacagccggtactgcctgagcagcagactgagagtgtccgccaccttctggcagaacccccggaaccacttcagatgccaggtgcagttctacggcctgagcgagaacgacgagtggacccaggacagagccaagcccgtgacccagatcgtgtctgccgaagcctggggcagagccgattgcgacgtgaagctggtggaaaagagcttcgagacagacaccaacctgaacttccagaacctgagcgtgatcggcttcagaatcctgctgctgaaagtggccggctttaacctgctgatgaccctgcggctgtggtccagc

SEQ ID NO: 4888 - DNA, 2712 bp, synthetic construct
  source 1..2712: mol_type = other DNA
atggccttaccagtgaccgccttgctcctgccgctggccttgctgctccacgccgccaggccggaagtgcagctggttgaatctggcggaggactggttcagcctggcggatctctgagactgtcttgtgccgccagcggcttcagcttcagcgacttttggatgagctgggtccgacaggcccctggcaaaggacttgaatgggtcgccacaatcagccaggccggcagcgagaaggactacgtggactctgtgaagggcagattcaccatcagccgggacaacgccaagaagtccctgtacctccagatgaacagcctgagagccgaggacaccgccgtgtactattgtgcctctggcgtgtacagcttcgactacagaggccagggcaccctggtcacagtctcttctggtaccggcggaggcggatctggcggcggaggtagcggtggcggaggatctgaattcagctacgagctgacacagcctccatccgtgtctggcacacctggacagagagtggctatctcctgtagcggcagcagcagcaacatcggcaccagaatggtcacctggtatcagcacgtgccaggcacagcccctaagctgctgatcttcaacaacaaccagcggcctagcggcgtgcccgatagattttctgccagcaagagcggcacaagcgccagcctggctatcatcggactccagtctgacgacgaggccgactactactgtgccacctgggacgacaacgtgaagtcctacgtgttcggcaccggcaccaaagtgacagtgcttggaagtagactcgagatccagaaccctgatcctgccgtgtaccagctgcgggatagcaagagcagcgacaagagcgtgtgtctgttcaccgacttcgacagccagaccaacgtgtcccagagcaaggactccgacgtgtacatcaccgataagtgcgtgctggacatgcggagcatggacttcaagagcaactccgccgtggcctggtccaacaagtccgatttcgcctgcgccaacgccttcaacaacagcattatccccgaggacacattcttcccaagccccgagagcagctgcggctttaccagcgagagctaccagcagggcgtgctgagcgccaccatcctgtacgagatcctgctgggcaaggccaccctgtacgccgtgctggtgtctgccctggtgctgatggctatggtcaagcggaaggacagccggggacgcgccaagagaagcggatctggcgtgaagcagaccctgaatttcgacctgctgaagctggctggcgacgtggaatccaacccaggccctactagtatggactggatttggcgcatccttttccttgtcggcgctgctaccggcgcgcattccgggccccagctccagctgcaagagtctggacctggcctggtcaagcctagcgagacactgagcctgacctgtaccgtgtccggcgatagcatcagcagcggcgattactactggggctggatcagacagcctcctggcaaaggactggaatggatcggccacatctactacagcggcgtgacctactacaaccccagcctgaagtccagagtgaccatcagcgtggacaccagccggaaccagttctccctgaagctgtctagcgtgacagccgccgataccgccgtgtactactgcaccagagaggacagcagcaactggcggagtagaggccagggaacactggtcacagttagctctggatccggcggaggcggaagtggaggcggaggatctggcggcggaggctctttcgaacttgaaatggcccaggttcagctccagcagtggggagctggactgctgaagcctagcgagacactgagcctgacctgtgctgtgtacggcggcagcttcagcggctactactggtcctggatcagacagcctcctggcaaaggactggaatggatcggcgagatcaaccacagcggctccaccaactacaaccccagcctgaagtccagagtgaccatcagcgtggacaccagcaagaaccagttctccctgaagctgagcagcgtgacagccgctgataccgccgtgtactattgcgctagagcccctcagtcttggtacgtgggagatgtgtggggccagggcacactggttacagtgtcatctacgcgtgaggacctgaagaacgtgttcccacctgaggtggccgtgttcgagcctagcgaggccgagatcagccacacccagaaagccaccctcgtgtgcctggctaccggcttctaccccgaccatgtggaactgtcttggtgggtcaacggcaaagaggtgcacagcggcgtgtgtaccgacccccagccactgaaagaacagcccgccctgaacgacagccggtactgcctgagcagcagactgagagtgtccgccaccttctggcagaacccccggaaccacttcagatgccaggtgcagttctacggcctgagcgagaacgacgagtggacccaggacagagccaagcccgtgacccagatcgtgtctgccgaagcctggggcagagccgattgcgacgtgaagctggtggaaaagagcttcgagacagacaccaacctgaacttccagaacctgagcgtgatcggcttcagaatcctgctgctgaaagtggccggctttaacctgctgatgaccctgcggctgtggtccagc

SEQ ID NO: 4889 - DNA, 2703 bp, synthetic construct
  source 1..2703: mol_type = other DNA
atggccttaccagtgaccgccttgctcctgccgctggccttgctgctccacgccgccaggccggaagtgcagctggttgaatctggcggaggactggttcagcctggcggatctctgagactgtcttgtgccgccagcggcttcagcttcagcgacttttggatgagctgggtccgacaggcccctggcaaaggacttgaatgggtcgccacaatcagccaggccggcagcgagaaggactacgtggactctgtgaagggcagattcaccatcagccgggacaacgccaagaagtccctgtacctccagatgaacagcctgagagccgaggacaccgccgtgtactattgtgcctctggcgtgtacagcttcgactacagaggccagggcaccctggtcacagtctcttctggtaccggcggaggcggatctggcggcggaggtagcggtggcggaggatctgaattccagtctgtgctgacacagcctcctagcctgtctgtggcccctggaaagacagccagcatcacatgcggcggcaacaacatcggcatgaagtccgtgcactggtatcagcagaggccaggacaggctcctgtgctggtcatctactacgacagcgacagaccctctggcatccccggcagattttccggcagcaactctggcaataccgccacactgaccatctccagagtggaagctggcgacgaggccgactactactgccaagtgtgggataccaccggcgatcaccctggctatgtgtttggcaccggcaccaaagtgacagtgcttctcgagatccagaaccctgatcctgccgtgtaccagctgcgggatagcaagagcagcgacaagagcgtgtgtctgttcaccgacttcgacagccagaccaacgtgtcccagagcaaggactccgacgtgtacatcaccgataagtgcgtgctggacatgcggagcatggacttcaagagcaactccgccgtggcctggtccaacaagtccgatttcgcctgcgccaacgccttcaacaacagcattatccccgaggacacattcttcccaagccccgagagcagctgcggctttaccagcgagagctaccagcagggcgtgctgagcgccaccatcctgtacgagatcctgctgggcaaggccaccctgtacgccgtgctggtgtctgccctggtgctgatggctatggtcaagcggaaggacagccggggacgcgccaagagaagcggatctggcgtgaagcagaccctgaatttcgacctgctgaagctggctggcgacgtggaatccaacccaggccctactagtatggactggatttggcgcatccttttccttgtcggcgctgctaccggcgcgcattccgggccccagctccagctgcaagagtctggacctggcctggtcaagcctagcgagacactgagcctgacctgtaccgtgtccggcgatagcatcagcagcggcgattactactggggctggatcagacagcctcctggcaaaggactggaatggatcggccacatctactacagcggcgtgacctactacaaccccagcctgaagtccagagtgaccatcagcgtggacaccagccggaaccagttctccctgaagctgtctagcgtgacagccgccgataccgccgtgtactactgcaccagagaggacagcagcaactggcggagtagaggccagggaacactggtcacagttagctctggatccggcggaggcggaagtggaggcggaggatctggcggcggaggctctttcgaacaagttcaactggttcagagcggagccgaagtgaagaaacctggcagcagcgtgaaggtgtcctgcaaagcaagcggcggcacctttagcagctacgccatctcttgggtccgacaggcacctggacaaggactggaatggatgggcggcatcatccccatcttcggcacagccaattacgcccagaaattccagggcagagtgaccatcaccgccgacgagtctacaagcaccgcctacatggaactgagcagcctgagaagcgaggacaccgccgtgtactattgtgccagaggcgtgtacggctacagcggctctgccccttatgatgagtggggccagggaaccctggtcaccgtttcttctacgcgtgaggacctgaagaacgtgttcccacctgaggtggccgtgttcgagcctagcgaggccgagatcagccacacccagaaagccaccctcgtgtgcctggctaccggcttctaccccgaccatgtggaactgtcttggtgggtcaacggcaaagaggtgcacagcggcgtgtgtaccgacccccagccactgaaagaacagcccgccctgaacgacagccggtactgcctgagcagcagactgagagtgtccgccaccttctggcagaacccccggaaccacttcagatgccaggtgcagttctacggcctgagcgagaacgacgagtggacccaggacagagccaagcccgtgacccagatcgtgtctgccgaagcctggggcagagccgattgcgacgtgaagctggtggaaaagagcttcgagacagacaccaacctgaacttccagaacctgagcgtgatcggcttcagaatcctgctgctgaaagtggccggctttaacctgctgatgaccctgcggctgtggtccagc

SEQ ID NO: 4890 - DNA, 2697 bp, synthetic construct
  source 1..2697: mol_type = other DNA
atggccttaccagtgaccgccttgctcctgccgctggccttgctgctccacgccgccaggccggaagtgcagctggttgaatctggcggaggactggttcagcctggcggatctctgagactgtcttgtgccgccagcggcttcagcttcagcgacttttggatgagctgggtccgacaggcccctggcaaaggacttgaatgggtcgccacaatcagccaggccggcagcgagaaggactacgtggactctgtgaagggcagattcaccatcagccgggacaacgccaagaagtccctgtacctccagatgaacagcctgagagccgaggacaccgccgtgtactattgtgcctctggcgtgtacagcttcgactacagaggccagggcaccctggtcacagtctcttctggtaccggcggaggcggatctggcggcggaggtagcggtggcggaggatctgaattcgaggtgcaactggttgagtctggcggaggactggtgcagcctggaagaagcctgagactgtcttgtgccgccagcggcttcaccttcgacgattatgccatgcactgggtccgacaggcccctggcaaaggacttgaatgggtgtccggcatctcctggaacagcggctctatcggctacgccgattccgtgaagggcagattcaccatcagccgggacaacgccaagaacagcctgtacctccagatgaactccctgagagccgaggacacagccctgtactactgcgccaaagacaaaggcggaggctactacgacttttggagcggcagcgattattggggccagggcacactggtcacagtgtctagcctcgagatccagaaccctgatcctgccgtgtaccagctgcgggatagcaagagcagcgacaagagcgtgtgtctgttcaccgacttcgacagccagaccaacgtgtcccagagcaaggactccgacgtgtacatcaccgataagtgcgtgctggacatgcggagcatggacttcaagagcaactccgccgtggcctggtccaacaagtccgatttcgcctgcgccaacgccttcaacaacagcattatccccgaggacacattcttcccaagccccgagagcagctgcggctttaccagcgagagctaccagcagggcgtgctgagcgccaccatcctgtacgagatcctgctgggcaaggccaccctgtacgccgtgctggtgtctgccctggtgctgatggctatggtcaagcggaaggacagccggggacgcgccaagagaagcggatctggcgtgaagcagaccctgaatttcgacctgctgaagctggctggcgacgtggaatccaacccaggccctactagtatggactggatttggcgcatccttttccttgtcggcgctgctaccggcgcgcattccgggccccagctccagctgcaagagtctggacctggcctggtcaagcctagcgagacactgagcctgacctgtaccgtgtccggcgatagcatcagcagcggcgattactactggggctggatcagacagcctcctggcaaaggactggaatggatcggccacatctactacagcggcgtgacctactacaaccccagcctgaagtccagagtgaccatcagcgtggacaccagccggaaccagttctccctgaagctgtctagcgtgacagccgccgataccgccgtgtactactgcaccagagaggacagcagcaactggcggagtagaggccagggaacactggtcacagttagctctggatccggcggaggcggaagtggaggcggaggatctggcggcggaggctctttcgaatcttctgagctgacacaggaccctgccgtgtctgttgctctgggccagacagtgcggattacctgtcagggcgatagcctgagaagctactacgcctcctggtatcagcagaagccaggccaggctcctgtgctggtcatctacggcaagaacaacagacccagcggcatccccgatagattcagcggaagcagctctggcaataccgccagcctgacaattactggcgctcaggccgaggacgaggccgactactactgcaacagcagagatagcagcggctgggttttcggcggaggcacaaaactgacagtgctgacgcgtgaggacctgaagaacgtgttcccacctgaggtggccgtgttcgagcctagcgaggccgagatcagccacacccagaaagccaccctcgtgtgcctggctaccggcttctaccccgaccatgtggaactgtcttggtgggtcaacggcaaagaggtgcacagcggcgtgtgtaccgacccccagccactgaaagaacagcccgccctgaacgacagccggtactgcctgagcagcagactgagagtgtccgccaccttctggcagaacccccggaaccacttcagatgccaggtgcagttctacggcctgagcgagaacgacgagtggacccaggacagagccaagcccgtgacccagatcgtgtctgccgaagcctggggcagagccgattgcgacgtgaagctggtggaaaagagcttcgagacagacaccaacctgaacttccagaacctgagcgtgatcggcttcagaatcctgctgctgaaagtggccggctttaacctgctgatgaccctgcggctgtggtccagc

SEQ ID NO: 4891 - DNA, 2724 bp, synthetic construct
  source 1..2724: mol_type = other DNA
atggccttaccagtgaccgccttgctcctgccgctggccttgctgctccacgccgccaggccggaagtgcagctggttgaatctggcggaggactggttcagcctggcggatctctgagactgtcttgtgccgccagcggcttcagcttcagcgacttttggatgagctgggtccgacaggcccctggcaaaggacttgaatgggtcgccacaatcagccaggccggcagcgagaaggactacgtggactctgtgaagggcagattcaccatcagccgggacaacgccaagaagtccctgtacctccagatgaacagcctgagagccgaggacaccgccgtgtactattgtgcctctggcgtgtacagcttcgactacagaggccagggcaccctggtcacagtctcttctggtaccggcggaggcggatctggcggcggaggtagcggtggcggaggatctgaattcgaagtgcagctccagcagtctggacctggcctggttaagcctagccagacactgagcctgacctgtgccatcagcggcgatagcgtgctgagcaacagcgacacctggaactggatcagacagagccctagcagaggactggaatggctgggcagaacctaccacagaagcacttggtacgacgactacgccagctctgtgcggggcagagtgtccatcaatgtggacaccagcaagaaccagtacagcctgcaactgaacgccgtgacacctgaggataccggcgtgtactactgcgccagagacagactccaggacggcaactcttggagcgacgcctttgatgtgtggggccagggcacaatggtcaccgtttctagcctcgagatccagaaccctgatcctgccgtgtaccagctgcgggatagcaagagcagcgacaagagcgtgtgtctgttcaccgacttcgacagccagaccaacgtgtcccagagcaaggactccgacgtgtacatcaccgataagtgcgtgctggacatgcggagcatggacttcaagagcaactccgccgtggcctggtccaacaagtccgatttcgcctgcgccaacgccttcaacaacagcattatccccgaggacacattcttcccaagccccgagagcagctgcggctttaccagcgagagctaccagcagggcgtgctgagcgccaccatcctgtacgagatcctgctgggcaaggccaccctgtacgccgtgctggtgtctgccctggtgctgatggctatggtcaagcggaaggacagccggggacgcgccaagagaagcggatctggcgtgaagcagaccctgaatttcgacctgctgaagctggctggcgacgtggaatccaacccaggccctactagtatggactggatttggcgcatccttttccttgtcggcgctgctaccggcgcgcattccgggccccagctccagctgcaagagtctggacctggcctggtcaagcctagcgagacactgagcctgacctgtaccgtgtccggcgatagcatcagcagcggcgattactactggggctggatcagacagcctcctggcaaaggactggaatggatcggccacatctactacagcggcgtgacctactacaaccccagcctgaagtccagagtgaccatcagcgtggacaccagccggaaccagttctccctgaagctgtctagcgtgacagccgccgataccgccgtgtactactgcaccagagaggacagcagcaactggcggagtagaggccagggaacactggtcacagttagctctggatccggcggaggcggaagtggaggcggaggatctggcggcggaggctctttcgaacaatctgctctgacacagcctgccagcgtgtcaggatctcctggacagagcatcaccatctcttgcaccggcaccagctctgatgtcggcggctacaattacgtgtcctggtatcagcagcaccccggcaaggcccctaagctgatgatctacgacgtgtccaacagacccagcggcgtgtccaatagattctccggcagcaagagcggcaacaccgccagcctgacaatttctggactgcaagccgaggacgaggccgactactactgtagcagctacaccagcagcagcacactggtgtacgtgttcggcacaggcaccaaagtgaccgtgcttacgcgtgaggacctgaagaacgtgttcccacctgaggtggccgtgttcgagcctagcgaggccgagatcagccacacccagaaagccaccctcgtgtgcctggctaccggcttctaccccgaccatgtggaactgtcttggtgggtcaacggcaaagaggtgcacagcggcgtgtgtaccgacccccagccactgaaagaacagcccgccctgaacgacagccggtactgcctgagcagcagactgagagtgtccgccaccttctggcagaacccccggaaccacttcagatgccaggtgcagttctacggcctgagcgagaacgacgagtggacccaggacagagccaagcccgtgacccagatcgtgtctgccgaagcctggggcagagccgattgcgacgtgaagctggtggaaaagagcttcgagacagacaccaacctgaacttccagaacctgagcgtgatcggcttcagaatcctgctgctgaaagtggccggctttaacctgctgatgaccctgcggctgtggtccagc

SEQ ID NO: 4892 - DNA, 2658 bp, synthetic construct
  source 1..2658: mol_type = other DNA
atggccttaccagtgaccgccttgctcctgccgctggccttgctgctccacgccgccaggccggaagtgcagctggttgaatctggcggaggactggttcagcctggcggatctctgagactgtcttgtgccgccagcggcttcagcttcagcgacttttggatgagctgggtccgacaggcccctggcaaaggacttgaatgggtcgccacaatcagccaggccggcagcgagaaggactacgtggactctgtgaagggcagattcaccatcagccgggacaacgccaagaagtccctgtacctccagatgaacagcctgagagccgaggacaccgccgtgtactattgtgcctctggcgtgtacagcttcgactacagaggccagggcaccctggtcacagtctcttctggtaccggcggaggcggatctggcggcggaggtagcggtggcggaggatctgaattccaggtgcaactggttcagtctggggccgaagtgaagaaacctggggcctctgtgaaggtgtcctgcaaggcttccggctacacctttaccagctacgacatcaactgggtccgacaggccacaggccaaggactggaatggatgggctggatgaaccccaacagcggcaataccggctacgcccagaaattccagggcagagtgaccatgaccagaaacaccagcatcagcaccgcctacatggaactgagcagcctgagaagcgaggacaccgccgtgtactattgcgccagaggcgacagcaccaaggtggaaatcaaactcgagatccagaaccctgatcctgccgtgtaccagctgcgggatagcaagagcagcgacaagagcgtgtgtctgttcaccgacttcgacagccagaccaacgtgtcccagagcaaggactccgacgtgtacatcaccgataagtgcgtgctggacatgcggagcatggacttcaagagcaactccgccgtggcctggtccaacaagtccgatttcgcctgcgccaacgccttcaacaacagcattatccccgaggacacattcttcccaagccccgagagcagctgcggctttaccagcgagagctaccagcagggcgtgctgagcgccaccatcctgtacgagatcctgctgggcaaggccaccctgtacgccgtgctggtgtctgccctggtgctgatggctatggtcaagcggaaggacagccggggacgcgccaagagaagcggatctggcgtgaagcagaccctgaatttcgacctgctgaagctggctggcgacgtggaatccaacccaggccctactagtatggactggatttggcgcatccttttccttgtcggcgctgctaccggcgcgcattccgggccccagctccagctgcaagagtctggacctggcctggtcaagcctagcgagacactgagcctgacctgtaccgtgtccggcgatagcatcagcagcggcgattactactggggctggatcagacagcctcctggcaaaggactggaatggatcggccacatctactacagcggcgtgacctactacaaccccagcctgaagtccagagtgaccatcagcgtggacaccagccggaaccagttctccctgaagctgtctagcgtgacagccgccgataccgccgtgtactactgcaccagagaggacagcagcaactggcggagtagaggccagggaacactggtcacagttagctctggatccggcggaggcggaagtggaggcggaggatctggcggcggaggctctttcgaacaatctgtgctgacccagcctagatccgtgtctggctctcctggacagagcgtgaccatctcttgtaccggcaccagctctgatgtcggcggctacaattacgtgtcctggtatcagcagcaccccggcgaagcccctaagctgattatctacgacgccgacaagcggcccagcggcatcagcaatagattcagctctggcaagagcggcaacaccgccagcctgacaatcagcggactccaggtggaagatgaggccgactactactgctgctcctatgccggcggaagcacctgggttttcggaggcggtacaaaagtgaccgtgctgacgcgtgaggacctgaagaacgtgttcccacctgaggtggccgtgttcgagcctagcgaggccgagatcagccacacccagaaagccaccctcgtgtgcctggctaccggcttctaccccgaccatgtggaactgtcttggtgggtcaacggcaaagaggtgcacagcggcgtgtgtaccgacccccagccactgaaagaacagcccgccctgaacgacagccggtactgcctgagcagcagactgagagtgtccgccaccttctggcagaacccccggaaccacttcagatgccaggtgcagttctacggcctgagcgagaacgacgagtggacccaggacagagccaagcccgtgacccagatcgtgtctgccgaagcctggggcagagccgattgcgacgtgaagctggtggaaaagagcttcgagacagacaccaacctgaacttccagaacctgagcgtgatcggcttcagaatcctgctgctgaaagtggccggctttaacctgctgatgaccctgcggctgtggtccagc

SEQ ID NO: 4893 - DNA, 2724 bp, synthetic construct
  source 1..2724: mol_type = other DNA
atggccttaccagtgaccgccttgctcctgccgctggccttgctgctccacgccgccaggccggaagtgcagctggttgaatctggcggaggactggttcagcctggcggatctctgagactgtcttgtgccgccagcggcttcagcttcagcgacttttggatgagctgggtccgacaggcccctggcaaaggacttgaatgggtcgccacaatcagccaggccggcagcgagaaggactacgtggactctgtgaagggcagattcaccatcagccgggacaacgccaagaagtccctgtacctccagatgaacagcctgagagccgaggacaccgccgtgtactattgtgcctctggcgtgtacagcttcgactacagaggccagggcaccctggtcacagtctcttctggtaccggcggaggcggatctggcggcggaggtagcggtggcggaggatctgaattcgaagtgcagctccagcagtctggacctggcctggttaagcctagccagacactgagcctgacctgtgccatcagcggcgatagcgtgtcctctaatagcgccgcctggaactggatcagacagagccctagcagaggactggaatggctgggcagaacctactaccgcagcaagtggtacagcgactacgccgtgtccgtgaagtcccggatcaccatcaatcccgacaccagcaagaaccagttcagcctgcaactgaacagcgtgacccctgaggataccgccgtgtactactgcgccagagatccctacgacttttggagcggctaccccgacgcctttgacatctggggacagggcacaatggtcaccgtttctagcctcgagatccagaaccctgatcctgccgtgtaccagctgcgggatagcaagagcagcgacaagagcgtgtgtctgttcaccgacttcgacagccagaccaacgtgtcccagagcaaggactccgacgtgtacatcaccgataagtgcgtgctggacatgcggagcatggacttcaagagcaactccgccgtggcctggtccaacaagtccgatttcgcctgcgccaacgccttcaacaacagcattatccccgaggacacattcttcccaagccccgagagcagctgcggctttaccagcgagagctaccagcagggcgtgctgagcgccaccatcctgtacgagatcctgctgggcaaggccaccctgtacgccgtgctggtgtctgccctggtgctgatggctatggtcaagcggaaggacagccggggacgcgccaagagaagcggatctggcgtgaagcagaccctgaatttcgacctgctgaagctggctggcgacgtggaatccaacccaggccctactagtatggactggatttggcgcatccttttccttgtcggcgctgctaccggcgcgcattccgggccccagctccagctgcaagagtctggacctggcctggtcaagcctagcgagacactgagcctgacctgtaccgtgtccggcgatagcatcagcagcggcgattactactggggctggatcagacagcctcctggcaaaggactggaatggatcggccacatctactacagcggcgtgacctactacaaccccagcctgaagtccagagtgaccatcagcgtggacaccagccggaaccagttctccctgaagctgtctagcgtgacagccgccgataccgccgtgtactactgcaccagagaggacagcagcaactggcggagtagaggccagggaacactggtcacagttagctctggatccggcggaggcggaagtggaggcggaggatctggcggcggaggctctttcgaacaatctgctctgacacagcctgccagcgtgtcaggatctcctggacagagcatcaccatctcttgcaccggcaccagctctgatgtcggcggctacaattacgtgtcctggtatcagcagcaccccggcaaggcccctaaagtgattatcagcgaagtgaacaacagacccagcggcgtgtcccacagattcagcggctctaagtctggcaacaccgccagcctgacaatctctggactgcaagccgaggacgaggccgactacttctgtagcagctacaccagcggcagaaccctgtacgtgttcggcacaggcagcaaagtgacagtgctgggaacgcgtgaggacctgaagaacgtgttcccacctgaggtggccgtgttcgagcctagcgaggccgagatcagccacacccagaaagccaccctcgtgtgcctggctaccggcttctaccccgaccatgtggaactgtcttggtgggtcaacggcaaagaggtgcacagcggcgtgtgtaccgacccccagccactgaaagaacagcccgccctgaacgacagccggtactgcctgagcagcagactgagagtgtccgccaccttctggcagaacccccggaaccacttcagatgccaggtgcagttctacggcctgagcgagaacgacgagtggacccaggacagagccaagcccgtgacccagatcgtgtctgccgaagcctggggcagagccgattgcgacgtgaagctggtggaaaagagcttcgagacagacaccaacctgaacttccagaacctgagcgtgatcggcttcagaatcctgctgctgaaagtggccggctttaacctgctgatgaccctgcggctgtggtccagc

SEQ ID NO: 4894 - DNA, 2721 bp, synthetic construct
  source 1..2721: mol_type = other DNA
atggccttaccagtgaccgccttgctcctgccgctggccttgctgctccacgccgccaggccggaagtgcagctggttgaatctggcggaggactggttcagcctggcggatctctgagactgtcttgtgccgccagcggcttcagcttcagcgacttttggatgagctgggtccgacaggcccctggcaaaggacttgaatgggtcgccacaatcagccaggccggcagcgagaaggactacgtggactctgtgaagggcagattcaccatcagccgggacaacgccaagaagtccctgtacctccagatgaacagcctgagagccgaggacaccgccgtgtactattgtgcctctggcgtgtacagcttcgactacagaggccagggcaccctggtcacagtctcttctggtaccggcggaggcggatctggcggcggaggtagcggtggcggaggatctgaattccaatctgctctgacacagcctgccagcgcctctggatctcctggacagagcgtgaccatctcctgtaccggcacctcttctgatgtcggcggctacaactacgtgtcctggtatcagcagcaccccggcaaggcccctaagctgatgatctacgacgtgtccaacagacccagcggcgtgtccaatagattctccggcagcaagagcggcaacaccgccagcctgacaatttctggactgcaagccgaggacgaggccgactactactgtagcagctacaccagcagcagcacactgtacgtgttcggcacaggcacccagctcacagttcttctcgagatccagaaccctgatcctgccgtgtaccagctgcgggatagcaagagcagcgacaagagcgtgtgtctgttcaccgacttcgacagccagaccaacgtgtcccagagcaaggactccgacgtgtacatcaccgataagtgcgtgctggacatgcggagcatggacttcaagagcaactccgccgtggcctggtccaacaagtccgatttcgcctgcgccaacgccttcaacaacagcattatccccgaggacacattcttcccaagccccgagagcagctgcggctttaccagcgagagctaccagcagggcgtgctgagcgccaccatcctgtacgagatcctgctgggcaaggccaccctgtacgccgtgctggtgtctgccctggtgctgatggctatggtcaagcggaaggacagccggggacgcgccaagagaagcggatctggcgtgaagcagaccctgaatttcgacctgctgaagctggctggcgacgtggaatccaacccaggccctactagtatggactggatttggcgcatccttttccttgtcggcgctgctaccggcgcgcattccgggccccagctccagctgcaagagtctggacctggcctggtcaagcctagcgagacactgagcctgacctgtaccgtgtccggcgatagcatcagcagcggcgattactactggggctggatcagacagcctcctggcaaaggactggaatggatcggccacatctactacagcggcgtgacctactacaaccccagcctgaagtccagagtgaccatcagcgtggacaccagccggaaccagttctccctgaagctgtctagcgtgacagccgccgataccgccgtgtactactgcaccagagaggacagcagcaactggcggagtagaggccagggaacactggtcacagttagctctggatccggcggaggcggaagtggaggcggaggatctggcggcggaggctctttcgaagaagtgcagctccagcagtctggacctggcctggttaagcctagccagacactgagcctgacctgtgccatcagcggcgattccatgctgagcaacagcgacacctggaactggatcagacagagccccagcagaggcctggaatggctgggcagaacataccacagaagcacttggtacgacgactacgccagctctgtgcggggcagagtgtccatcaatgtggacaccagcaagaaccagtacagcctgcaactgaacgccgtgacacctgaggataccggcgtgtactactgtgccagagtgcggctccaggacggcaattcttggagcgacgcctttgatgtgtggggccagggcacaatggtcaccgtttctagcacgcgtgaggacctgaagaacgtgttcccacctgaggtggccgtgttcgagcctagcgaggccgagatcagccacacccagaaagccaccctcgtgtgcctggctaccggcttctaccccgaccatgtggaactgtcttggtgggtcaacggcaaagaggtgcacagcggcgtgtgtaccgacccccagccactgaaagaacagcccgccctgaacgacagccggtactgcctgagcagcagactgagagtgtccgccaccttctggcagaacccccggaaccacttcagatgccaggtgcagttctacggcctgagcgagaacgacgagtggacccaggacagagccaagcccgtgacccagatcgtgtctgccgaagcctggggcagagccgattgcgacgtgaagctggtggaaaagagcttcgagacagacaccaacctgaacttccagaacctgagcgtgatcggcttcagaatcctgctgctgaaagtggccggctttaacctgctgatgaccctgcggctgtggtccagc

SEQ ID NO: 4895 - DNA, 2721 bp, synthetic construct
  source 1..2721: mol_type = other DNA
atggccttaccagtgaccgccttgctcctgccgctggccttgctgctccacgccgccaggccggaagtgcagctggttgaatctggcggaggactggttcagcctggcggatctctgagactgtcttgtgccgccagcggcttcagcttcagcgacttttggatgagctgggtccgacaggcccctggcaaaggacttgaatgggtcgccacaatcagccaggccggcagcgagaaggactacgtggactctgtgaagggcagattcaccatcagccgggacaacgccaagaagtccctgtacctccagatgaacagcctgagagccgaggacaccgccgtgtactattgtgcctctggcgtgtacagcttcgactacagaggccagggcaccctggtcacagtctcttctggtaccggcggaggcggatctggcggcggaggtagcggtggcggaggatctgaattcgacgtgatgctgacccagacaccactgagcctgcctgtgtctctgggcgatcaggccagcatctcctgtagaagcagccagagcatcctgcacagcaccggcgatacctacctggaatggtatctccagaagcctggacagagccccaagctgctgattaacaaggtgtccaaccggctgagcggcgtgcccgatagattttctggcagcggctctggcaccgacttcaccctgaagatcagcagagtggaagccgaggacctgggcgtgtactactgcttccaaggcagccatgttccttggacctttggcggaggcaccaagctggaaatcaagagagctgacgccgctcctaccgtgtccatctttcctctcgagatccagaaccctgatcctgccgtgtaccagctgcgggatagcaagagcagcgacaagagcgtgtgtctgttcaccgacttcgacagccagaccaacgtgtcccagagcaaggactccgacgtgtacatcaccgataagtgcgtgctggacatgcggagcatggacttcaagagcaactccgccgtggcctggtccaacaagtccgatttcgcctgcgccaacgccttcaacaacagcattatccccgaggacacattcttcccaagccccgagagcagctgcggctttaccagcgagagctaccagcagggcgtgctgagcgccaccatcctgtacgagatcctgctgggcaaggccaccctgtacgccgtgctggtgtctgccctggtgctgatggctatggtcaagcggaaggacagccggggacgcgccaagagaagcggatctggcgtgaagcagaccctgaatttcgacctgctgaagctggctggcgacgtggaatccaacccaggccctactagtatggactggatttggcgcatccttttccttgtcggcgctgctaccggcgcgcattccgggccccagctccagctgcaagagtctggacctggcctggtcaagcctagcgagacactgagcctgacctgtaccgtgtccggcgatagcatcagcagcggcgattactactggggctggatcagacagcctcctggcaaaggactggaatggatcggccacatctactacagcggcgtgacctactacaaccccagcctgaagtccagagtgaccatcagcgtggacaccagccggaaccagttctccctgaagctgtctagcgtgacagccgccgataccgccgtgtactactgcaccagagaggacagcagcaactggcggagtagaggccagggaacactggtcacagttagctctggatccggcggaggcggaagtggaggcggaggatctggcggcggaggctctttcgaacaagtgaagctccagcagagcggccctagccttgtgaaacctggcgcttccgtgaagatgagctgcaaggccagcggctacaccttcaccgatttctacatgaaatgggtcaagcagagccacggcaagtctctggaatggatcggcgacatcaaccccaacatcggagacaccttctacaaccagaagttcaagggcaaagccacactgaccgtggacaagagcagcagcaccgcctacatgcagctcaacagcctgaccagcgaggacagcgccgtgtacttttgttccgtgggctacttcgacgtgtggggagccggaacaaccgtgacagtctcttctacgcgtgaggacctgaagaacgtgttcccacctgaggtggccgtgttcgagcctagcgaggccgagatcagccacacccagaaagccaccctcgtgtgcctggctaccggcttctaccccgaccatgtggaactgtcttggtgggtcaacggcaaagaggtgcacagcggcgtgtgtaccgacccccagccactgaaagaacagcccgccctgaacgacagccggtactgcctgagcagcagactgagagtgtccgccaccttctggcagaacccccggaaccacttcagatgccaggtgcagttctacggcctgagcgagaacgacgagtggacccaggacagagccaagcccgtgacccagatcgtgtctgccgaagcctggggcagagccgattgcgacgtgaagctggtggaaaagagcttcgagacagacaccaacctgaacttccagaacctgagcgtgatcggcttcagaatcctgctgctgaaagtggccggctttaacctgctgatgaccctgcggctgtggtccagc

SEQ ID NO: 4896 - DNA, 2709 bp, synthetic construct
  source 1..2709: mol_type = other DNA
atggccttaccagtgaccgccttgctcctgccgctggccttgctgctccacgccgccaggccggaagtgcagctggttgaatctggcggaggactggttcagcctggcggatctctgagactgtcttgtgccgccagcggcttcagcttcagcgacttttggatgagctgggtccgacaggcccctggcaaaggacttgaatgggtcgccacaatcagccaggccggcagcgagaaggactacgtggactctgtgaagggcagattcaccatcagccgggacaacgccaagaagtccctgtacctccagatgaacagcctgagagccgaggacaccgccgtgtactattgtgcctctggcgtgtacagcttcgactacagaggccagggcaccctggtcacagtctcttctggtaccggcggaggcggatctggcggcggaggtagcggtggcggaggatctgaattcgagatcgtgctgacacagtctcccgccacactgtcactgtctccaggcgaaagagccacactgagctgtagagccagccagagcgtgtccatctacctggcctggtatcagcagaagcctggacaggctccccggctgctgatctacgatgccagcaatagagccacaggcatccccgccagattttctggctctggcagcggcaccgatttcaccctgaccataagcagcctggaacctgaggacttcgccgtgtactactgccagcagagaagcaactggcctcctttcacattcggccctggcaccaaggtggacatcaaactcgagatccagaaccctgatcctgccgtgtaccagctgcgggatagcaagagcagcgacaagagcgtgtgtctgttcaccgacttcgacagccagaccaacgtgtcccagagcaaggactccgacgtgtacatcaccgataagtgcgtgctggacatgcggagcatggacttcaagagcaactccgccgtggcctggtccaacaagtccgatttcgcctgcgccaacgccttcaacaacagcattatccccgaggacacattcttcccaagccccgagagcagctgcggctttaccagcgagagctaccagcagggcgtgctgagcgccaccatcctgtacgagatcctgctgggcaaggccaccctgtacgccgtgctggtgtctgccctggtgctgatggctatggtcaagcggaaggacagccggggacgcgccaagagaagcggatctggcgtgaagcagaccctgaatttcgacctgctgaagctggctggcgacgtggaatccaacccaggccctactagtatggactggatttggcgcatccttttccttgtcggcgctgctaccggcgcgcattccgggccccagctccagctgcaagagtctggacctggcctggtcaagcctagcgagacactgagcctgacctgtaccgtgtccggcgatagcatcagcagcggcgattactactggggctggatcagacagcctcctggcaaaggactggaatggatcggccacatctactacagcggcgtgacctactacaaccccagcctgaagtccagagtgaccatcagcgtggacaccagccggaaccagttctccctgaagctgtctagcgtgacagccgccgataccgccgtgtactactgcaccagagaggacagcagcaactggcggagtagaggccagggaacactggtcacagttagctctggatccggcggaggcggaagtggaggcggaggatctggcggcggaggctctttcgaacaggtgcagcttgttgaaagcggaggcggagttgtgcagcctggcagaagtctgagactgtcttgtgccgccagcggcttcaccttcagcagctatggaatgcactgggtccgacaggcccctggcaaaggacttgaatgggttgccgtgatctgggacgacggcagcaacaagtattacgtggacagcgtgaagggcagattcaccatcagccgggacaacagcaagaacaccctgtacctccagatgaacagcctgagagccgaggacacagccgtgtattattgcgccagagatgactactacggcagcggctccttcaacagctactatggcacagacgtgtggggccagggcacaacagttaccgttagctctacgcgtgaggacctgaagaacgtgttcccacctgaggtggccgtgttcgagcctagcgaggccgagatcagccacacccagaaagccaccctcgtgtgcctggctaccggcttctaccccgaccatgtggaactgtcttggtgggtcaacggcaaagaggtgcacagcggcgtgtgtaccgacccccagccactgaaagaacagcccgccctgaacgacagccggtactgcctgagcagcagactgagagtgtccgccaccttctggcagaacccccggaaccacttcagatgccaggtgcagttctacggcctgagcgagaacgacgagtggacccaggacagagccaagcccgtgacccagatcgtgtctgccgaagcctggggcagagccgattgcgacgtgaagctggtggaaaagagcttcgagacagacaccaacctgaacttccagaacctgagcgtgatcggcttcagaatcctgctgctgaaagtggccggctttaacctgctgatgaccctgcggctgtggtccagc

SEQ ID NO: 4897 - DNA, 2664 bp, synthetic construct
  source 1..2664: mol_type = other DNA
atggccttaccagtgaccgccttgctcctgccgctggccttgctgctccacgccgccaggccggaagtgcagctggttgaatctggcggaggactggttcagcctggcggatctctgagactgtcttgtgccgccagcggcttcagcttcagcgacttttggatgagctgggtccgacaggcccctggcaaaggacttgaatgggtcgccacaatcagccaggccggcagcgagaaggactacgtggactctgtgaagggcagattcaccatcagccgggacaacgccaagaagtccctgtacctccagatgaacagcctgagagccgaggacaccgccgtgtactattgtgcctctggcgtgtacagcttcgactacagaggccagggcaccctggtcacagtctcttctggtaccggcggaggcggatctggcggcggaggtagcggtggcggaggatctgaattcgacatccagatgacacagagccctagcagcctgtctgccagcgtgggagacagagtgaccatcacctgtagagccagccagggcatctcttcttggctggcctggtatcagcagaagcccgagaaggcccctaagagcctgatctatgccgccagctctctccagagcggagtgcctagcagattttctggcagcggctccggcaccgatttcaccctgacaatatccagcctccagcctgaggacttcgccacctactactgccagcagtacaacagctacccctacaccttcggccagggcaccaagctggaaatcaaactcgagatccagaaccctgatcctgccgtgtaccagctgcgggatagcaagagcagcgacaagagcgtgtgtctgttcaccgacttcgacagccagaccaacgtgtcccagagcaaggactccgacgtgtacatcaccgataagtgcgtgctggacatgcggagcatggacttcaagagcaactccgccgtggcctggtccaacaagtccgatttcgcctgcgccaacgccttcaacaacagcattatccccgaggacacattcttcccaagccccgagagcagctgcggctttaccagcgagagctaccagcagggcgtgctgagcgccaccatcctgtacgagatcctgctgggcaaggccaccctgtacgccgtgctggtgtctgccctggtgctgatggctatggtcaagcggaaggacagccggggacgcgccaagagaagcggatctggcgtgaagcagaccctgaatttcgacctgctgaagctggctggcgacgtggaatccaacccaggccctactagtatggactggatttggcgcatccttttccttgtcggcgctgctaccggcgcgcattccgggccccagctccagctgcaagagtctggacctggcctggtcaagcctagcgagacactgagcctgacctgtaccgtgtccggcgatagcatcagcagcggcgattactactggggctggatcagacagcctcctggcaaaggactggaatggatcggccacatctactacagcggcgtgacctactacaaccccagcctgaagtccagagtgaccatcagcgtggacaccagccggaaccagttctccctgaagctgtctagcgtgacagccgccgataccgccgtgtactactgcaccagagaggacagcagcaactggcggagtagaggccagggaacactggtcacagttagctctggatccggcggaggcggaagtggaggcggaggatctggcggcggaggctctttcgaagaagtgcaactggttcaatctggcggcggactggttcatccaggcggttctctgagactgagctgtgccggctctggcttcaccttcagcacctacctgatgtactgggtccgacaggcccctggcaagacactggaatgggtgtccgctattggcagcggaggcgatacctactacgccgactctgtgaagggcagattcaccatcagccgggacaacgccaagaacagcctgtacctccagatgaactccctgagagccgaggacatggccgtgtactactgtgccagaggactcggctattggggccagggaacactggtcacagtgtcctctacgcgtgaggacctgaagaacgtgttcccacctgaggtggccgtgttcgagcctagcgaggccgagatcagccacacccagaaagccaccctcgtgtgcctggctaccggcttctaccccgaccatgtggaactgtcttggtgggtcaacggcaaagaggtgcacagcggcgtgtgtaccgacccccagccactgaaagaacagcccgccctgaacgacagccggtactgcctgagcagcagactgagagtgtccgccaccttctggcagaacccccggaaccacttcagatgccaggtgcagttctacggcctgagcgagaacgacgagtggacccaggacagagccaagcccgtgacccagatcgtgtctgccgaagcctggggcagagccgattgcgacgtgaagctggtggaaaagagcttcgagacagacaccaacctgaacttccagaacctgagcgtgatcggcttcagaatcctgctgctgaaagtggccggctttaacctgctgatgaccctgcggctgtggtccagc

SEQ ID NO: 4898 - DNA, 2721 bp, synthetic construct
  source 1..2721: mol_type = other DNA
atggccttaccagtgaccgccttgctcctgccgctggccttgctgctccacgccgccaggccggaagtgcagctggttgaatctggcggaggactggttcagcctggcggatctctgagactgtcttgtgccgccagcggcttcagcttcagcgacttttggatgagctgggtccgacaggcccctggcaaaggacttgaatgggtcgccacaatcagccaggccggcagcgagaaggactacgtggactctgtgaagggcagattcaccatcagccgggacaacgccaagaagtccctgtacctccagatgaacagcctgagagccgaggacaccgccgtgtactattgtgcctctggcgtgtacagcttcgactacagaggccagggcaccctggtcacagtctcttctggtaccggcggaggcggatctggcggcggaggtagcggtggcggaggatctgaattcctgcctgttctgacacagcctccatccgtgtctgtggcccctggaaagaccgccagaatcacatgcggcggcaacaacatcggcagcaagagcgtgcactggtatcagcagaagcctggacaggctcctgtgctggtggtgtacgacgacagcgatagacctagcggcatccccgagagattcagcggcagcaattccggcaataccgccacactgaccatcagcagagtggaagctggcgacgaggccgactactactgccaagtgtgggacagcagcagcgactacgtggtgtttggcggcggaacaaagctgacagtgcttctcgagatccagaaccctgatcctgccgtgtaccagctgcgggatagcaagagcagcgacaagagcgtgtgtctgttcaccgacttcgacagccagaccaacgtgtcccagagcaaggactccgacgtgtacatcaccgataagtgcgtgctggacatgcggagcatggacttcaagagcaactccgccgtggcctggtccaacaagtccgatttcgcctgcgccaacgccttcaacaacagcattatccccgaggacacattcttcccaagccccgagagcagctgcggctttaccagcgagagctaccagcagggcgtgctgagcgccaccatcctgtacgagatcctgctgggcaaggccaccctgtacgccgtgctggtgtctgccctggtgctgatggctatggtcaagcggaaggacagccggggacgcgccaagagaagcggatctggcgtgaagcagaccctgaatttcgacctgctgaagctggctggcgacgtggaatccaacccaggccctactagtatggactggatttggcgcatccttttccttgtcggcgctgctaccggcgcgcattccgggccccagctccagctgcaagagtctggacctggcctggtcaagcctagcgagacactgagcctgacctgtaccgtgtccggcgatagcatcagcagcggcgattactactggggctggatcagacagcctcctggcaaaggactggaatggatcggccacatctactacagcggcgtgacctactacaaccccagcctgaagtccagagtgaccatcagcgtggacaccagccggaaccagttctccctgaagctgtctagcgtgacagccgccgataccgccgtgtactactgcaccagagaggacagcagcaactggcggagtagaggccagggaacactggtcacagttagctctggatccggcggaggcggaagtggaggcggaggatctggcggcggaggctctttcgaagaagttcaactggtgcagagcggagccgaagtgaagaagccaggcgagagcctgaagattagctgcaaaggcagcggctacagcttcaccagctactggatcggctgggtccgacagatgcctggcaaaggactggaatggatgggcatcatctaccccggcgacagcgacaccagatacagccctagctttcagggccaagtgaccatctccgccgacaagagcatcagcacagcctacctccagtggtcctctctgaaggccagcgataccgccatgtactactgcgccagacaagtctggggatggcaaggcggcatgtaccccaggtctaactggtggtacaacctggactcttggggccagggcacactggtcacagtctcttctacgcgtgaggacctgaagaacgtgttcccacctgaggtggccgtgttcgagcctagcgaggccgagatcagccacacccagaaagccaccctcgtgtgcctggctaccggcttctaccccgaccatgtggaactgtcttggtgggtcaacggcaaagaggtgcacagcggcgtgtgtaccgacccccagccactgaaagaacagcccgccctgaacgacagccggtactgcctgagcagcagactgagagtgtccgccaccttctggcagaacccccggaaccacttcagatgccaggtgcagttctacggcctgagcgagaacgacgagtggacccaggacagagccaagcccgtgacccagatcgtgtctgccgaagcctggggcagagccgattgcgacgtgaagctggtggaaaagagcttcgagacagacaccaacctgaacttccagaacctgagcgtgatcggcttcagaatcctgctgctgaaagtggccggctttaacctgctgatgaccctgcggctgtggtccagc

SEQ ID NO: 4899 - DNA, 2700 bp, synthetic construct
  source 1..2700: mol_type = other DNA
atggccttaccagtgaccgccttgctcctgccgctggccttgctgctccacgccgccaggccggaagtgcagctggttgaatctggcggaggactggttcagcctggcggatctctgagactgtcttgtgccgccagcggcttcagcttcagcgacttttggatgagctgggtccgacaggcccctggcaaaggacttgaatgggtcgccacaatcagccaggccggcagcgagaaggactacgtggactctgtgaagggcagattcaccatcagccgggacaacgccaagaagtccctgtacctccagatgaacagcctgagagccgaggacaccgccgtgtactattgtgcctctggcgtgtacagcttcgactacagaggccagggcaccctggtcacagtctcttctggtaccggcggaggcggatctggcggcggaggtagcggtggcggaggatctgaattcgagctggtcatgacacagagccctgcttctctggccgtgtcactgggacagagagccaccatctcttgcagagccagcgagagcgtggacagctacggcaagagcttcatgcactggtatcagctcaagcccggccagcctcctaagctgctgatctacagagcctccaacctggaaagcggcgtgccagccagattttctggcagcggcagcagaaccgacttcaccctgaccattgatcccgtggaagccgatgatgccgccacctactactgccagcagaacaacgaggacccctggacatttggcggaggcaccaagctggaaatcaaactcgagatccagaaccctgatcctgccgtgtaccagctgcgggatagcaagagcagcgacaagagcgtgtgtctgttcaccgacttcgacagccagaccaacgtgtcccagagcaaggactccgacgtgtacatcaccgataagtgcgtgctggacatgcggagcatggacttcaagagcaactccgccgtggcctggtccaacaagtccgatttcgcctgcgccaacgccttcaacaacagcattatccccgaggacacattcttcccaagccccgagagcagctgcggctttaccagcgagagctaccagcagggcgtgctgagcgccaccatcctgtacgagatcctgctgggcaaggccaccctgtacgccgtgctggtgtctgccctggtgctgatggctatggtcaagcggaaggacagccggggacgcgccaagagaagcggatctggcgtgaagcagaccctgaatttcgacctgctgaagctggctggcgacgtggaatccaacccaggccctactagtatggactggatttggcgcatccttttccttgtcggcgctgctaccggcgcgcattccgggccccagctccagctgcaagagtctggacctggcctggtcaagcctagcgagacactgagcctgacctgtaccgtgtccggcgatagcatcagcagcggcgattactactggggctggatcagacagcctcctggcaaaggactggaatggatcggccacatctactacagcggcgtgacctactacaaccccagcctgaagtccagagtgaccatcagcgtggacaccagccggaaccagttctccctgaagctgtctagcgtgacagccgccgataccgccgtgtactactgcaccagagaggacagcagcaactggcggagtagaggccagggaacactggtcacagttagctctggatccggcggaggcggaagtggaggcggaggatctggcggcggaggctctttcgaagaagtgcagctcgaacagtctggccccgagcttgtgaaacctggcgcttccgtgaagatgagctgcaaggccagcggctacaccttcaccaactactacatgaaatgggtcaagcagagccacggcaagtccctggaatggatcggcgatctgaaccccaacaacggcgacaccttctacaaccagaagttcaagggcaaagccacactgaccgtggacaagagcagcaacaccgcctacatgcagctcaactccctgaccagcgaggacagcgccgtgtactactgtgccagaaccggcagatacgaagagaacgctatggactactggggccagggcacaagcgtgacagtctcttctacgcgtgaggacctgaagaacgtgttcccacctgaggtggccgtgttcgagcctagcgaggccgagatcagccacacccagaaagccaccctcgtgtgcctggctaccggcttctaccccgaccatgtggaactgtcttggtgggtcaacggcaaagaggtgcacagcggcgtgtgtaccgacccccagccactgaaagaacagcccgccctgaacgacagccggtactgcctgagcagcagactgagagtgtccgccaccttctggcagaacccccggaaccacttcagatgccaggtgcagttctacggcctgagcgagaacgacgagtggacccaggacagagccaagcccgtgacccagatcgtgtctgccgaagcctggggcagagccgattgcgacgtgaagctggtggaaaagagcttcgagacagacaccaacctgaacttccagaacctgagcgtgatcggcttcagaatcctgctgctgaaagtggccggctttaacctgctgatgaccctgcggctgtggtccagc

SEQ ID NO: 4900 - DNA, 2682 bp, synthetic construct
  source 1..2682: mol_type = other DNA
atggccttaccagtgaccgccttgctcctgccgctggccttgctgctccacgccgccaggccggaagtgcagctggttgaatctggcggaggactggttcagcctggcggatctctgagactgtcttgtgccgccagcggcttcagcttcagcgacttttggatgagctgggtccgacaggcccctggcaaaggacttgaatgggtcgccacaatcagccaggccggcagcgagaaggactacgtggactctgtgaagggcagattcaccatcagccgggacaacgccaagaagtccctgtacctccagatgaacagcctgagagccgaggacaccgccgtgtactattgtgcctctggcgtgtacagcttcgactacagaggccagggcaccctggtcacagtctcttctggtaccggcggaggcggatctggcggcggaggtagcggtggcggaggatctgaattcgacgtggtcatgacacagagcccttctagcctgtctgccagcgtgggcgacagagtgaccatcacctgtatggcctccgaggacatctacatccggctggcctggtatcagcagaagcctggaaacgcccctaagctgctgatctacgccgccacctctctggaaacaggcgtgccaagcagattttccggcagcggctctggcaccgatttcaccctgacaatatccagcctccagcctgaggacttcgccacctactactgccagcagtattggagcagcccctggacatttggcggaggcaccaaggtggaaatcaaactcgagatccagaaccctgatcctgccgtgtaccagctgcgggatagcaagagcagcgacaagagcgtgtgtctgttcaccgacttcgacagccagaccaacgtgtcccagagcaaggactccgacgtgtacatcaccgataagtgcgtgctggacatgcggagcatggacttcaagagcaactccgccgtggcctggtccaacaagtccgatttcgcctgcgccaacgccttcaacaacagcattatccccgaggacacattcttcccaagccccgagagcagctgcggctttaccagcgagagctaccagcagggcgtgctgagcgccaccatcctgtacgagatcctgctgggcaaggccaccctgtacgccgtgctggtgtctgccctggtgctgatggctatggtcaagcggaaggacagccggggacgcgccaagagaagcggatctggcgtgaagcagaccctgaatttcgacctgctgaagctggctggcgacgtggaatccaacccaggccctactagtatggactggatttggcgcatccttttccttgtcggcgctgctaccggcgcgcattccgggccccagctccagctgcaagagtctggacctggcctggtcaagcctagcgagacactgagcctgacctgtaccgtgtccggcgatagcatcagcagcggcgattactactggggctggatcagacagcctcctggcaaaggactggaatggatcggccacatctactacagcggcgtgacctactacaaccccagcctgaagtccagagtgaccatcagcgtggacaccagccggaaccagttctccctgaagctgtctagcgtgacagccgccgataccgccgtgtactactgcaccagagaggacagcagcaactggcggagtagaggccagggaacactggtcacagttagctctggatccggcggaggcggaagtggaggcggaggatctggcggcggaggctctttcgaacaggttcagctgcaagagtctggccccggactggtcaagcctagccaaacactgagcctgacctgtaccgtgtccggctacagcatcaccagcgactacacctggaactggatcagacagcctcctggcaacggactggaatggatcggctacatcacctacagcggcagcaccagctacaaccccagcctgaaaagccgggtgctgatctccgtggacaccagcaagaatcaggtgtccctgaagctgagcagcgtgacagccgctgataccgccgtgtactactgtgccagactggggagaagatacacaatggactactggggccagggcaccaccgtgacagtttcttctacgcgtgaggacctgaagaacgtgttcccacctgaggtggccgtgttcgagcctagcgaggccgagatcagccacacccagaaagccaccctcgtgtgcctggctaccggcttctaccccgaccatgtggaactgtcttggtgggtcaacggcaaagaggtgcacagcggcgtgtgtaccgacccccagccactgaaagaacagcccgccctgaacgacagccggtactgcctgagcagcagactgagagtgtccgccaccttctggcagaacccccggaaccacttcagatgccaggtgcagttctacggcctgagcgagaacgacgagtggacccaggacagagccaagcccgtgacccagatcgtgtctgccgaagcctggggcagagccgattgcgacgtgaagctggtggaaaagagcttcgagacagacaccaacctgaacttccagaacctgagcgtgatcggcttcagaatcctgctgctgaaagtggccggctttaacctgctgatgaccctgcggctgtggtccagc

SEQ ID NO: 4901 - DNA, 2694 bp, synthetic construct
  source 1..2694: mol_type = other DNA
atggccttaccagtgaccgccttgctcctgccgctggccttgctgctccacgccgccaggccggaagtgcagctggttgaatctggcggaggactggttcagcctggcggatctctgagactgtcttgtgccgccagcggcttcagcttcagcgacttttggatgagctgggtccgacaggcccctggcaaaggacttgaatgggtcgccacaatcagccaggccggcagcgagaaggactacgtggactctgtgaagggcagattcaccatcagccgggacaacgccaagaagtccctgtacctccagatgaacagcctgagagccgaggacaccgccgtgtactattgtgcctctggcgtgtacagcttcgactacagaggccagggcaccctggtcacagtctcttctggtaccggcggaggcggatctggcggcggaggtagcggtggcggaggatctgaattcgatattgtgctgactcagagccctgccactctgagccttagtccaggcgacagagctaccatctcctgtagggcctctgaatccgtgaccattctgggctctcatctcatatattggtatcaacaaaagccgggccagcctccacggctgctcattcaactggcctctaacgtgcagaccggcgtgccagctagattttctggctctggctcccggaccgactttacactgacaatcagctccgtggaacccgaagattttgccgtctattattgcctccagtccaggaccattcctcggacattcggccagggaacaaaactcgaaatcaagcggctcgagatccagaaccctgatcctgccgtgtaccagctgcgggatagcaagagcagcgacaagagcgtgtgtctgttcaccgacttcgacagccagaccaacgtgtcccagagcaaggactccgacgtgtacatcaccgataagtgcgtgctggacatgcggagcatggacttcaagagcaactccgccgtggcctggtccaacaagtccgatttcgcctgcgccaacgccttcaacaacagcattatccccgaggacacattcttcccaagccccgagagcagctgcggctttaccagcgagagctaccagcagggcgtgctgagcgccaccatcctgtacgagatcctgctgggcaaggccaccctgtacgccgtgctggtgtctgccctggtgctgatggctatggtcaagcggaaggacagccggggacgcgccaagagaagcggatctggcgtgaagcagaccctgaatttcgacctgctgaagctggctggcgacgtggaatccaacccaggccctactagtatggactggatttggcgcatccttttccttgtcggcgctgctaccggcgcgcattccgggccccagctccagctgcaagagtctggacctggcctggtcaagcctagcgagacactgagcctgacctgtaccgtgtccggcgatagcatcagcagcggcgattactactggggctggatcagacagcctcctggcaaaggactggaatggatcggccacatctactacagcggcgtgacctactacaaccccagcctgaagtccagagtgaccatcagcgtggacaccagccggaaccagttctccctgaagctgtctagcgtgacagccgccgataccgccgtgtactactgcaccagagaggacagcagcaactggcggagtagaggccagggaacactggtcacagttagctctggatccggcggaggcggaagtggaggcggaggatctggcggcggaggctctttcgaacaggtgcagctcgttcagagtggccccgaagtgaaaaagccaggcgagtccgtgaagatttcctgcaaagcctccggctacacattccggcactactctatgaattgggtcaagcaggccccaggccagggccttaagtggatgggacgcatcaataccgagtccggcgtgccaatctacgccgatgacttcaaaggccggttcagcttcaccgtggatacctctgcctccaccgcctacctggaaatcagcagcctgaccagcgaggatacagctgtgtacttctgtagcaacgattacctctacagcctggatttctggggacagggaaccacactgaccgtgtctagcacgcgtgaggacctgaagaacgtgttcccacctgaggtggccgtgttcgagcctagcgaggccgagatcagccacacccagaaagccaccctcgtgtgcctggctaccggcttctaccccgaccatgtggaactgtcttggtgggtcaacggcaaagaggtgcacagcggcgtgtgtaccgacccccagccactgaaagaacagcccgccctgaacgacagccggtactgcctgagcagcagactgagagtgtccgccaccttctggcagaacccccggaaccacttcagatgccaggtgcagttctacggcctgagcgagaacgacgagtggacccaggacagagccaagcccgtgacccagatcgtgtctgccgaagcctggggcagagccgattgcgacgtgaagctggtggaaaagagcttcgagacagacaccaacctgaacttccagaacctgagcgtgatcggcttcagaatcctgctgctgaaagtggccggctttaacctgctgatgaccctgcggctgtggtccagc

SEQ ID NO: 4902 - DNA, 2694 bp, synthetic construct
  source 1..2694: mol_type = other DNA
atggccttaccagtgaccgccttgctcctgccgctggccttgctgctccacgccgccaggccggaagtgcagctggttgaatctggcggaggactggttcagcctggcggatctctgagactgtcttgtgccgccagcggcttcagcttcagcgacttttggatgagctgggtccgacaggcccctggcaaaggacttgaatgggtcgccacaatcagccaggccggcagcgagaaggactacgtggactctgtgaagggcagattcaccatcagccgggacaacgccaagaagtccctgtacctccagatgaacagcctgagagccgaggacaccgccgtgtactattgtgcctctggcgtgtacagcttcgactacagaggccagggcaccctggtcacagtctcttctggtaccggcggaggcggatctggcggcggaggtagcggtggcggaggatctgaattcgacatcgtgctgacacagtctcccgccacactgtcactgagccctggcgatagagccacactgagctgtagagccagcgagagcgtgacaatcctgggcagccacctgatctactggtatcagcagaagcccggacaggcccctagactgctgattcagctcgccagcaatgtgcagacaggcatccctgccagattttccggcagcggcagcagaaccgatttcaccctgaccataagcagcctggaacctgaggacttcgccgtgtactactgcctccagagccggacaatccccagaacctttggacagggcaccaagctggaaatcaagagactcgagatccagaaccctgatcctgccgtgtaccagctgcgggatagcaagagcagcgacaagagcgtgtgtctgttcaccgacttcgacagccagaccaacgtgtcccagagcaaggactccgacgtgtacatcaccgataagtgcgtgctggacatgcggagcatggacttcaagagcaactccgccgtggcctggtccaacaagtccgatttcgcctgcgccaacgccttcaacaacagcattatccccgaggacacattcttcccaagccccgagagcagctgcggctttaccagcgagagctaccagcagggcgtgctgagcgccaccatcctgtacgagatcctgctgggcaaggccaccctgtacgccgtgctggtgtctgccctggtgctgatggctatggtcaagcggaaggacagccggggacgcgccaagagaagcggatctggcgtgaagcagaccctgaatttcgacctgctgaagctggctggcgacgtggaatccaacccaggccctactagtatggactggatttggcgcatccttttccttgtcggcgctgctaccggcgcgcattccgggccccagctccagctgcaagagtctggacctggcctggtcaagcctagcgagacactgagcctgacctgtaccgtgtccggcgatagcatcagcagcggcgattactactggggctggatcagacagcctcctggcaaaggactggaatggatcggccacatctactacagcggcgtgacctactacaaccccagcctgaagtccagagtgaccatcagcgtggacaccagccggaaccagttctccctgaagctgtctagcgtgacagccgccgataccgccgtgtactactgcaccagagaggacagcagcaactggcggagtagaggccagggaacactggtcacagttagctctggatccggcggaggcggaagtggaggcggaggatctggcggcggaggctctttcgaacaggttcagctggtgcagtctggcagcgagctgaagaaacctggcgagagcgtgaagatcagctgcaaggccagcggctacaccttcacacactacagcatgaactgggtccgacaggcccctggacaaggactggaatggatgggcagaatcaacaccgagacaggcgagcccctgtacgccgacgatttcaagggcagattcgtgttcagcctggacaccagcgccagcacagcctatctccagatcagctctctgaaggccgaggacaccgccgtgtactactgctccaacgactacctgtactccctggactattggggccagggcacactggtcacagtgtctagtacgcgtgaggacctgaagaacgtgttcccacctgaggtggccgtgttcgagcctagcgaggccgagatcagccacacccagaaagccaccctcgtgtgcctggctaccggcttctaccccgaccatgtggaactgtcttggtgggtcaacggcaaagaggtgcacagcggcgtgtgtaccgacccccagccactgaaagaacagcccgccctgaacgacagccggtactgcctgagcagcagactgagagtgtccgccaccttctggcagaacccccggaaccacttcagatgccaggtgcagttctacggcctgagcgagaacgacgagtggacccaggacagagccaagcccgtgacccagatcgtgtctgccgaagcctggggcagagccgattgcgacgtgaagctggtggaaaagagcttcgagacagacaccaacctgaacttccagaacctgagcgtgatcggcttcagaatcctgctgctgaaagtggccggctttaacctgctgatgaccctgcggctgtggtccagc

SEQ ID NO: 4903 - DNA, 2697 bp, synthetic construct
  source 1..2697: mol_type = other DNA
atggccttaccagtgaccgccttgctcctgccgctggccttgctgctccacgccgccaggccggaagtgcagctggttgaatctggcggaggactggttcagcctggcggatctctgagactgtcttgtgccgccagcggcttcagcttcagcgacttttggatgagctgggtccgacaggcccctggcaaaggacttgaatgggtcgccacaatcagccaggccggcagcgagaaggactacgtggactctgtgaagggcagattcaccatcagccgggacaacgccaagaagtccctgtacctccagatgaacagcctgagagccgaggacaccgccgtgtactattgtgcctctggcgtgtacagcttcgactacagaggccagggcaccctggtcacagtctcttctggtaccggcggaggcggatctggcggcggaggtagcggtggcggaggatctgaattcgacatccagctgactcagagccctagctttctgagcgccagcgtgggcgacagagtgaccattacatgtagagccagccagggcatcagcaccgacctgaactggtatcagcagaagcctggcaaggcccctaagctgctgatctacgccgccagcaatctggaaagcggcgtgccaagcagattttccggctctggcagcggcaccgagttcaccctgacaatatctagcctccagcctgaggacttcgccacctactactgccagcagagctacaactggccctacacctttggcggaggcaccaaggtggaaatcaagagactcgagatccagaaccctgatcctgccgtgtaccagctgcgggatagcaagagcagcgacaagagcgtgtgtctgttcaccgacttcgacagccagaccaacgtgtcccagagcaaggactccgacgtgtacatcaccgataagtgcgtgctggacatgcggagcatggacttcaagagcaactccgccgtggcctggtccaacaagtccgatttcgcctgcgccaacgccttcaacaacagcattatccccgaggacacattcttcccaagccccgagagcagctgcggctttaccagcgagagctaccagcagggcgtgctgagcgccaccatcctgtacgagatcctgctgggcaaggccaccctgtacgccgtgctggtgtctgccctggtgctgatggctatggtcaagcggaaggacagccggggacgcgccaagagaagcggatctggcgtgaagcagaccctgaatttcgacctgctgaagctggctggcgacgtggaatccaacccaggccctactagtatggactggatttggcgcatccttttccttgtcggcgctgctaccggcgcgcattccgggccccagctccagctgcaagagtctggacctggcctggtcaagcctagcgagacactgagcctgacctgtaccgtgtccggcgatagcatcagcagcggcgattactactggggctggatcagacagcctcctggcaaaggactggaatggatcggccacatctactacagcggcgtgacctactacaaccccagcctgaagtccagagtgaccatcagcgtggacaccagccggaaccagttctccctgaagctgtctagcgtgacagccgccgataccgccgtgtactactgcaccagagaggacagcagcaactggcggagtagaggccagggaacactggtcacagttagctctggatccggcggaggcggaagtggaggcggaggatctggcggcggaggctctttcgaagaagttcagctggttgaatcaggcggaggactcgtgaaacctggcggctctctgagactgtcttgtgccgccagcggcttcaccttcagcaacttcgagatgaactgggtccgacaggccccaggcaaaggactggaatgggtgtccggcatcagctccaatggccggtacatcaactacgccgacagcgtgaagggcagattcaccatcagccgggacaacgccaagaacagcctgtacctccagatgaactccctgagagccgaggacaccgccgtgtactattgtgccagagtggtggacttcgaccaggactacaacggcttcgactattggggccagggcaccctggttaccgttagctctacgcgtgaggacctgaagaacgtgttcccacctgaggtggccgtgttcgagcctagcgaggccgagatcagccacacccagaaagccaccctcgtgtgcctggctaccggcttctaccccgaccatgtggaactgtcttggtgggtcaacggcaaagaggtgcacagcggcgtgtgtaccgacccccagccactgaaagaacagcccgccctgaacgacagccggtactgcctgagcagcagactgagagtgtccgccaccttctggcagaacccccggaaccacttcagatgccaggtgcagttctacggcctgagcgagaacgacgagtggacccaggacagagccaagcccgtgacccagatcgtgtctgccgaagcctggggcagagccgattgcgacgtgaagctggtggaaaagagcttcgagacagacaccaacctgaacttccagaacctgagcgtgatcggcttcagaatcctgctgctgaaagtggccggctttaacctgctgatgaccctgcggctgtggtccagc

SEQ ID NO: 4904 - DNA, 2691 bp, synthetic construct
  source 1..2691: mol_type = other DNA
atggccttaccagtgaccgccttgctcctgccgctggccttgctgctccacgccgccaggccggaagtgcagctggttgaatctggcggaggactggttcagcctggcggatctctgagactgtcttgtgccgccagcggcttcagcttcagcgacttttggatgagctgggtccgacaggcccctggcaaaggacttgaatgggtcgccacaatcagccaggccggcagcgagaaggactacgtggactctgtgaagggcagattcaccatcagccgggacaacgccaagaagtccctgtacctccagatgaacagcctgagagccgaggacaccgccgtgtactattgtgcctctggcgtgtacagcttcgactacagaggccagggcaccctggtcacagtctcttctggtaccggcggaggcggatctggcggcggaggtagcggtggcggaggatctgaattcgacatccaactgactcagagccccagctttctgagcgcctctgtgggcgacagagtgaccatcacatgtagtctcagcctgggcatcagcacatggcgggattggtttccgccgaggcttggcaggggccttgagccgctgacctacgccgccagcacactgcaaagcggagtgcctagcagattttccggcagcggctctggcaccgagttcaccctgacaatatccagcctccagcctgaggacttcgccacctactactgccagcagctcaacagctaccctctgacctttggcggaggcaccaaggtggaaatcaagagactcgagatccagaaccctgatcctgccgtgtaccagctgcgggatagcaagagcagcgacaagagcgtgtgtctgttcaccgacttcgacagccagaccaacgtgtcccagagcaaggactccgacgtgtacatcaccgataagtgcgtgctggacatgcggagcatggacttcaagagcaactccgccgtggcctggtccaacaagtccgatttcgcctgcgccaacgccttcaacaacagcattatccccgaggacacattcttcccaagccccgagagcagctgcggctttaccagcgagagctaccagcagggcgtgctgagcgccaccatcctgtacgagatcctgctgggcaaggccaccctgtacgccgtgctggtgtctgccctggtgctgatggctatggtcaagcggaaggacagccggggacgcgccaagagaagcggatctggcgtgaagcagaccctgaatttcgacctgctgaagctggctggcgacgtggaatccaacccaggccctactagtatggactggatttggcgcatccttttccttgtcggcgctgctaccggcgcgcattccgggccccagctccagctgcaagagtctggacctggcctggtcaagcctagcgagacactgagcctgacctgtaccgtgtccggcgatagcatcagcagcggcgattactactggggctggatcagacagcctcctggcaaaggactggaatggatcggccacatctactacagcggcgtgacctactacaaccccagcctgaagtccagagtgaccatcagcgtggacaccagccggaaccagttctccctgaagctgtctagcgtgacagccgccgataccgccgtgtactactgcaccagagaggacagcagcaactggcggagtagaggccagggaacactggtcacagttagctctggatccggcggaggcggaagtggaggcggaggatctggcggcggaggctctttcgaagaagttcaactggttgagtctggtggcggcctggttaagcctggcggatctctgagactgagctgtgccgccagcggcttcacctttagcacatacggcatgagctgggtccgacaggcccctggaaaaggacttgagtgggtcgcctacatcaacaacggctccggctacatctactacgccgacagcgtgaagggcagattcaccatcagccgggacaacgccaagaacagcctgtacctccagatgaactccctgagagccgaggacaccgccgtgtactattgtgccagaggacagtggtggagcggcggagactttgattattggggccagggcaccctggtcaccgtttcttctacgcgtgaggacctgaagaacgtgttcccacctgaggtggccgtgttcgagcctagcgaggccgagatcagccacacccagaaagccaccctcgtgtgcctggctaccggcttctaccccgaccatgtggaactgtcttggtgggtcaacggcaaagaggtgcacagcggcgtgtgtaccgacccccagccactgaaagaacagcccgccctgaacgacagccggtactgcctgagcagcagactgagagtgtccgccaccttctggcagaacccccggaaccacttcagatgccaggtgcagttctacggcctgagcgagaacgacgagtggacccaggacagagccaagcccgtgacccagatcgtgtctgccgaagcctggggcagagccgattgcgacgtgaagctggtggaaaagagcttcgagacagacaccaacctgaacttccagaacctgagcgtgatcggcttcagaatcctgctgctgaaagtggccggctttaacctgctgatgaccctgcggctgtggtccagc

SEQ ID NO: 4905 - DNA, 2694 bp, synthetic construct
  source 1..2694: mol_type = other DNA
atggccttaccagtgaccgccttgctcctgccgctggccttgctgctccacgccgccaggccggaagtgcagctggttgaatctggcggaggactggttcagcctggcggatctctgagactgtcttgtgccgccagcggcttcagcttcagcgacttttggatgagctgggtccgacaggcccctggcaaaggacttgaatgggtcgccacaatcagccaggccggcagcgagaaggactacgtggactctgtgaagggcagattcaccatcagccgggacaacgccaagaagtccctgtacctccagatgaacagcctgagagccgaggacaccgccgtgtactattgtgcctctggcgtgtacagcttcgactacagaggccagggcaccctggtcacagtctcttctggtaccggcggaggcggatctggcggcggaggtagcggtggcggaggatctgaattcgagatcgtgctgacacagtctcccgccacactgtcactgtctccaggcgaaagagccacactgagctgtagcgccagcagcagcgtgtcctacatgtactggtatcagcagaagcccggacaggcccctagactgctgatctacagaaccagcaacctggcctctggcatccccgccagattttctggctctggcagcggcaccgatttcaccctgaccataagcagcctggaacctgaggacttcgccgtgtactactgccagcagtaccacagctaccccaccacctttggacagggcaccaaggtggaaatcaagcggacagttctcgagatccagaaccctgatcctgccgtgtaccagctgcgggatagcaagagcagcgacaagagcgtgtgtctgttcaccgacttcgacagccagaccaacgtgtcccagagcaaggactccgacgtgtacatcaccgataagtgcgtgctggacatgcggagcatggacttcaagagcaactccgccgtggcctggtccaacaagtccgatttcgcctgcgccaacgccttcaacaacagcattatccccgaggacacattcttcccaagccccgagagcagctgcggctttaccagcgagagctaccagcagggcgtgctgagcgccaccatcctgtacgagatcctgctgggcaaggccaccctgtacgccgtgctggtgtctgccctggtgctgatggctatggtcaagcggaaggacagccggggacgcgccaagagaagcggatctggcgtgaagcagaccctgaatttcgacctgctgaagctggctggcgacgtggaatccaacccaggccctactagtatggactggatttggcgcatccttttccttgtcggcgctgctaccggcgcgcattccgggccccagctccagctgcaagagtctggacctggcctggtcaagcctagcgagacactgagcctgacctgtaccgtgtccggcgatagcatcagcagcggcgattactactggggctggatcagacagcctcctggcaaaggactggaatggatcggccacatctactacagcggcgtgacctactacaaccccagcctgaagtccagagtgaccatcagcgtggacaccagccggaaccagttctccctgaagctgtctagcgtgacagccgccgataccgccgtgtactactgcaccagagaggacagcagcaactggcggagtagaggccagggaacactggtcacagttagctctggatccggcggaggcggaagtggaggcggaggatctggcggcggaggctctttcgaagaagtgcagctggttgaatcaggtggcggcctggttcaacctggcggatctctgagactgtcttgtgccgccagcggcttcagcttcaacacctacgccatgaactgggtccgacaggctcctggcaaaggactggaatgggtgtcccacatcagaagcaagagcaacaacttcgccacctactacgccgacagcgtgaaggacagattcaccatcagccgggacaacgccaagaacagcctgtacctccagatgaactccctgagagccgaggacaccgccgtgtattattgcgccagacaaggcggcgacttccctatggattattggggccagggcaccctggtcaccgtttcttctacgcgtgaggacctgaagaacgtgttcccacctgaggtggccgtgttcgagcctagcgaggccgagatcagccacacccagaaagccaccctcgtgtgcctggctaccggcttctaccccgaccatgtggaactgtcttggtgggtcaacggcaaagaggtgcacagcggcgtgtgtaccgacccccagccactgaaagaacagcccgccctgaacgacagccggtactgcctgagcagcagactgagagtgtccgccaccttctggcagaacccccggaaccacttcagatgccaggtgcagttctacggcctgagcgagaacgacgagtggacccaggacagagccaagcccgtgacccagatcgtgtctgccgaagcctggggcagagccgattgcgacgtgaagctggtggaaaagagcttcgagacagacaccaacctgaacttccagaacctgagcgtgatcggcttcagaatcctgctgctgaaagtggccggctttaacctgctgatgaccctgcggctgtggtccagc

SEQ ID NO: 4906 - DNA, 2682 bp, synthetic construct
  source 1..2682: mol_type = other DNA
atggccttaccagtgaccgccttgctcctgccgctggccttgctgctccacgccgccaggccggaagtgcagctggttgaatctggcggaggactggttcagcctggcggatctctgagactgtcttgtgccgccagcggcttcagcttcagcgacttttggatgagctgggtccgacaggcccctggcaaaggacttgaatgggtcgccacaatcagccaggccggcagcgagaaggactacgtggactctgtgaagggcagattcaccatcagccgggacaacgccaagaagtccctgtacctccagatgaacagcctgagagccgaggacaccgccgtgtactattgtgcctctggcgtgtacagcttcgactacagaggccagggcaccctggtcacagtctcttctggtaccggcggaggcggatctggcggcggaggtagcggtggcggaggatctgaattcgacgtggtcatgacacagagcccttctagcctgtctgccagcgtgggcgacagagtgaccatcacctgtaaagccagcgaggacatctacatccggctggcctggtatcagcagaagcctggaaaggcccctaagctgctgatctacgccgccacctctctggaaacaggcgtgccaagcagattttccggcagcggctctggcaccgatttcaccctgacaatatccagcctccagcctgaggacttcgccacctactactgccagcagtattggaccacaccttggacctttggcggaggcaccaaggtggaaatcaaactcgagatccagaaccctgatcctgccgtgtaccagctgcgggatagcaagagcagcgacaagagcgtgtgtctgttcaccgacttcgacagccagaccaacgtgtcccagagcaaggactccgacgtgtacatcaccgataagtgcgtgctggacatgcggagcatggacttcaagagcaactccgccgtggcctggtccaacaagtccgatttcgcctgcgccaacgccttcaacaacagcattatccccgaggacacattcttcccaagccccgagagcagctgcggctttaccagcgagagctaccagcagggcgtgctgagcgccaccatcctgtacgagatcctgctgggcaaggccaccctgtacgccgtgctggtgtctgccctggtgctgatggctatggtcaagcggaaggacagccggggacgcgccaagagaagcggatctggcgtgaagcagaccctgaatttcgacctgctgaagctggctggcgacgtggaatccaacccaggccctactagtatggactggatttggcgcatccttttccttgtcggcgctgctaccggcgcgcattccgggccccagctccagctgcaagagtctggacctggcctggtcaagcctagcgagacactgagcctgacctgtaccgtgtccggcgatagcatcagcagcggcgattactactggggctggatcagacagcctcctggcaaaggactggaatggatcggccacatctactacagcggcgtgacctactacaaccccagcctgaagtccagagtgaccatcagcgtggacaccagccggaaccagttctccctgaagctgtctagcgtgacagccgccgataccgccgtgtactactgcaccagagaggacagcagcaactggcggagtagaggccagggaacactggtcacagttagctctggatccggcggaggcggaagtggaggcggaggatctggcggcggaggctctttcgaacaggtgcagctccaagagtctggccctggactggtcaagcctagccagacactgagcctgacctgtaccgtgtccggctacagcatcaccatcgactacacctggaactggatcagacagcctcctggcaaaggactggaatggatcggctacatcacctacagcggcagcaccgactacaaccccagcctgaaaagccgggtgctgatctccgtggacaccagcaagaatcaggtgtccctgaagctgagcagcgtgacagccgctgataccgccgtgtactactgtgccagactgggcagaagatacgccctggattattggggccagggcaccaccgtgacagtgtcatctacgcgtgaggacctgaagaacgtgttcccacctgaggtggccgtgttcgagcctagcgaggccgagatcagccacacccagaaagccaccctcgtgtgcctggctaccggcttctaccccgaccatgtggaactgtcttggtgggtcaacggcaaagaggtgcacagcggcgtgtgtaccgacccccagccactgaaagaacagcccgccctgaacgacagccggtactgcctgagcagcagactgagagtgtccgccaccttctggcagaacccccggaaccacttcagatgccaggtgcagttctacggcctgagcgagaacgacgagtggacccaggacagagccaagcccgtgacccagatcgtgtctgccgaagcctggggcagagccgattgcgacgtgaagctggtggaaaagagcttcgagacagacaccaacctgaacttccagaacctgagcgtgatcggcttcagaatcctgctgctgaaagtggccggctttaacctgctgatgaccctgcggctgtggtccagc

SEQ ID NO: 4907 - DNA, 2694 bp, synthetic construct
  source 1..2694: mol_type = other DNA
atggccttaccagtgaccgccttgctcctgccgctggccttgctgctccacgccgccaggccggaagtgcagctggttgaatctggcggaggactggttcagcctggcggatctctgagactgtcttgtgccgccagcggcttcagcttcagcgacttttggatgagctgggtccgacaggcccctggcaaaggacttgaatgggtcgccacaatcagccaggccggcagcgagaaggactacgtggactctgtgaagggcagattcaccatcagccgggacaacgccaagaagtccctgtacctccagatgaacagcctgagagccgaggacaccgccgtgtactattgtgcctctggcgtgtacagcttcgactacagaggccagggcaccctggtcacagtctcttctggtaccggcggaggcggatctggcggcggaggtagcggtggcggaggatctgaattcgacatccagatgacccagaccacaagcagcctgtctgccagcctgggcgacagagtgaccatctcttgtagagccagccaggacatcagcaactacctgaactggtatcagcagaaacccgacggcaccgtgaagctgctgatctactacaccagcatcctgcacagcggcgtgcccagcagattttctggctctggcagcggcaccgactacagcctgaccatcagcaatctggaacaagaggacttcgctacctacttctgccagcaaggcaacaccctgccttggacatttggcggaggcaccaagctggaaatcaaagctctcgagatccagaaccctgatcctgccgtgtaccagctgcgggatagcaagagcagcgacaagagcgtgtgtctgttcaccgacttcgacagccagaccaacgtgtcccagagcaaggactccgacgtgtacatcaccgataagtgcgtgctggacatgcggagcatggacttcaagagcaactccgccgtggcctggtccaacaagtccgatttcgcctgcgccaacgccttcaacaacagcattatccccgaggacacattcttcccaagccccgagagcagctgcggctttaccagcgagagctaccagcagggcgtgctgagcgccaccatcctgtacgagatcctgctgggcaaggccaccctgtacgccgtgctggtgtctgccctggtgctgatggctatggtcaagcggaaggacagccggggacgcgccaagagaagcggatctggcgtgaagcagaccctgaatttcgacctgctgaagctggctggcgacgtggaatccaacccaggccctactagtatggactggatttggcgcatccttttccttgtcggcgctgctaccggcgcgcattccgggccccagctccagctgcaagagtctggacctggcctggtcaagcctagcgagacactgagcctgacctgtaccgtgtccggcgatagcatcagcagcggcgattactactggggctggatcagacagcctcctggcaaaggactggaatggatcggccacatctactacagcggcgtgacctactacaaccccagcctgaagtccagagtgaccatcagcgtggacaccagccggaaccagttctccctgaagctgtctagcgtgacagccgccgataccgccgtgtactactgcaccagagaggacagcagcaactggcggagtagaggccagggaacactggtcacagttagctctggatccggcggaggcggaagtggaggcggaggatctggcggcggaggctctttcgaagtgcaactggttgaatctggcggcggactggttaagcctggcggatctctgaagctgagctgtgccgcctctggcttcgccttcagcatctacgatatgagctgggtccgacagacccctgagaagagactggaatgggtcgcctacatctctagcggcggagggacctactatcccgacacagtgaagggcagattcaccatctccagagacaacgccaagaacaccctgtacctccagatgagcagcctgaagtccgaggacaccgccatgtactactgcgccagacacagcggctatggcacacattggggagtgctgtttgcctactggggccagggaacactggtcacagtttctgctacgcgtgaggacctgaagaacgtgttcccacctgaggtggccgtgttcgagcctagcgaggccgagatcagccacacccagaaagccaccctcgtgtgcctggctaccggcttctaccccgaccatgtggaactgtcttggtgggtcaacggcaaagaggtgcacagcggcgtgtgtaccgacccccagccactgaaagaacagcccgccctgaacgacagccggtactgcctgagcagcagactgagagtgtccgccaccttctggcagaacccccggaaccacttcagatgccaggtgcagttctacggcctgagcgagaacgacgagtggacccaggacagagccaagcccgtgacccagatcgtgtctgccgaagcctggggcagagccgattgcgacgtgaagctggtggaaaagagcttcgagacagacaccaacctgaacttccagaacctgagcgtgatcggcttcagaatcctgctgctgaaagtggccggctttaacctgctgatgaccctgcggctgtggtccagc

SEQ ID NO: 4908 - DNA, 2727 bp, synthetic construct
  source 1..2727: mol_type = other DNA
atggccttaccagtgaccgccttgctcctgccgctggccttgctgctccacgccgccaggccggaagtgcagctggttgaatctggcggaggactggttcagcctggcggatctctgagactgtcttgtgccgccagcggcttcagcttcagcgacttttggatgagctgggtccgacaggcccctggcaaaggacttgaatgggtcgccacaatcagccaggccggcagcgagaaggactacgtggactctgtgaagggcagattcaccatcagccgggacaacgccaagaagtccctgtacctccagatgaacagcctgagagccgaggacaccgccgtgtactattgtgcctctggcgtgtacagcttcgactacagaggccagggcaccctggtcacagtctcttctggtaccggcggaggcggatctggcggcggaggtagcggtggcggaggatctgaattcgacatcgtgatgacacagagccctgatagcctggccgtgtctctgggagagagagccaccatcaactgcaagagcagccagagcctgctgtacagaagcaaccagaagaactacctggcctggtatcagcagaagcccggccagcctcctaagctgctgatctactgggccagcaccagagaaagcggcgtgcccgatagattttctggctctggcagcggcaccgacttcaccctgacaatttctagcctgcaagccgaggacgtggccgtgtactactgccagcagtattacaactaccccagaaccttcggccagggcaccaaggtggaaatcaagagaacagttctcgagatccagaaccctgatcctgccgtgtaccagctgcgggatagcaagagcagcgacaagagcgtgtgtctgttcaccgacttcgacagccagaccaacgtgtcccagagcaaggactccgacgtgtacatcaccgataagtgcgtgctggacatgcggagcatggacttcaagagcaactccgccgtggcctggtccaacaagtccgatttcgcctgcgccaacgccttcaacaacagcattatccccgaggacacattcttcccaagccccgagagcagctgcggctttaccagcgagagctaccagcagggcgtgctgagcgccaccatcctgtacgagatcctgctgggcaaggccaccctgtacgccgtgctggtgtctgccctggtgctgatggctatggtcaagcggaaggacagccggggacgcgccaagagaagcggatctggcgtgaagcagaccctgaatttcgacctgctgaagctggctggcgacgtggaatccaacccaggccctactagtatggactggatttggcgcatccttttccttgtcggcgctgctaccggcgcgcattccgggccccagctccagctgcaagagtctggacctggcctggtcaagcctagcgagacactgagcctgacctgtaccgtgtccggcgatagcatcagcagcggcgattactactggggctggatcagacagcctcctggcaaaggactggaatggatcggccacatctactacagcggcgtgacctactacaaccccagcctgaagtccagagtgaccatcagcgtggacaccagccggaaccagttctccctgaagctgtctagcgtgacagccgccgataccgccgtgtactactgcaccagagaggacagcagcaactggcggagtagaggccagggaacactggtcacagttagctctggatccggcggaggcggaagtggaggcggaggatctggcggcggaggctctttcgaagaagttcagctgcttgaatcaggcggcggactggttcaacctggcggatctctgagactgagctgtgccgccagcggctacagcatcacaagcgactatgcctggaactgggtccgacaggcccctggcaaaggactggaatgggtgtcctacatcagcaacagcggcagcaccagctacaaccccagcctgaagtcccggttcaccatcagcagagacaacagcaagaacaccctgtacctccagatgaacagcctgagagctgaggacaccgccgtgtattattgcgccaaagagcggaactacgactacgacgattactactacgctatggactactggggccagggaaccctggtcacagtctcttctacgcgtgaggacctgaagaacgtgttcccacctgaggtggccgtgttcgagcctagcgaggccgagatcagccacacccagaaagccaccctcgtgtgcctggctaccggcttctaccccgaccatgtggaactgtcttggtgggtcaacggcaaagaggtgcacagcggcgtgtgtaccgacccccagccactgaaagaacagcccgccctgaacgacagccggtactgcctgagcagcagactgagagtgtccgccaccttctggcagaacccccggaaccacttcagatgccaggtgcagttctacggcctgagcgagaacgacgagtggacccaggacagagccaagcccgtgacccagatcgtgtctgccgaagcctggggcagagccgattgcgacgtgaagctggtggaaaagagcttcgagacagacaccaacctgaacttccagaacctgagcgtgatcggcttcagaatcctgctgctgaaagtggccggctttaacctgctgatgaccctgcggctgtggtccagc

SEQ ID NO: 4909 - DNA, 2706 bp, synthetic construct
  source 1..2706: mol_type = other DNA
atggccttaccagtgaccgccttgctcctgccgctggccttgctgctccacgccgccaggccggaagtgcagctggttgaatctggcggaggactggttcagcctggcggatctctgagactgtcttgtgccgccagcggcttcagcttcagcgacttttggatgagctgggtccgacaggcccctggcaaaggacttgaatgggtcgccacaatcagccaggccggcagcgagaaggactacgtggactctgtgaagggcagattcaccatcagccgggacaacgccaagaagtccctgtacctccagatgaacagcctgagagccgaggacaccgccgtgtactattgtgcctctggcgtgtacagcttcgactacagaggccagggcaccctggtcacagtctcttctggtaccggcggaggcggatctggcggcggaggtagcggtggcggaggatctgaattcgacgtggtcatgacacagagccctctgagcctgcctgtgacacttggacagcctgccagcatcagctgtagaagcagccagagcctgctgcacagcagcggcaatacctacctggaatggtatcagcagaggcccggacagagccccagacctctgatctacaagatcagcacccggttcagcggcgtgcccgatagattttctggctctggcagcggcaccgacttcaccctgaagattagcagagtggaagccgaggacgtgggcgtgtactactgcttccaaggcagccacgtgccatacacctttggcggcggaacaaaggtggaaatcaagagactcgagatccagaaccctgatcctgccgtgtaccagctgcgggatagcaagagcagcgacaagagcgtgtgtctgttcaccgacttcgacagccagaccaacgtgtcccagagcaaggactccgacgtgtacatcaccgataagtgcgtgctggacatgcggagcatggacttcaagagcaactccgccgtggcctggtccaacaagtccgatttcgcctgcgccaacgccttcaacaacagcattatccccgaggacacattcttcccaagccccgagagcagctgcggctttaccagcgagagctaccagcagggcgtgctgagcgccaccatcctgtacgagatcctgctgggcaaggccaccctgtacgccgtgctggtgtctgccctggtgctgatggctatggtcaagcggaaggacagccggggacgcgccaagagaagcggatctggcgtgaagcagaccctgaatttcgacctgctgaagctggctggcgacgtggaatccaacccaggccctactagtatggactggatttggcgcatccttttccttgtcggcgctgctaccggcgcgcattccgggccccagctccagctgcaagagtctggacctggcctggtcaagcctagcgagacactgagcctgacctgtaccgtgtccggcgatagcatcagcagcggcgattactactggggctggatcagacagcctcctggcaaaggactggaatggatcggccacatctactacagcggcgtgacctactacaaccccagcctgaagtccagagtgaccatcagcgtggacaccagccggaaccagttctccctgaagctgtctagcgtgacagccgccgataccgccgtgtactactgcaccagagaggacagcagcaactggcggagtagaggccagggaacactggtcacagttagctctggatccggcggaggcggaagtggaggcggaggatctggcggcggaggctctttcgaacaagttcagctggttcagagcggagccgaagtgaagaaacctggggcctctgtgaaggtgtcctgcaaagcctctggcctgaccatcgaggactactacatgcactgggtccgacaggcccctggacaaggacttgaatggatgggctggatcgaccccgagaacggcgatacagagtacggccctaagttccagggcagagtgaccatgaccagagacaccagcatcaacaccgcctacatggaactgagccggctgagatccgatgacaccgccgtgtactattgcgccgtgcacaatgcccactacggcacttggtttgcctattggggccagggcacactggtcaccgttagctctacgcgtgaggacctgaagaacgtgttcccacctgaggtggccgtgttcgagcctagcgaggccgagatcagccacacccagaaagccaccctcgtgtgcctggctaccggcttctaccccgaccatgtggaactgtcttggtgggtcaacggcaaagaggtgcacagcggcgtgtgtaccgacccccagccactgaaagaacagcccgccctgaacgacagccggtactgcctgagcagcagactgagagtgtccgccaccttctggcagaacccccggaaccacttcagatgccaggtgcagttctacggcctgagcgagaacgacgagtggacccaggacagagccaagcccgtgacccagatcgtgtctgccgaagcctggggcagagccgattgcgacgtgaagctggtggaaaagagcttcgagacagacaccaacctgaacttccagaacctgagcgtgatcggcttcagaatcctgctgctgaaagtggccggctttaacctgctgatgaccctgcggctgtggtccagc

SEQ ID NO: 4910 - DNA, 2682 bp, synthetic construct
  source 1..2682: mol_type = other DNA
atggccttaccagtgaccgccttgctcctgccgctggccttgctgctccacgccgccaggccggaagtgcagctggttgaatctggcggaggactggttcagcctggcggatctctgagactgtcttgtgccgccagcggcttcagcttcagcgacttttggatgagctgggtccgacaggcccctggcaaaggacttgaatgggtcgccacaatcagccaggccggcagcgagaaggactacgtggactctgtgaagggcagattcaccatcagccgggacaacgccaagaagtccctgtacctccagatgaacagcctgagagccgaggacaccgccgtgtactattgtgcctctggcgtgtacagcttcgactacagaggccagggcaccctggtcacagtctcttctggtaccggcggaggcggatctggcggcggaggtagcggtggcggaggatctgaattcgacatccagatgacacagagccctagcagcctgtctgccagcgtgggagacagagtgaccatcacctgtagagccagcgagaacatctacagcaacctggcctggtatcagcagaagcctggcaaggcccctaagctgctgatctacgccgccaccaatctggctgatggcgtgccaagcagattttccggctctggcagcggcaccgatttcaccctgacaatatccagcctccagcctgaggacttcgccacctactactgccagcacttttggggcacccctacattcggccagggcaccaaggtggaaatcaagagaacagttctcgagatccagaaccctgatcctgccgtgtaccagctgcgggatagcaagagcagcgacaagagcgtgtgtctgttcaccgacttcgacagccagaccaacgtgtcccagagcaaggactccgacgtgtacatcaccgataagtgcgtgctggacatgcggagcatggacttcaagagcaactccgccgtggcctggtccaacaagtccgatttcgcctgcgccaacgccttcaacaacagcattatccccgaggacacattcttcccaagccccgagagcagctgcggctttaccagcgagagctaccagcagggcgtgctgagcgccaccatcctgtacgagatcctgctgggcaaggccaccctgtacgccgtgctggtgtctgccctggtgctgatggctatggtcaagcggaaggacagccggggacgcgccaagagaagcggatctggcgtgaagcagaccctgaatttcgacctgctgaagctggctggcgacgtggaatccaacccaggccctactagtatggactggatttggcgcatccttttccttgtcggcgctgctaccggcgcgcattccgggccccagctccagctgcaagagtctggacctggcctggtcaagcctagcgagacactgagcctgacctgtaccgtgtccggcgatagcatcagcagcggcgattactactggggctggatcagacagcctcctggcaaaggactggaatggatcggccacatctactacagcggcgtgacctactacaaccccagcctgaagtccagagtgaccatcagcgtggacaccagccggaaccagttctccctgaagctgtctagcgtgacagccgccgataccgccgtgtactactgcaccagagaggacagcagcaactggcggagtagaggccagggaacactggtcacagttagctctggatccggcggaggcggaagtggaggcggaggatctggcggcggaggctctttcgaagaagtgcagctggttgaatcaggtggcggcctggttcaacctggcggatctctgagactgagctgtgccgcctctggcttcagcctgacaaattacggcgtgcactgggtccgacaggcccctggaaaaggactggaatgggtgtccgtgatttggagcggcggcagcaccgattacaacgccgccttcatcagccggttcaccatcagcgccgacaccagcaagaataccgcctacctccagatgaactccctgagagccgaggacaccgccgtgtactattgcgccagagaactgatccacgctatggacaactggggccagggaaccctggtcacagtctcttctacgcgtgaggacctgaagaacgtgttcccacctgaggtggccgtgttcgagcctagcgaggccgagatcagccacacccagaaagccaccctcgtgtgcctggctaccggcttctaccccgaccatgtggaactgtcttggtgggtcaacggcaaagaggtgcacagcggcgtgtgtaccgacccccagccactgaaagaacagcccgccctgaacgacagccggtactgcctgagcagcagactgagagtgtccgccaccttctggcagaacccccggaaccacttcagatgccaggtgcagttctacggcctgagcgagaacgacgagtggacccaggacagagccaagcccgtgacccagatcgtgtctgccgaagcctggggcagagccgattgcgacgtgaagctggtggaaaagagcttcgagacagacaccaacctgaacttccagaacctgagcgtgatcggcttcagaatcctgctgctgaaagtggccggctttaacctgctgatgaccctgcggctgtggtccagc

SEQ ID NO: 4911 - DNA, 2703 bp, synthetic construct
  source 1..2703: mol_type = other DNA
atggccttaccagtgaccgccttgctcctgccgctggccttgctgctccacgccgccaggccggaagtgcagctggttgaatctggcggaggactggttcagcctggcggatctctgagactgtcttgtgccgccagcggcttcagcttcagcgacttttggatgagctgggtccgacaggcccctggcaaaggacttgaatgggtcgccacaatcagccaggccggcagcgagaaggactacgtggactctgtgaagggcagattcaccatcagccgggacaacgccaagaagtccctgtacctccagatgaacagcctgagagccgaggacaccgccgtgtactattgtgcctctggcgtgtacagcttcgactacagaggccagggcaccctggtcacagtctcttctggtaccggcggaggcggatctggcggcggaggtagcggtggcggaggatctgaattcgacttcgtgatgacacagagccctctgagcctgcctgtgacacctggcgaacctgccagcatcagctgtagaagcagccagagcatcgtgcacagcaacggcaacacctacctggaatggtatctccagaagcctggacagagcccacagctgctgatctacaaggtgtccaacagattcagcggcgtgcccgacagattttctggcagcggctctggcaccgacttcaccctgaagattagcagagtggaagccgaggacgtgggcgtgtactactgcttccaaggctctcacgtgcccctgacctttggacagggcaccaagctggaaatcaagagactcgagatccagaaccctgatcctgccgtgtaccagctgcgggatagcaagagcagcgacaagagcgtgtgtctgttcaccgacttcgacagccagaccaacgtgtcccagagcaaggactccgacgtgtacatcaccgataagtgcgtgctggacatgcggagcatggacttcaagagcaactccgccgtggcctggtccaacaagtccgatttcgcctgcgccaacgccttcaacaacagcattatccccgaggacacattcttcccaagccccgagagcagctgcggctttaccagcgagagctaccagcagggcgtgctgagcgccaccatcctgtacgagatcctgctgggcaaggccaccctgtacgccgtgctggtgtctgccctggtgctgatggctatggtcaagcggaaggacagccggggacgcgccaagagaagcggatctggcgtgaagcagaccctgaatttcgacctgctgaagctggctggcgacgtggaatccaacccaggccctactagtatggactggatttggcgcatccttttccttgtcggcgctgctaccggcgcgcattccgggccccagctccagctgcaagagtctggacctggcctggtcaagcctagcgagacactgagcctgacctgtaccgtgtccggcgatagcatcagcagcggcgattactactggggctggatcagacagcctcctggcaaaggactggaatggatcggccacatctactacagcggcgtgacctactacaaccccagcctgaagtccagagtgaccatcagcgtggacaccagccggaaccagttctccctgaagctgtctagcgtgacagccgccgataccgccgtgtactactgcaccagagaggacagcagcaactggcggagtagaggccagggaacactggtcacagttagctctggatccggcggaggcggaagtggaggcggaggatctggcggcggaggctctttcgaagaagtgcagctggttgaaagcggagccgaagtgaagaaacctggggcctctgtgaaggtgtcctgcaaggccagcggctacacctttaccagctactggattcactgggtccgacaggcccctggacaaggacttgagtggatgggcgagaacgacccctccaacggcaggaccaactacaacgagaagttcaagaaccgcgtgaccctgaccgtggacaccagcatctctaccgcctacatggaactgagccggctgagatccgatgacaccgccgtgtactattgcgccagaggacccaactacttttacagcatggactactggggccagggcacaatggtcaccgttagctctacgcgtgaggacctgaagaacgtgttcccacctgaggtggccgtgttcgagcctagcgaggccgagatcagccacacccagaaagccaccctcgtgtgcctggctaccggcttctaccccgaccatgtggaactgtcttggtgggtcaacggcaaagaggtgcacagcggcgtgtgtaccgacccccagccactgaaagaacagcccgccctgaacgacagccggtactgcctgagcagcagactgagagtgtccgccaccttctggcagaacccccggaaccacttcagatgccaggtgcagttctacggcctgagcgagaacgacgagtggacccaggacagagccaagcccgtgacccagatcgtgtctgccgaagcctggggcagagccgattgcgacgtgaagctggtggaaaagagcttcgagacagacaccaacctgaacttccagaacctgagcgtgatcggcttcagaatcctgctgctgaaagtggccggctttaacctgctgatgaccctgcggctgtggtccagc

SEQ ID NO: 4912 - DNA, 2682 bp, synthetic construct
  source 1..2682: mol_type = other DNA
atggccttaccagtgaccgccttgctcctgccgctggccttgctgctccacgccgccaggccggaagtgcagctggttgaatctggcggaggactggttcagcctggcggatctctgagactgtcttgtgccgccagcggcttcagcttcagcgacttttggatgagctgggtccgacaggcccctggcaaaggacttgaatgggtcgccacaatcagccaggccggcagcgagaaggactacgtggactctgtgaagggcagattcaccatcagccgggacaacgccaagaagtccctgtacctccagatgaacagcctgagagccgaggacaccgccgtgtactattgtgcctctggcgtgtacagcttcgactacagaggccagggcaccctggtcacagtctcttctggtaccggcggaggcggatctggcggcggaggtagcggtggcggaggatctgaattcgacatccagctgactcagagccctagctttctgagcgccagcgtgggcgacagagtgaccatcacatgtagcgccagatccagcatcagcttcatgtactggtatcagcagaagcccggcaaggcccctaagctgctgatctacgacaccagcaatctggcctctggcgtgcccagcagattttctggaagcggcagcggcaccgagttcaccctgacaatctctagcctggaagccgaggatgccgccacctactattgccagcagtggtccagctatcccctgacatttggacagggcaccaagctggaaatcaaactcgagatccagaaccctgatcctgccgtgtaccagctgcgggatagcaagagcagcgacaagagcgtgtgtctgttcaccgacttcgacagccagaccaacgtgtcccagagcaaggactccgacgtgtacatcaccgataagtgcgtgctggacatgcggagcatggacttcaagagcaactccgccgtggcctggtccaacaagtccgatttcgcctgcgccaacgccttcaacaacagcattatccccgaggacacattcttcccaagccccgagagcagctgcggctttaccagcgagagctaccagcagggcgtgctgagcgccaccatcctgtacgagatcctgctgggcaaggccaccctgtacgccgtgctggtgtctgccctggtgctgatggctatggtcaagcggaaggacagccggggacgcgccaagagaagcggatctggcgtgaagcagaccctgaatttcgacctgctgaagctggctggcgacgtggaatccaacccaggccctactagtatggactggatttggcgcatccttttccttgtcggcgctgctaccggcgcgcattccgggccccagctccagctgcaagagtctggacctggcctggtcaagcctagcgagacactgagcctgacctgtaccgtgtccggcgatagcatcagcagcggcgattactactggggctggatcagacagcctcctggcaaaggactggaatggatcggccacatctactacagcggcgtgacctactacaaccccagcctgaagtccagagtgaccatcagcgtggacaccagccggaaccagttctccctgaagctgtctagcgtgacagccgccgataccgccgtgtactactgcaccagagaggacagcagcaactggcggagtagaggccagggaacactggtcacagttagctctggatccggcggaggcggaagtggaggcggaggatctggcggcggaggctctttcgaacaggttcagctggttcagtctggggccgaagtgaagaaacctggggcctctgtgaaggtgtcctgcaaggcttccggctacacctttaccggctcttggatgaactgggtccgacaggctcctggacagggactcgaatggatcggcagaatctatcctggcgacggcgagacaaactacaacggcaagttcaaggaccgcgtgacaatcaccgccgacaagagcacaagcaccgcctacatggaactgagcagcctgcggagcgaagataccgccgtgtactactgcgcccggatctacggcaacaacgtgtacttcgatgtgtggggccagggcacaaccgtgacagtctcttctacgcgtgaggacctgaagaacgtgttcccacctgaggtggccgtgttcgagcctagcgaggccgagatcagccacacccagaaagccaccctcgtgtgcctggctaccggcttctaccccgaccatgtggaactgtcttggtgggtcaacggcaaagaggtgcacagcggcgtgtgtaccgacccccagccactgaaagaacagcccgccctgaacgacagccggtactgcctgagcagcagactgagagtgtccgccaccttctggcagaacccccggaaccacttcagatgccaggtgcagttctacggcctgagcgagaacgacgagtggacccaggacagagccaagcccgtgacccagatcgtgtctgccgaagcctggggcagagccgattgcgacgtgaagctggtggaaaagagcttcgagacagacaccaacctgaacttccagaacctgagcgtgatcggcttcagaatcctgctgctgaaagtggccggctttaacctgctgatgaccctgcggctgtggtccagc

SEQ ID NO: 4913 - DNA, 2706 bp, synthetic construct
  source 1..2706: mol_type = other DNA
atggccttaccagtgaccgccttgctcctgccgctggccttgctgctccacgccgccaggccggaagtgcagctggttgaatctggcggaggactggttcagcctggcggatctctgagactgtcttgtgccgccagcggcttcagcttcagcgacttttggatgagctgggtccgacaggcccctggcaaaggacttgaatgggtcgccacaatcagccaggccggcagcgagaaggactacgtggactctgtgaagggcagattcaccatcagccgggacaacgccaagaagtccctgtacctccagatgaacagcctgagagccgaggacaccgccgtgtactattgtgcctctggcgtgtacagcttcgactacagaggccagggcaccctggtcacagtctcttctggtaccggcggaggcggatctggcggcggaggtagcggtggcggaggatctgaattccagctggtgctgacacagtctccaagcgcctctgccagcctgggatctagcgtgaagctgacctgtacactgagcagcggccacaagaccgacaccatcgactggtatcagcagcagcctggcaaggcccctagatacctgatgaagctggaaggcagcggcagctacaacaaaggctctggcgtgcccgatagattcagcggcagttcttctggcgctgattggtatctgaccatcagcagcctccagagcgaggacgaggccgattactactgcggcacagactaccccggcaactacctgtttggcggcggaacacagctgacagtgcttggcctcgagatccagaaccctgatcctgccgtgtaccagctgcgggatagcaagagcagcgacaagagcgtgtgtctgttcaccgacttcgacagccagaccaacgtgtcccagagcaaggactccgacgtgtacatcaccgataagtgcgtgctggacatgcggagcatggacttcaagagcaactccgccgtggcctggtccaacaagtccgatttcgcctgcgccaacgccttcaacaacagcattatccccgaggacacattcttcccaagccccgagagcagctgcggctttaccagcgagagctaccagcagggcgtgctgagcgccaccatcctgtacgagatcctgctgggcaaggccaccctgtacgccgtgctggtgtctgccctggtgctgatggctatggtcaagcggaaggacagccggggacgcgccaagagaagcggatctggcgtgaagcagaccctgaatttcgacctgctgaagctggctggcgacgtggaatccaacccaggccctactagtatggactggatttggcgcatccttttccttgtcggcgctgctaccggcgcgcattccgggccccagctccagctgcaagagtctggacctggcctggtcaagcctagcgagacactgagcctgacctgtaccgtgtccggcgatagcatcagcagcggcgattactactggggctggatcagacagcctcctggcaaaggactggaatggatcggccacatctactacagcggcgtgacctactacaaccccagcctgaagtccagagtgaccatcagcgtggacaccagccggaaccagttctccctgaagctgtctagcgtgacagccgccgataccgccgtgtactactgcaccagagaggacagcagcaactggcggagtagaggccagggaacactggtcacagttagctctggatccggcggaggcggaagtggaggcggaggatctggcggcggaggctctttcgaacaagaacagctggttgaaagcggcggaggactggttcaacctggcggttctctgagactgagctgtgccgccagcggcttcaccttcagcgactactacatgagctggatcagacaggccccaggcaaaggactggaatgggtcgccacaatctaccccagcagcggcaagacctactacgccgattctgccaagggcagactgaccatctccagcgacaacgccaaggacagcctgtacctccagatgaacagcctgagagccgaggacaccgccgtgtactactgcaccagagatagctacgccgacgacgccgctctgtttgacatttggggccagggcaccaccgtgaccgtttcttctacgcgtgaggacctgaagaacgtgttcccacctgaggtggccgtgttcgagcctagcgaggccgagatcagccacacccagaaagccaccctcgtgtgcctggctaccggcttctaccccgaccatgtggaactgtcttggtgggtcaacggcaaagaggtgcacagcggcgtgtgtaccgacccccagccactgaaagaacagcccgccctgaacgacagccggtactgcctgagcagcagactgagagtgtccgccaccttctggcagaacccccggaaccacttcagatgccaggtgcagttctacggcctgagcgagaacgacgagtggacccaggacagagccaagcccgtgacccagatcgtgtctgccgaagcctggggcagagccgattgcgacgtgaagctggtggaaaagagcttcgagacagacaccaacctgaacttccagaacctgagcgtgatcggcttcagaatcctgctgctgaaagtggccggctttaacctgctgatgaccctgcggctgtggtccagc

SEQ ID NO: 4914 - DNA, 2682 bp, synthetic construct; identical to SEQ ID NO: 4910
  source 1..2682: mol_type = other DNA

SEQ ID NO: 4915 - DNA, 2703 bp, synthetic construct; identical to SEQ ID NO: 4911
  source 1..2703: mol_type = other DNA

SEQ ID NO: 4916 - DNA, 2682 bp, synthetic construct; identical to SEQ ID NO: 4912
  source 1..2682: mol_type = other DNA

SEQ ID NO: 4917 - DNA, 2706 bp, synthetic construct; identical to SEQ ID NO: 4913
  source 1..2706: mol_type = other DNA

SEQ ID NO: 4918 - DNA, 2703 bp, synthetic construct
  source 1..2703: mol_type = other DNA
atggccttaccagtgaccgccttgctcctgccgctggccttgctgctccacgccgccaggccggaagtgcagctggttgaatctggcggaggactggttcagcctggcggatctctgagactgtcttgtgccgccagcggcttcagcttcagcgacttttggatgagctgggtccgacaggcccctggcaaaggacttgaatgggtcgccacaatcagccaggccggcagcgagaaggactacgtggactctgtgaagggcagattcaccatcagccgggacaacgccaagaagtccctgtacctccagatgaacagcctgagagccgaggacaccgccgtgtactattgtgcctctggcgtgtacagcttcgactacagaggccagggcaccctggtcacagtctcttctggtaccggcggaggcggatctggcggcggaggtagcggtggcggaggatctgaattcgatatccagctcactcaaagcccctctagtctctctgcctcagtgggggatcgggtcagttttacttgtcaagcttcacaggatatcaacaacttccttaattggtatcagcagaagccaggaaaagcacccaagctgctcatctatgatgcctcaaatttggagacgggtgttcccagtcgattctctgggtcagggtccgggaccgactttacgtttacgatctcctctctgcagcccgaagacatcgccacatactattgtcaacagtacggcaacttgcctttcacatttgggggcgggactaaggttgaaatcaagaggctcgagatccagaaccctgatcctgccgtgtaccagctgcgggatagcaagagcagcgacaagagcgtgtgtctgttcaccgacttcgacagccagaccaacgtgtcccagagcaaggactccgacgtgtacatcaccgataagtgcgtgctggacatgcggagcatggacttcaagagcaactccgccgtggcctggtccaacaagtccgatttcgcctgcgccaacgccttcaacaacagcattatccccgaggacacattcttcccaagccccgagagcagctgcggctttaccagcgagagctaccagcagggcgtgctgagcgccaccatcctgtacgagatcctgctgggcaaggccaccctgtacgccgtgctggtgtctgccctggtgctgatggctatggtcaagcggaaggacagccggggacgcgccaagagaagcggatctggcgtgaagcagaccctgaatttcgacctgctgaagctggctggcgacgtggaatccaacccaggccctactagtatggactggatttggcgcatccttttccttgtcggcgctgctaccggcgcgcattccgggccccagctccagctgcaagagtctggacctggcctggtcaagcctagcgagacactgagcctgacctgtaccgtgtccggcgatagcatcagcagcggcgattactactggggctggatcagacagcctcctggcaaaggactggaatggatcggccacatctactacagcggcgtgacctactacaaccccagcctgaagtccagagtgaccatcagcgtggacaccagccggaaccagttctccctgaagctgtctagcgtgacagccgccgataccgccgtgtactactgcaccagagaggacagcagcaactggcggagtagaggccagggaacactggtcacagttagctctggatccggcggaggcggaagtggaggcggaggatctggcggcggaggctctttcgaacaggtacagctgcaggaatctgggcccggacttgtcaagccaagtcagacactttctcttacatgtaccgtgagcggcggaagtataagcagtggaggcttttactggtcttggatacggcagcacccaggcaaaggcttggagtggattggatacattcatcattcaggatctacacactataatccatcccttaagtcccgggtcaccattagcattgatacgtctaagaatctgttcagtctcaggctgtcctccgtcactgctgccgacacagccgtgtactactgcgcctccttggtttactgcggaggcgactgttatagcggctttgattattgggggcaggggaccctcgtaaccgtgagctctacgcgtgaggacctgaagaacgtgttcccacctgaggtggccgtgttcgagcctagcgaggccgagatcagccacacccagaaagccaccctcgtgtgcctggctaccggcttctaccccgaccatgtggaactgtcttggtgggtcaacggcaaagaggtgcacagcggcgtgtgtaccgacccccagccactgaaagaacagcccgccctgaacgacagccggtactgcctgagcagcagactgagagtgtccgccaccttctggcagaacccccggaaccacttcagatgccaggtgcagttctacggcctgagcgagaacgacgagtggacccaggacagagccaagcccgtgacccagatcgtgtctgccgaagcctggggcagagccgattgcgacgtgaagctggtggaaaagagcttcgagacagacaccaacctgaacttccagaacctgagcgtgatcggcttcagaatcctgctgctgaaagtggccggctttaacctgctgatgaccctgcggctgtggtccagc

SEQ ID NO: 4919 - DNA, 2691 bp, synthetic construct
  source 1..2691: mol_type = other DNA
atggccttaccagtgaccgccttgctcctgccgctggccttgctgctccacgccgccaggccggaagtgcagctggttgaatctggcggaggactggttcagcctggcggatctctgagactgtcttgtgccgccagcggcttcagcttcagcgacttttggatgagctgggtccgacaggcccctggcaaaggacttgaatgggtcgccacaatcagccaggccggcagcgagaaggactacgtggactctgtgaagggcagattcaccatcagccgggacaacgccaagaagtccctgtacctccagatgaacagcctgagagccgaggacaccgccgtgtactattgtgcctctggcgtgtacagcttcgactacagaggccagggcaccctggtcacagtctcttctggtaccggcggaggcggatctggcggcggaggtagcggtggcggaggatctgaattcgacattcagatgacacagagccctagcagcctgagcgcctctgtgggagacagagtgaccatcacatgcaagagcagccagagcgtgctgtactccagcaatcagaagaactacctggcctggttccagcagaagcctggcaaggctcctaagctgctgatctactgggccagcaccagagaaagcggcgtgccaagcagattttctggcagcggctctggcaccgacttcaccctgacaatatccagcctccagcctgaggacttcgccacctacttttgccaccagtacctgagcagctacacattcggacagggcaccaaggtggaaatcaagcggctcgagatccagaaccctgatcctgccgtgtaccagctgcgggatagcaagagcagcgacaagagcgtgtgtctgttcaccgacttcgacagccagaccaacgtgtcccagagcaaggactccgacgtgtacatcaccgataagtgcgtgctggacatgcggagcatggacttcaagagcaactccgccgtggcctggtccaacaagtccgatttcgcctgcgccaacgccttcaacaacagcattatccccgaggacacattcttcccaagccccgagagcagctgcggctttaccagcgagagctaccagcagggcgtgctgagcgccaccatcctgtacgagatcctgctgggcaaggccaccctgtacgccgtgctggtgtctgccctggtgctgatggctatggtcaagcggaaggacagccggggacgcgccaagagaagcggatctggcgtgaagcagaccctgaatttcgacctgctgaagctggctggcgacgtggaatccaacccaggccctactagtatggactggatttggcgcatccttttccttgtcggcgctgctaccggcgcgcattccgggccccagctccagctgcaagagtctggacctggcctggtcaagcctagcgagacactgagcctgacctgtaccgtgtccggcgatagcatcagcagcggcgattactactggggctggatcagacagcctcctggcaaaggactggaatggatcggccacatctactacagcggcgtgacctactacaaccccagcctgaagtccagagtgaccatcagcgtggacaccagccggaaccagttctccctgaagctgtctagcgtgacagccgccgataccgccgtgtactactgcaccagagaggacagcagcaactggcggagtagaggccagggaacactggtcacagttagctctggatccggcggaggcggaagtggaggcggaggatctggcggcggaggctctttcgaagaggtgcagctggttgaatctggcggaggactggttcagcctggcggatctctgagactgtcttgtgccgccagcggctacaccttcaccacctattggatgcactgggtccgacaggcccctggcaaaggacttgagtgggtcggatatatcaggcccagcaccggctacacagagtacaaccagaagttcaaggaccgcttcaccatcagcgccgacaccagcaagaataccgcctacctccagatgaacagcctgagagccgaggacaccgccgtgtactactgtgccagatccagatggctgctggactattggggccagggcacactggttacagtttctacgcgtgaggacctgaagaacgtgttcccacctgaggtggccgtgttcgagcctagcgaggccgagatcagccacacccagaaagccaccctcgtgtgcctggctaccggcttctaccccgaccatgtggaactgtcttggtgggtcaacggcaaagaggtgcacagcggcgtgtgtaccgacccccagccactgaaagaacagcccgccctgaacgacagccggtactgcctgagcagcagactgagagtgtccgccaccttctggcagaacccccggaaccacttcagatgccaggtgcagttctacggcctgagcgagaacgacgagtggacccaggacagagccaagcccgtgacccagatcgtgtctgccgaagcctggggcagagccgattgcgacgtgaagctggtggaaaagagcttcgagacagacaccaacctgaacttccagaacctgagcgtgatcggcttcagaatcctgctgctgaaagtggccggctttaacctgctgatgaccctgcggctgtggtccagc

SEQ ID NO: 4920 - DNA, 2682 bp, synthetic construct
  source 1..2682: mol_type = other DNA
atggccttaccagtgaccgccttgctcctgccgctggccttgctgctccacgccgccaggccggaagtgcagctggttgaatctggcggaggactggttcagcctggcggatctctgagactgtcttgtgccgccagcggcttcagcttcagcgacttttggatgagctgggtccgacaggcccctggcaaaggacttgaatgggtcgccacaatcagccaggccggcagcgagaaggactacgtggactctgtgaagggcagattcaccatcagccgggacaacgccaagaagtccctgtacctccagatgaacagcctgagagccgaggacaccgccgtgtactattgtgcctctggcgtgtacagcttcgactacagaggccagggcaccctggtcacagtctcttctggtaccggcggaggcggatctggcggcggaggtagcggtggcggaggatctgaattcgacatccagatgacacagagccctagcagcctgtctgccagcgtgggagacagagtgaccatcacctgtagagccagccaggacatcagcaactacctgaactggtatcagcagaagcccggcaaggcccctaagctgctgatctactacaccagcagactgcacagcggcgtgcccagcagattttctggctctggcagcggcaccgacttcaccctgacaatatctagcctccagcctgaggacttcgccacctactattgccagcagggcaacaccctgccttacacatttggacagggcaccaaggtggaaatcaagagactcgagatccagaaccctgatcctgccgtgtaccagctgcgggatagcaagagcagcgacaagagcgtgtgtctgttcaccgacttcgacagccagaccaacgtgtcccagagcaaggactccgacgtgtacatcaccgataagtgcgtgctggacatgcggagcatggacttcaagagcaactccgccgtggcctggtccaacaagtccgatttcgcctgcgccaacgccttcaacaacagcattatccccgaggacacattcttcccaagccccgagagcagctgcggctttaccagcgagagctaccagcagggcgtgctgagcgccaccatcctgtacgagatcctgctgggcaaggccaccctgtacgccgtgctggtgtctgccctggtgctgatggctatggtcaagcggaaggacagccggggacgcgccaagagaagcggatctggcgtgaagcagaccctgaatttcgacctgctgaagctggctggcgacgtggaatccaacccaggccctactagtatggactggatttggcgcatccttttccttgtcggcgctgctaccggcgcgcattccgggccccagctccagctgcaagagtctggacctggcctggtcaagcctagcgagacactgagcctgacctgtaccgtgtccggcgatagcatcagcagcggcgattactactggggctggatcagacagcctcctggcaaaggactggaatggatcggccacatctactacagcggcgtgacctactacaaccccagcctgaagtccagagtgaccatcagcgtggacaccagccggaaccagttctccctgaagctgtctagcgtgacagccgccgataccgccgtgtactactgcaccagagaggacagcagcaactggcggagtagaggccagggaacactggtcacagttagctctggatccggcggaggcggaagtggaggcggaggatctggcggcggaggctctttcgaagaagtgcagctggttgaatcaggtggcggcctggttcaacctggcggatctctgagactgagctgtgccgccagcggcttcaccttcagcgactactttatgagctgggtccgacaggcccctggcaaaggacttgaatgggtcgccaccatcagcaatggcggcacctacacttactaccccgacagcgtgaagggcagattcaccatctccagagacaacagcaagaacaccctgtacctccagatgaactccctgagagccgaggacaccgccgtgtactactgcgccagattcgacggctacatcttcgactattggggccagggcaccctggtcacagtctcttctacgcgtgaggacctgaagaacgtgttcccacctgaggtggccgtgttcgagcctagcgaggccgagatcagccacacccagaaagccaccctcgtgtgcctggctaccggcttctaccccgaccatgtggaactgtcttggtgggtcaacggcaaagaggtgcacagcggcgtgtgtaccgacccccagccactgaaagaacagcccgccctgaacgacagccggtactgcctgagcagcagactgagagtgtccgccaccttctggcagaacccccggaaccacttcagatgccaggtgcagttctacggcctgagcgagaacgacgagtggacccaggacagagccaagcccgtgacccagatcgtgtctgccgaagcctggggcagagccgattgcgacgtgaagctggtggaaaagagcttcgagacagacaccaacctgaacttccagaacctgagcgtgatcggcttcagaatcctgctgctgaaagtggccggctttaacctgctgatgaccctgcggctgtggtccagc

SEQ ID NO: 4921 - DNA, 2076 bp, synthetic construct
  source 1..2076: mol_type = other DNA
atggccttaccagtgaccgccttgctcctgccgctggccttgctgctccacgccgccaggccggacatccagatgacacagagccctagcagcctgtctgccagcgtgggagacagagtgaccatcacatgcaaggccagcgaccacatcaacaactggctggcctggtatcagcagaagcctggacaggcccctaagctgctgatctacggcgctaccacactggaaacaggcgtgcccagcagattttctggcagcggctctggcaccgactacaccctgacaatatccagcctccagcctgaggacttcgccacctactactgtcagcagagctggaacaccccttggacattcggccagggcaccaagctggaaatcaagagactcgaggacctgaagaacgtgttcccacctgaggtggccgtgttcgagcctagcgaggccgagatcagccacacccagaaagccaccctcgtgtgcctggctaccggcttctaccccgaccatgtggaactgtcttggtgggtcaacggcaaagaggtgcacagcggcgtgtgtaccgacccccagccactgaaagaacagcccgccctgaacgacagccggtactgcctgagcagcagactgagagtgtccgccaccttctggcagaacccccggaaccacttcagatgccaggtgcagttctacggcctgagcgagaacgacgagtggacccaggacagagccaagcccgtgacccagatcgtgtctgccgaagcctggggcagagccgattgcgacgtgaagctggtggaaaagagcttcgagacagacaccaacctgaacttccagaacctgagcgtgatcggcttcagaatcctgctgctgaaagtggccggctttaacctgctgatgaccctgcggctgtggtccagcagggccaagcgatctggatctggagcaacaaacttctcactactcaaacaagcaggtgacgtggaggagaatcccgggcctactagtatggactggatttggcgcatccttttccttgtcggcgctgctaccggcgcccattccgggcccatggaccccgacctggaaatcagagccgccttcctgcggcagagaaacacagccctgagaacagaggtggccgagctggaacaagaggtgcagcggctggaaaacgaggtgtcccagtacgagacaagatacggccctctcggaggcggaaaaggatccggcggcggaggatctggcggaggcggatctgggggcggaggctctttcgaacaagttcagcttcaacagcctggcgctgagctggtcaaacctggcgcttctgtgaagatgagctgcaaagccagcggctacgccttcagcagctactggatcaactggatgaagcagaaacccggccagggactcgaatggatcggccaaatctatcccggcgacggcgacaccaactacaacggcaagttcaagggcagagccacactgaccgccgatacctctagcagcacagcctacatgcagctgagcagcctgaccagcgaagatagcgccgtgtacttctgtgcccggtccatcacaacagtcgtgggctgcgctatggactattggggccagggaacaagcgtgaccgtgtctagtacgcgtatccagaaccctgatcctgccgtgtaccagctgcgggatagcaagagcagcgacaagagcgtgtgtctgttcaccgacttcgacagccagaccaacgtgtcccagagcaaggactccgacgtgtacatcaccgataagtgcgtgctggacatgcggagcatggacttcaagagcaactccgccgtggcctggtccaacaagtccgatttcgcctgcgccaacgccttcaacaacagcattatccccgaggacacattcttcccaagccccgagagcagctgcggctttaccagcgagagctaccagcagggcgtgctgagcgccaccatcctgtacgagatcctgctgggcaaggccaccctgtacgccgtgctggtgtctgccctggtgctgatggctatggtcaagcggaaggacagccgggga

SEQ ID NO: 4922 - DNA, 2088 bp, synthetic construct
  source 1..2088: mol_type = other DNA
atggccttaccagtgaccgccttgctcctgccgctggccttgctgctccacgccgccaggccggacatccagatgacacagagccctagcagcctgtctgccagcgtgggagacagagtgaccatcacatgcaaggccagcgaccacatcaacaactggctggcctggtatcagcagaagcctggacaggcccctaagctgctgatctacggcgctaccacactggaaacaggcgtgcccagcagattttctggcagcggctctggcaccgactacaccctgacaatatccagcctccagcctgaggacttcgccacctactactgtcagcagagctggaacaccccttggacattcggccagggcaccaagctggaaatcaagagactcgagatccagaaccctgatcctgccgtgtaccagctgcgggatagcaagagcagcgacaagagcgtgtgtctgttcaccgacttcgacagccagaccaacgtgtcccagagcaaggactccgacgtgtacatcaccgataagtgcgtgctggacatgcggagcatggacttcaagagcaactccgccgtggcctggtccaacaagtccgatttcgcctgcgccaacgccttcaacaacagcattatccccgaggacacattcttcccaagccccgagagcagctgcggctttaccagcgagagctaccagcagggcgtgctgagcgccaccatcctgtacgagatcctgctgggcaaggccaccctgtacgccgtgctggtgtctgccctggtgctgatggctatggtcaagcggaaggacagccggggacgcgccaagagaagcggatctggcgtgaagcagaccctgaatttcgacctgctgaagctggctggcgacgtggaatccaacccaggccctactagtatggactggatttggcgcatccttttccttgtcggcgctgctaccggcgcccattccgggcccatggaccccgacctggaaatcagagccgccttcctgcggcagagaaacacagccctgagaacagaggtggccgagctggaacaagaggtgcagcggctggaaaacgaggtgtcccagtacgagacaagatacggccctctcggaggcggaaaaggatccggcggcggaggatctggcggaggcggatctgggggcggaggctctttcgaacaagttcagcttcaacagcctggcgctgagctggtcaaacctggcgcttctgtgaagatgagctgcaaagccagcggctacgccttcagcagctactggatcaactggatgaagcagaaacccggccagggactcgaatggatcggccaaatctatcccggcgacggcgacaccaactacaacggcaagttcaagggcagagccacactgaccgccgatacctctagcagcacagcctacatgcagctgagcagcctgaccagcgaagatagcgccgtgtacttctgtgcccggtccatcacaacagtcgtgggctgcgctatggactattggggccagggaacaagcgtgaccgtgtctagtacgcgtgaggacctgaagaacgtgttcccacctgaggtggccgtgttcgagcctagcgaggccgagatcagccacacccagaaagccaccctcgtgtgcctggctaccggcttctaccccgaccatgtggaactgtcttggtgggtcaacggcaaagaggtgcacagcggcgtgtgtaccgacccccagccactgaaagaacagcccgccctgaacgacagccggtactgcctgagcagcagactgagagtgtccgccaccttctggcagaacccccggaaccacttcagatgccaggtgcagttctacggcctgagcgagaacgacgagtggacccaggacagagccaagcccgtgacccagatcgtgtctgccgaagcctggggcagagccgattgcgacgtgaagctggtggaaaagagcttcgagacagacaccaacctgaacttccagaacctgagcgtgatcggcttcagaatcctgctgctgaaagtggccggctttaacctgctgatgaccctgcggctgtggtccagc

SEQ ID NO: 4923 - DNA, 2007 bp, synthetic construct
  source 1..2007: mol_type = other DNA
atggccttaccagtgaccgccttgctcctgccgctggccttgctgctccacgccgccaggccggacatccagatgacacagagccctagcagcctgtctgccagcgtgggagacagagtgaccatcacatgcaaggccagcgaccacatcaacaactggctggcctggtatcagcagaagcctggacaggcccctaagctgctgatctacggcgctaccacactggaaacaggcgtgcccagcagattttctggcagcggctctggcaccgactacaccctgacaatatccagcctccagcctgaggacttcgccacctactactgtcagcagagctggaacaccccttggacattcggccagggcaccaagctggaaatcaagagactcgaggacctgaagaacgtgttcccacctgaggtggccgtgttcgagcctagcgaggccgagatcagccacacccagaaagccaccctcgtgtgcctggctaccggcttctaccccgaccatgtggaactgtcttggtgggtcaacggcaaagaggtgcacagcggcgtgtgtaccgacccccagccactgaaagaacagcccgccctgaacgacagccggtactgcctgagcagcagactgagagtgtccgccaccttctggcagaacccccggaaccacttcagatgccaggtgcagttctacggcctgagcgagaacgacgagtggacccaggacagagccaagcccgtgacccagatcgtgtctgccgaagcctggggcagagccgattgcgacgtgaagctggtggaaaagagcttcgagacagacaccaacctgaacttccagaacctgagcgtgatcggcttcagaatcctgctgctgaaagtggccggctttaacctgctgatgaccctgcggctgtggtccagcagggccaagcgatctggatctggagcaacaaacttctcactactcaaacaagcaggtgacgtggaggagaatcccgggcctactagtatggactggatttggcgcatccttttccttgtcggcgctgctaccggcgcccattccgggcccgaagttgctgccctcgagaaggaggtagcagctttggaaaaagaagtcgcagcccttgagaaagaagttgcggctctggagaagggatccggcggcggaggatctggcggaggcggatctgggggcggaggctctttcgaacaagttcagcttcaacagcctggcgctgagctggtcaaacctggcgcttctgtgaagatgagctgcaaagccagcggctacgccttcagcagctactggatcaactggatgaagcagaaacccggccagggactcgaatggatcggccaaatctatcccggcgacggcgacaccaactacaacggcaagttcaagggcagagccacactgaccgccgatacctctagcagcacagcctacatgcagctgagcagcctgaccagcgaagatagcgccgtgtacttctgtgcccggtccatcacaacagtcgtgggctgcgctatggactattggggccagggaacaagcgtgaccgtgtctagtacgcgtatccagaaccctgatcctgccgtgtaccagctgcgggatagcaagagcagcgacaagagcgtgtgtctgttcaccgacttcgacagccagaccaacgtgtcccagagcaaggactccgacgtgtacatcaccgataagtgcgtgctggacatgcggagcatggacttcaagagcaactccgccgtggcctggtccaacaagtccgatttcgcctgcgccaacgccttcaacaacagcattatccccgaggacacattcttcccaagccccgagagcagctgcggctttaccagcgagagctaccagcagggcgtgctgagcgccaccatcctgtacgagatcctgctgggcaaggccaccctgtacgccgtgctggtgtctgccctggtgctgatggctatggtcaagcggaaggacagccgggga

SEQ ID NO: 4924 - DNA, 2019 bp, synthetic construct
  source 1..2019: mol_type = other DNA
atggccttaccagtgaccgccttgctcctgccgctggccttgctgctccacgccgccaggccggacatccagatgacacagagccctagcagcctgtctgccagcgtgggagacagagtgaccatcacatgcaaggccagcgaccacatcaacaactggctggcctggtatcagcagaagcctggacaggcccctaagctgctgatctacggcgctaccacactggaaacaggcgtgcccagcagattttctggcagcggctctggcaccgactacaccctgacaatatccagcctccagcctgaggacttcgccacctactactgtcagcagagctggaacaccccttggacattcggccagggcaccaagctggaaatcaagagactcgagatccagaaccctgatcctgccgtgtaccagctgcgggatagcaagagcagcgacaagagcgtgtgtctgttcaccgacttcgacagccagaccaacgtgtcccagagcaaggactccgacgtgtacatcaccgataagtgcgtgctggacatgcggagcatggacttcaagagcaactccgccgtggcctggtccaacaagtccgatttcgcctgcgccaacgccttcaacaacagcattatccccgaggacacattcttcccaagccccgagagcagctgcggctttaccagcgagagctaccagcagggcgtgctgagcgccaccatcctgtacgagatcctgctgggcaaggccaccctgtacgccgtgctggtgtctgccctggtgctgatggctatggtcaagcggaaggacagccggggacgcgccaagagaagcggatctggcgtgaagcagaccctgaatttcgacctgctgaagctggctggcgacgtggaatccaacccaggccctactagtatggactggatttggcgcatccttttccttgtcggcgctgctaccggcgcccattccgggcccgaagttgctgccctcgagaaggaggtagcagctttggaaaaagaagtcgcagcccttgagaaagaagttgcggctctggagaagggatccggcggcggaggatctggcggaggcggatctgggggcggaggctctttcgaacaagttcagcttcaacagcctggcgctgagctggtcaaacctggcgcttctgtgaagatgagctgcaaagccagcggctacgccttcagcagctactggatcaactggatgaagcagaaacccggccagggactcgaatggatcggccaaatctatcccggcgacggcgacaccaactacaacggcaagttcaagggcagagccacactgaccgccgatacctctagcagcacagcctacatgcagctgagcagcctgaccagcgaagatagcgccgtgtacttctgtgcccggtccatcacaacagtcgtgggctgcgctatggactattggggccagggaacaagcgtgaccgtgtctagtacgcgtgaggacctgaagaacgtgttcccacctgaggtggccgtgttcgagcctagcgaggccgagatcagccacacccagaaagccaccctcgtgtgcctggctaccggcttctaccccgaccatgtggaactgtcttggtgggtcaacggcaaagaggtgcacagcggcgtgtgtaccgacccccagccactgaaagaacagcccgccctgaacgacagccggtactgcctgagcagcagactgagagtgtccgccaccttctggcagaacccccggaaccacttcagatgccaggtgcagttctacggcctgagcgagaacgacgagtggacccaggacagagccaagcccgtgacccagatcgtgtctgccgaagcctggggcagagccgattgcgacgtgaagctggtggaaaagagcttcgagacagacaccaacctgaacttccagaacctgagcgtgatcggcttcagaatcctgctgctgaaagtggccggctttaacctgctgatgaccctgcggctgtggtccagc

SEQ ID NO: 4925 - DNA, 2007 bp, synthetic construct; identical to SEQ ID NO: 4923
  source 1..2007: mol_type = other DNA

SEQ ID NO: 4926 - DNA, 2019 bp, synthetic construct; identical to SEQ ID NO: 4924
  source 1..2019: mol_type = other DNA

SEQ ID NO: 4927 - DNA, 2277 bp, synthetic construct
  source 1..2277: mol_type = other DNA
atggccttaccagtgaccgccttgctcctgccgctggccttgctgctccacgccgccaggccggacatccagatgacacagagccctagcagcctgtctgccagcgtgggagacagagtgaccatcacatgcaaggccagcgaccacatcaacaactggctggcctggtatcagcagaagcctggacaggcccctaagctgctgatctacggcgctaccacactggaaacaggcgtgcccagcagattttctggcagcggctctggcaccgactacaccctgacaatatccagcctccagcctgaggacttcgccacctactactgtcagcagagctggaacaccccttggacattcggccagggcaccaagctggaaatcaagagactcgaggacctgaagaacgtgttcccacctgaggtggccgtgttcgagcctagcgaggccgagatcagccacacccagaaagccaccctcgtgtgcctggctaccggcttctaccccgaccatgtggaactgtcttggtgggtcaacggcaaagaggtgcacagcggcgtgtgtaccgacccccagccactgaaagaacagcccgccctgaacgacagccggtactgcctgagcagcagactgagagtgtccgccaccttctggcagaacccccggaaccacttcagatgccaggtgcagttctacggcctgagcgagaacgacgagtggacccaggacagagccaagcccgtgacccagatcgtgtctgccgaagcctggggcagagccgattgcgacgtgaagctggtggaaaagagcttcgagacagacaccaacctgaacttccagaacctgagcgtgatcggcttcagaatcctgctgctgaaagtggccggctttaacctgctgatgaccctgcggctgtggtccagcagggccaagcgatctggatctggagcaacaaacttctcactactcaaacaagcaggtgacgtggaggagaatcccgggcctactagtatggactggatttggcgcatccttttccttgtcggcgctgctaccggcgcccattccgggccccaggttcagctgcaagagtctggcggaggacttgctcaagctggcggaagcctgagactgtcttgtgccgcctctggcagaaccttcagcatgggctggtttagacaggcccctggcaaagagagagagttcgtcgccgccatcacatacagcggcggcagcccttactacgcctcttctgtcagaggccggttcaccatcagccgggacaacgccaagaacaccgtgtacctccagatgaacagcctgaagccagaggacaccgccgtgtactactgtgccgccaatccaacctacggcagcgactggaatgccgagaattggggccagggcacccaagtgacagtgtctagtggatccggcggcggaggatctggcggaggcggatctgggggcggaggctctttcgaacaagttcagcttcaacagcctggcgctgagctggtcaaacctggcgcttctgtgaagatgagctgcaaagccagcggctacgccttcagcagctactggatcaactggatgaagcagaaacccggccagggactcgaatggatcggccaaatctatcccggcgacggcgacaccaactacaacggcaagttcaagggcagagccacactgaccgccgatacctctagcagcacagcctacatgcagctgagcagcctgaccagcgaagatagcgccgtgtacttctgtgcccggtccatcacaacagtcgtgggctgcgctatggactattggggccagggaacaagcgtgaccgtgtctagtacgcgtatccagaaccctgatcctgccgtgtaccagctgcgggatagcaagagcagcgacaagagcgtgtgtctgttcaccgacttcgacagccagaccaacgtgtcccagagcaaggactccgacgtgtacatcaccgataagtgcgtgctggacatgcggagcatggacttcaagagcaactccgccgtggcctggtccaacaagtccgatttcgcctgcgccaacgccttcaacaacagcattatccccgaggacacattcttcccaagccccgagagcagctgcggctttaccagcgagagctaccagcagggcgtgctgagcgccaccatcctgtacgagatcctgctgggcaaggccaccctgtacgccgtgctggtgtctgccctggtgctgatggctatggtcaagcggaaggacagccgggga

SEQ ID NO: 4928 - DNA, 2289 bp, synthetic construct
  source 1..2289: mol_type = other DNA
atggccttaccagtgaccgccttgctcctgccgctggccttgctgctccacgccgccaggccggacatccagatgacacagagccctagcagcctgtctgccagcgtgggagacagagtgaccatcacatgcaaggccagcgaccacatcaacaactggctggcctggtatcagcagaagcctggacaggcccctaagctgctgatctacggcgctaccacactggaaacaggcgtgcccagcagattttctggcagcggctctggcaccgactacaccctgacaatatccagcctccagcctgaggacttcgccacctactactgtcagcagagctggaacaccccttggacattcggccagggcaccaagctggaaatcaagagactcgagatccagaaccctgatcctgccgtgtaccagctgcgggatagcaagagcagcgacaagagcgtgtgtctgttcaccgacttcgacagccagaccaacgtgtcccagagcaaggactccgacgtgtacatcaccgataagtgcgtgctggacatgcggagcatggacttcaagagcaactccgccgtggcctggtccaacaagtccgatttcgcctgcgccaacgccttcaacaacagcattatccccgaggacacattcttcccaagccccgagagcagctgcggctttaccagcgagagctaccagcagggcgtgctgagcgccaccatcctgtacgagatcctgctgggcaaggccaccctgtacgccgtgctggtgtctgccctggtgctgatggctatggtcaagcggaaggacagccggggacgcgccaagagaagcggatctggcgtgaagcagaccctgaatttcgacctgctgaagctggctggcgacgtggaatccaacccaggccctactagtatggactggatttggcgcatccttttccttgtcggcgctgctaccggcgcccattccgggccccaggttcagctgcaagagtctggcggaggacttgctcaagctggcggaagcctgagactgtcttgtgccgcctctggcagaaccttcagcatgggctggtttagacaggcccctggcaaagagagagagttcgtcgccgccatcacatacagcggcggcagcccttactacgcctcttctgtcagaggccggttcaccatcagccgggacaacgccaagaacaccgtgtacctccagatgaacagcctgaagccagaggacaccgccgtgtactactgtgccgccaatccaacctacggcagcgactggaatgccgagaattggggccagggcacccaagtgacagtgtctagtggatccggcggcggaggatctggcggaggcggatctgggggcggaggctctttcgaacaagttcagcttcaacagcctggcgctgagctggtcaaacctggcgcttctgtgaagatgagctgcaaagccagcggctacgccttcagcagctactggatcaactggatgaagcagaaacccggccagggactcgaatggatcggccaaatctatcccggcgacggcgacaccaactacaacggcaagttcaagggcagagccacactgaccgccgatacctctagcagcacagcctacatgcagctgagcagcctgaccagcgaagatagcgccgtgtacttctgtgcccggtccatcacaacagtcgtgggctgcgctatggactattggggccagggaacaagcgtgaccgtgtctagtacgcgtgaggacctgaagaacgtgttcccacctgaggtggccgtgttcgagcctagcgaggccgagatcagccacacccagaaagccaccctcgtgtgcctggctaccggcttctaccccgaccatgtggaactgtcttggtgggtcaacggcaaagaggtgcacagcggcgtgtgtaccgacccccagccactgaaagaacagcccgccctgaacgacagccggtactgcctgagcagcagactgagagtgtccgccaccttctggcagaacccccggaaccacttcagatgccaggtgcagttctacggcctgagcgagaacgacgagtggacccaggacagagccaagcccgtgacccagatcgtgtctgccgaagcctggggcagagccgattgcgacgtgaagctggtggaaaagagcttcgagacagacaccaacctgaacttccagaacctgagcgtgatcggcttcagaatcctgctgctgaaagtggccggctttaacctgctgatgaccctgcggctgtggtccagc

SEQ ID NO: 4929 - DNA, 2295 bp, synthetic construct
  source 1..2295: mol_type = other DNA
atggccttaccagtgaccgccttgctcctgccgctggccttgctgctccacgccgccaggccggaagtgcaactggtggaatctggaggctctctggtgcagccagggggaagcctgagactgtcttgtgccgcttccggcttcaccttcgacgactacgccatgagctgggtgcgccaggtgccaggcaaaggcctggaatgggtgtccagcatcaactggagcggcacccacaccgattacgccgactccgtgaaaggcagattcacaatcagcagaaacaacgccaacaataccctgtacctgcagatgaactccctgaagtctgaggatacagcagtgtattattgcgccaagaactggcgggacgccggcaccacttggtttgagaaaagcggctctgccggacagggaacccaagtgacagtgtcctccggtaccggcggaggcggatctggcggcggaggtagcggtggcggaggatctgaattcgacatccagatgacacagagccctagcagcctgtctgccagcgtgggagacagagtgaccatcacatgcaaggccagcgaccacatcaacaactggctggcctggtatcagcagaagcctggacaggcccctaagctgctgatctacggcgctaccacactggaaacaggcgtgcccagcagattttctggcagcggctctggcaccgactacaccctgacaatatccagcctccagcctgaggacttcgccacctactactgtcagcagagctggaacaccccttggacattcggccagggcaccaagctggaaatcaagagactcgaggacctgaagaacgtgttcccacctgaggtggccgtgttcgagcctagcgaggccgagatcagccacacccagaaagccaccctcgtgtgcctggctaccggcttctaccccgaccatgtggaactgtcttggtgggtcaacggcaaagaggtgcacagcggcgtgtgtaccgacccccagccactgaaagaacagcccgccctgaacgacagccggtactgcctgagcagcagactgagagtgtccgccaccttctggcagaacccccggaaccacttcagatgccaggtgcagttctacggcctgagcgagaacgacgagtggacccaggacagagccaagcccgtgacccagatcgtgtctgccgaagcctggggcagagccgattgcgacgtgaagctggtggaaaagagcttcgagacagacaccaacctgaacttccagaacctgagcgtgatcggcttcagaatcctgctgctgaaagtggccggctttaacctgctgatgaccctgcggctgtggtccagcagggccaagcgatctggatctggagcaacaaacttctcactactcaaacaagcaggtgacgtggaggagaatcccgggcctactagtatggactggatttggcgcatccttttccttgtcggcgctgctaccggcgcgcattccttcgaacaagttcagcttcaacagcctggcgctgagctggtcaaacctggcgcttctgtgaagatgagctgcaaagccagcggctacgccttcagcagctactggatcaactggatgaagcagaaacccggccagggactcgaatggatcggccaaatctatcccggcgacggcgacaccaactacaacggcaagttcaagggcagagccacactgaccgccgatacctctagcagcacagcctacatgcagctgagcagcctgaccagcgaagatagcgccgtgtacttctgtgcccggtccatcacaacagtcgtgggctgcgctatggactattggggccagggaacaagcgtgaccgtgtctagtacgcgtatccagaaccctgatcctgccgtgtaccagctgcgggatagcaagagcagcgacaagagcgtgtgtctgttcaccgacttcgacagccagaccaacgtgtcccagagcaaggactccgacgtgtacatcaccgataagtgcgtgctggacatgcggagcatggacttcaagagcaactccgccgtggcctggtccaacaagtccgatttcgcctgcgccaacgccttcaacaacagcattatccccgaggacacattcttcccaagccccgagagcagctgcggctttaccagcgagagctaccagcagggcgtgctgagcgccaccatcctgtacgagatcctgctgggcaaggccaccctgtacgccgtgctggtgtctgccctggtgctgatggctatggtcaagcggaaggacagccgggga

SEQ ID NO: 4930 - DNA, 2307 bp, synthetic construct
  source 1..2307: mol_type = other DNA
atggccttaccagtgaccgccttgctcctgccgctggccttgctgctccacgccgccaggccggaagtgcaactggtggaatctggaggctctctggtgcagccagggggaagcctgagactgtcttgtgccgcttccggcttcaccttcgacgactacgccatgagctgggtgcgccaggtgccaggcaaaggcctggaatgggtgtccagcatcaactggagcggcacccacaccgattacgccgactccgtgaaaggcagattcacaatcagcagaaacaacgccaacaataccctgtacctgcagatgaactccctgaagtctgaggatacagcagtgtattattgcgccaagaactggcgggacgccggcaccacttggtttgagaaaagcggctctgccggacagggaacccaagtgacagtgtcctccggtaccggcggaggcggatctggcggcggaggtagcggtggcggaggatctgaattcgacatccagatgacacagagccctagcagcctgtctgccagcgtgggagacagagtgaccatcacatgcaaggccagcgaccacatcaacaactggctggcctggtatcagcagaagcctggacaggcccctaagctgctgatctacggcgctaccacactggaaacaggcgtgcccagcagattttctggcagcggctctggcaccgactacaccctgacaatatccagcctccagcctgaggacttcgccacctactactgtcagcagagctggaacaccccttggacattcggccagggcaccaagctggaaatcaagagactcgagatccagaaccctgatcctgccgtgtaccagctgcgggatagcaagagcagcgacaagagcgtgtgtctgttcaccgacttcgacagccagaccaacgtgtcccagagcaaggactccgacgtgtacatcaccgataagtgcgtgctggacatgcggagcatggacttcaagagcaactccgccgtggcctggtccaacaagtccgatttcgcctgcgccaacgccttcaacaacagcattatccccgaggacacattcttcccaagccccgagagcagctgcggctttaccagcgagagctaccagcagggcgtgctgagcgccaccatcctgtacgagatcctgctgggcaaggccaccctgtacgccgtgctggtgtctgccctggtgctgatggctatggtcaagcggaaggacagccggggacgcgccaagagaagcggatctggcgtgaagcagaccctgaatttcgacctgctgaagctggctggcgacgtggaatccaacccaggccctactagtatggactggatttggcgcatccttttccttgtcggcgctgctaccggcgcgcattccttcgaacaagttcagcttcaacagcctggcgctgagctggtcaaacctggcgcttctgtgaagatgagctgcaaagccagcggctacgccttcagcagctactggatcaactggatgaagcagaaacccggccagggactcgaatggatcggccaaatctatcccggcgacggcgacaccaactacaacggcaagttcaagggcagagccacactgaccgccgatacctctagcagcacagcctacatgcagctgagcagcctgaccagcgaagatagcgccgtgtacttctgtgcccggtccatcacaacagtcgtgggctgcgctatggactattggggccagggaacaagcgtgaccgtgtctagtacgcgtgaggacctgaagaacgtgttcccacctgaggtggccgtgttcgagcctagcgaggccgagatcagccacacccagaaagccaccctcgtgtgcctggctaccggcttctaccccgaccatgtggaactgtcttggtgggtcaacggcaaagaggtgcacagcggcgtgtgtaccgacccccagccactgaaagaacagcccgccctgaacgacagccggtactgcctgagcagcagactgagagtgtccgccaccttctggcagaacccccggaaccacttcagatgccaggtgcagttctacggcctgagcgagaacgacgagtggacccaggacagagccaagcccgtgacccagatcgtgtctgccgaagcctggggcagagccgattgcgacgtgaagctggtggaaaagagcttcgagacagacaccaacctgaacttccagaacctgagcgtgatcggcttcagaatcctgctgctgaaagtggccggctttaacctgctgatgaccctgcggctgtggtccagc

SEQ ID NO: 4931 - DNA, 2289 bp, synthetic construct
  source 1..2289: mol_type = other DNA
atggccttaccagtgaccgccttgctcctgccgctggccttgctgctccacgccgccaggccggaagttcagctgcttgagtctggcggaggactggttcaacctggcggaagcctgagactgtcttgtgccgccagcggcttcatcttcagcagctacgccatgagctgggtccgacaggctcctggaaagggccaagaatgggtttccggcgttagcggcacaggcgtgaacacctactacgccgatagcgtgaagggcagattcaccatcagccgggacaacagcaagaacaccctgtacctccagatgaacagcctgagagccgaggacaccgccgtgtactattgtgcctctggcaaaggctgggacagcggctcttggtacgaggactatagaggccagggcaccctggtcacagtttcttcaggtaccggcggaggcggatctggcggcggaggtagcggtggcggaggatctgaattcgacatccagatgacacagagccctagcagcctgtctgccagcgtgggagacagagtgaccatcacatgcaaggccagcgaccacatcaacaactggctggcctggtatcagcagaagcctggacaggcccctaagctgctgatctacggcgctaccacactggaaacaggcgtgcccagcagattttctggcagcggctctggcaccgactacaccctgacaatatccagcctccagcctgaggacttcgccacctactactgtcagcagagctggaacaccccttggacattcggccagggcaccaagctggaaatcaagagactcgaggacctgaagaacgtgttcccacctgaggtggccgtgttcgagcctagcgaggccgagatcagccacacccagaaagccaccctcgtgtgcctggctaccggcttctaccccgaccatgtggaactgtcttggtgggtcaacggcaaagaggtgcacagcggcgtgtgtaccgacccccagccactgaaagaacagcccgccctgaacgacagccggtactgcctgagcagcagactgagagtgtccgccaccttctggcagaacccccggaaccacttcagatgccaggtgcagttctacggcctgagcgagaacgacgagtggacccaggacagagccaagcccgtgacccagatcgtgtctgccgaagcctggggcagagccgattgcgacgtgaagctggtggaaaagagcttcgagacagacaccaacctgaacttccagaacctgagcgtgatcggcttcagaatcctgctgctgaaagtggccggctttaacctgctgatgaccctgcggctgtggtccagcagggccaagcgatctggatctggagcaacaaacttctcactactcaaacaagcaggtgacgtggaggagaatcccgggcctactagtatggactggatttggcgcatccttttccttgtcggcgctgctaccggcgcgcattccttcgaacaagttcagcttcaacagcctggcgctgagctggtcaaacctggcgcttctgtgaagatgagctgcaaagccagcggctacgccttcagcagctactggatcaactggatgaagcagaaacccggccagggactcgaatggatcggccaaatctatcccggcgacggcgacaccaactacaacggcaagttcaagggcagagccacactgaccgccgatacctctagcagcacagcctacatgcagctgagcagcctgaccagcgaagatagcgccgtgtacttctgtgcccggtccatcacaacagtcgtgggctgcgctatggactattggggccagggaacaagcgtgaccgtgtctagtacgcgtatccagaaccctgatcctgccgtgtaccagctgcgggatagcaagagcagcgacaagagcgtgtgtctgttcaccgacttcgacagccagaccaacgtgtcccagagcaaggactccgacgtgtacatcaccgataagtgcgtgctggacatgcggagcatggacttcaagagcaactccgccgtggcctggtccaacaagtccgatttcgcctgcgccaacgccttcaacaacagcattatccccgaggacacattcttcccaagccccgagagcagctgcggctttaccagcgagagctaccagcagggcgtgctgagcgccaccatcctgtacgagatcctgctgggcaaggccaccctgtacgccgtgctggtgtctgccctggtgctgatggctatggtcaagcggaaggacagccgggga

SEQ ID NO: 4932 - DNA, 2301 bp, synthetic construct
  source 1..2301: mol_type = other DNA
atggccttaccagtgaccgccttgctcctgccgctggccttgctgctccacgccgccaggccggaagttcagctgcttgagtctggcggaggactggttcaacctggcggaagcctgagactgtcttgtgccgccagcggcttcatcttcagcagctacgccatgagctgggtccgacaggctcctggaaagggccaagaatgggtttccggcgttagcggcacaggcgtgaacacctactacgccgatagcgtgaagggcagattcaccatcagccgggacaacagcaagaacaccctgtacctccagatgaacagcctgagagccgaggacaccgccgtgtactattgtgcctctggcaaaggctgggacagcggctcttggtacgaggactatagaggccagggcaccctggtcacagtttcttcaggtaccggcggaggcggatctggcggcggaggtagcggtggcggaggatctgaattcgacatccagatgacacagagccctagcagcctgtctgccagcgtgggagacagagtgaccatcacatgcaaggccagcgaccacatcaacaactggctggcctggtatcagcagaagcctggacaggcccctaagctgctgatctacggcgctaccacactggaaacaggcgtgcccagcagattttctggcagcggctctggcaccgactacaccctgacaatatccagcctccagcctgaggacttcgccacctactactgtcagcagagctggaacaccccttggacattcggccagggcaccaagctggaaatcaagagactcgagatccagaaccctgatcctgccgtgtaccagctgcgggatagcaagagcagcgacaagagcgtgtgtctgttcaccgacttcgacagccagaccaacgtgtcccagagcaaggactccgacgtgtacatcaccgataagtgcgtgctggacatgcggagcatggacttcaagagcaactccgccgtggcctggtccaacaagtccgatttcgcctgcgccaacgccttcaacaacagcattatccccgaggacacattcttcccaagccccgagagcagctgcggctttaccagcgagagctaccagcagggcgtgctgagcgccaccatcctgtacgagatcctgctgggcaaggccaccctgtacgccgtgctggtgtctgccctggtgctgatggctatggtcaagcggaaggacagccggggacgcgccaagagaagcggatctggcgtgaagcagaccctgaatttcgacctgctgaagctggctggcgacgtggaatccaacccaggccctactagtatggactggatttggcgcatccttttccttgtcggcgctgctaccggcgcgcattccttcgaacaagttcagcttcaacagcctggcgctgagctggtcaaacctggcgcttctgtgaagatgagctgcaaagccagcggctacgccttcagcagctactggatcaactggatgaagcagaaacccggccagggactcgaatggatcggccaaatctatcccggcgacggcgacaccaactacaacggcaagttcaagggcagagccacactgaccgccgatacctctagcagcacagcctacatgcagctgagcagcctgaccagcgaagatagcgccgtgtacttctgtgcccggtccatcacaacagtcgtgggctgcgctatggactattggggccagggaacaagcgtgaccgtgtctagtacgcgtgaggacctgaagaacgtgttcccacctgaggtggccgtgttcgagcctagcgaggccgagatcagccacacccagaaagccaccctcgtgtgcctggctaccggcttctaccccgaccatgtggaactgtcttggtgggtcaacggcaaagaggtgcacagcggcgtgtgtaccgacccccagccactgaaagaacagcccgccctgaacgacagccggtactgcctgagcagcagactgagagtgtccgccaccttctggcagaacccccggaaccacttcagatgccaggtgcagttctacggcctgagcgagaacgacgagtggacccaggacagagccaagcccgtgacccagatcgtgtctgccgaagcctggggcagagccgattgcgacgtgaagctggtggaaaagagcttcgagacagacaccaacctgaacttccagaacctgagcgtgatcggcttcagaatcctgctgctgaaagtggccggctttaacctgctgatgaccctgcggctgtggtccagc

SEQ ID NO: 4933 - DNA, 2193 bp, synthetic construct
  source 1..2193: mol_type = other DNA
atggccttaccagtgaccgccttgctcctgccgctggccttgctgctccacgccgccaggccgatgctgcccgctcctaagaatctggtggtgtccagaatcaccgaggacagcgccagactgtcttggacagctcctgatgccgccttcgacagcttccccatccggtacatcgagacactgatctggggcgaagccatctggctggatgtgcctggaagcgagagaagctacgacctgaccggactgaagcctggcacagagtatgccgtggtcatcaccggcgtgaaaggcggcagattctctagccctctggtggcctctttcaccaccggtaccggcggaggcggatctggcggcggaggtagcggtggcggaggatctgaattcgacatccagatgacacagagccctagcagcctgtctgccagcgtgggagacagagtgaccatcacatgcaaggccagcgaccacatcaacaactggctggcctggtatcagcagaagcctggacaggcccctaagctgctgatctacggcgctaccacactggaaacaggcgtgcccagcagattttctggcagcggctctggcaccgactacaccctgacaatatccagcctccagcctgaggacttcgccacctactactgtcagcagagctggaacaccccttggacattcggccagggcaccaagctggaaatcaagagactcgaggacctgaagaacgtgttcccacctgaggtggccgtgttcgagcctagcgaggccgagatcagccacacccagaaagccaccctcgtgtgcctggctaccggcttctaccccgaccatgtggaactgtcttggtgggtcaacggcaaagaggtgcacagcggcgtgtgtaccgacccccagccactgaaagaacagcccgccctgaacgacagccggtactgcctgagcagcagactgagagtgtccgccaccttctggcagaacccccggaaccacttcagatgccaggtgcagttctacggcctgagcgagaacgacgagtggacccaggacagagccaagcccgtgacccagatcgtgtctgccgaagcctggggcagagccgattgcgacgtgaagctggtggaaaagagcttcgagacagacaccaacctgaacttccagaacctgagcgtgatcggcttcagaatcctgctgctgaaagtggccggctttaacctgctgatgaccctgcggctgtggtccagcagggccaagcgatctggatctggagcaacaaacttctcactactcaaacaagcaggtgacgtggaggagaatcccgggcctactagtatggactggatttggcgcatccttttccttgtcggcgctgctaccggcgcgcattccttcgaacaagttcagcttcaacagcctggcgctgagctggtcaaacctggcgcttctgtgaagatgagctgcaaagccagcggctacgccttcagcagctactggatcaactggatgaagcagaaacccggccagggactcgaatggatcggccaaatctatcccggcgacggcgacaccaactacaacggcaagttcaagggcagagccacactgaccgccgatacctctagcagcacagcctacatgcagctgagcagcctgaccagcgaagatagcgccgtgtacttctgtgcccggtccatcacaacagtcgtgggctgcgctatggactattggggccagggaacaagcgtgaccgtgtctagtacgcgtatccagaaccctgatcctgccgtgtaccagctgcgggatagcaagagcagcgacaagagcgtgtgtctgttcaccgacttcgacagccagaccaacgtgtcccagagcaaggactccgacgtgtacatcaccgataagtgcgtgctggacatgcggagcatggacttcaagagcaactccgccgtggcctggtccaacaagtccgatttcgcctgcgccaacgccttcaacaacagcattatccccgaggacacattcttcccaagccccgagagcagctgcggctttaccagcgagagctaccagcagggcgtgctgagcgccaccatcctgtacgagatcctgctgggcaaggccaccctgtacgccgtgctggtgtctgccctggtgctgatggctatggtcaagcggaaggacagccgggga

SEQ ID NO: 4934 - DNA, 2205 bp, synthetic construct
  source 1..2205: mol_type = other DNA
atggccttaccagtgaccgccttgctcctgccgctggccttgctgctccacgccgccaggccgatgctgcccgctcctaagaatctggtggtgtccagaatcaccgaggacagcgccagactgtcttggacagctcctgatgccgccttcgacagcttccccatccggtacatcgagacactgatctggggcgaagccatctggctggatgtgcctggaagcgagagaagctacgacctgaccggactgaagcctggcacagagtatgccgtggtcatcaccggcgtgaaaggcggcagattctctagccctctggtggcctctttcaccaccggtaccggcggaggcggatctggcggcggaggtagcggtggcggaggatctgaattcgacatccagatgacacagagccctagcagcctgtctgccagcgtgggagacagagtgaccatcacatgcaaggccagcgaccacatcaacaactggctggcctggtatcagcagaagcctggacaggcccctaagctgctgatctacggcgctaccacactggaaacaggcgtgcccagcagattttctggcagcggctctggcaccgactacaccctgacaatatccagcctccagcctgaggacttcgccacctactactgtcagcagagctggaacaccccttggacattcggccagggcaccaagctggaaatcaagagactcgagatccagaaccctgatcctgccgtgtaccagctgcgggatagcaagagcagcgacaagagcgtgtgtctgttcaccgacttcgacagccagaccaacgtgtcccagagcaaggactccgacgtgtacatcaccgataagtgcgtgctggacatgcggagcatggacttcaagagcaactccgccgtggcctggtccaacaagtccgatttcgcctgcgccaacgccttcaacaacagcattatccccgaggacacattcttcccaagccccgagagcagctgcggctttaccagcgagagctaccagcagggcgtgctgagcgccaccatcctgtacgagatcctgctgggcaaggccaccctgtacgccgtgctggtgtctgccctggtgctgatggctatggtcaagcggaaggacagccggggacgcgccaagagaagcggatctggcgtgaagcagaccctgaatttcgacctgctgaagctggctggcgacgtggaatccaacccaggccctactagtatggactggatttggcgcatccttttccttgtcggcgctgctaccggcgcgcattccttcgaacaagttcagcttcaacagcctggcgctgagctggtcaaacctggcgcttctgtgaagatgagctgcaaagccagcggctacgccttcagcagctactggatcaactggatgaagcagaaacccggccagggactcgaatggatcggccaaatctatcccggcgacggcgacaccaactacaacggcaagttcaagggcagagccacactgaccgccgatacctctagcagcacagcctacatgcagctgagcagcctgaccagcgaagatagcgccgtgtacttctgtgcccggtccatcacaacagtcgtgggctgcgctatggactattggggccagggaacaagcgtgaccgtgtctagtacgcgtgaggacctgaagaacgtgttcccacctgaggtggccgtgttcgagcctagcgaggccgagatcagccacacccagaaagccaccctcgtgtgcctggctaccggcttctaccccgaccatgtggaactgtcttggtgggtcaacggcaaagaggtgcacagcggcgtgtgtaccgacccccagccactgaaagaacagcccgccctgaacgacagccggtactgcctgagcagcagactgagagtgtccgccaccttctggcagaacccccggaaccacttcagatgccaggtgcagttctacggcctgagcgagaacgacgagtggacccaggacagagccaagcccgtgacccagatcgtgtctgccgaagcctggggcagagccgattgcgacgtgaagctggtggaaaagagcttcgagacagacaccaacctgaacttccagaacctgagcgtgatcggcttcagaatcctgctgctgaaagtggccggctttaacctgctgatgaccctgcggctgtggtccagc

SEQ ID NO: 4935 - DNA, 2280 bp, synthetic construct
  source 1..2280: mol_type = other DNA
atggccttaccagtgaccgccttgctcctgccgctggccttgctgctccacgccgccaggccggaggtgcagctggttgaatctggcggaggactggttcagcctggcggatctctgagactgtcttgtgccgccagcggcttcaacatcaaggatacctgtatcggctgggttcgcagagcccctggcaaagaggaagaactggtcgccaaaatctgcaagtacagcggccacaccagatacgccgacagcgtgaagggcagattcaccatcagcgccgacaccagcaagaacaccgcctacctccagatgaacagcctgagagccgaggacaccgccgtgtactattgtgccgctgtgtccgtcagagatgggcactacaattactggggccagggcaccaccgtgaccgtttcttcaggtaccggcggaggcggatctggcggcggaggtagcggtggcggaggatctgaattcgacatccagatgacacagagccctagcagcctgtctgccagcgtgggagacagagtgaccatcacatgcaaggccagcgaccacatcaacaactggctggcctggtatcagcagaagcctggacaggcccctaagctgctgatctacggcgctaccacactggaaacaggcgtgcccagcagattttctggcagcggctctggcaccgactacaccctgacaatatccagcctccagcctgaggacttcgccacctactactgtcagcagagctggaacaccccttggacattcggccagggcaccaagctggaaatcaagagactcgaggacctgaagaacgtgttcccacctgaggtggccgtgttcgagcctagcgaggccgagatcagccacacccagaaagccaccctcgtgtgcctggctaccggcttctaccccgaccatgtggaactgtcttggtgggtcaacggcaaagaggtgcacagcggcgtgtgtaccgacccccagccactgaaagaacagcccgccctgaacgacagccggtactgcctgagcagcagactgagagtgtccgccaccttctggcagaacccccggaaccacttcagatgccaggtgcagttctacggcctgagcgagaacgacgagtggacccaggacagagccaagcccgtgacccagatcgtgtctgccgaagcctggggcagagccgattgcgacgtgaagctggtggaaaagagcttcgagacagacaccaacctgaacttccagaacctgagcgtgatcggcttcagaatcctgctgctgaaagtggccggctttaacctgctgatgaccctgcggctgtggtccagcagggccaagcgatctggatctggagcaacaaacttctcactactcaaacaagcaggtgacgtggaggagaatcccgggcctactagtatggactggatttggcgcatccttttccttgtcggcgctgctaccggcgcgcattccttcgaacaagttcagcttcaacagcctggcgctgagctggtcaaacctggcgcttctgtgaagatgagctgcaaagccagcggctacgccttcagcagctactggatcaactggatgaagcagaaacccggccagggactcgaatggatcggccaaatctatcccggcgacggcgacaccaactacaacggcaagttcaagggcagagccacactgaccgccgatacctctagcagcacagcctacatgcagctgagcagcctgaccagcgaagatagcgccgtgtacttctgtgcccggtccatcacaacagtcgtgggctgcgctatggactattggggccagggaacaagcgtgaccgtgtctagtacgcgtatccagaaccctgatcctgccgtgtaccagctgcgggatagcaagagcagcgacaagagcgtgtgtctgttcaccgacttcgacagccagaccaacgtgtcccagagcaaggactccgacgtgtacatcaccgataagtgcgtgctggacatgcggagcatggacttcaagagcaactccgccgtggcctggtccaacaagtccgatttcgcctgcgccaacgccttcaacaacagcattatccccgaggacacattcttcccaagccccgagagcagctgcggctttaccagcgagagctaccagcagggcgtgctgagcgccaccatcctgtacgagatcctgctgggcaaggccaccctgtacgccgtgctggtgtctgccctggtgctgatggctatggtcaagcggaaggacagccgggga

SEQ ID NO: 4936 - DNA, 2292 bp, synthetic construct
  source 1..2292: mol_type = other DNA
atggccttaccagtgaccgccttgctcctgccgctggccttgctgctccacgccgccaggccggaggtgcagctggttgaatctggcggaggactggttcagcctggcggatctctgagactgtcttgtgccgccagcggcttcaacatcaaggatacctgtatcggctgggttcgcagagcccctggcaaagaggaagaactggtcgccaaaatctgcaagtacagcggccacaccagatacgccgacagcgtgaagggcagattcaccatcagcgccgacaccagcaagaacaccgcctacctccagatgaacagcctgagagccgaggacaccgccgtgtactattgtgccgctgtgtccgtcagagatgggcactacaattactggggccagggcaccaccgtgaccgtttcttcaggtaccggcggaggcggatctggcggcggaggtagcggtggcggaggatctgaattcgacatccagatgacacagagccctagcagcctgtctgccagcgtgggagacagagtgaccatcacatgcaaggccagcgaccacatcaacaactggctggcctggtatcagcagaagcctggacaggcccctaagctgctgatctacggcgctaccacactggaaacaggcgtgcccagcagattttctggcagcggctctggcaccgactacaccctgacaatatccagcctccagcctgaggacttcgccacctactactgtcagcagagctggaacaccccttggacattcggccagggcaccaagctggaaatcaagagactcgagatccagaaccctgatcctgccgtgtaccagctgcgggatagcaagagcagcgacaagagcgtgtgtctgttcaccgacttcgacagccagaccaacgtgtcccagagcaaggactccgacgtgtacatcaccgataagtgcgtgctggacatgcggagcatggacttcaagagcaactccgccgtggcctggtccaacaagtccgatttcgcctgcgccaacgccttcaacaacagcattatccccgaggacacattcttcccaagccccgagagcagctgcggctttaccagcgagagctaccagcagggcgtgctgagcgccaccatcctgtacgagatcctgctgggcaaggccaccctgtacgccgtgctggtgtctgccctggtgctgatggctatggtcaagcggaaggacagccggggacgcgccaagagaagcggatctggcgtgaagcagaccctgaatttcgacctgctgaagctggctggcgacgtggaatccaacccaggccctactagtatggactggatttggcgcatccttttccttgtcggcgctgctaccggcgcgcattccttcgaacaagttcagcttcaacagcctggcgctgagctggtcaaacctggcgcttctgtgaagatgagctgcaaagccagcggctacgccttcagcagctactggatcaactggatgaagcagaaacccggccagggactcgaatggatcggccaaatctatcccggcgacggcgacaccaactacaacggcaagttcaagggcagagccacactgaccgccgatacctctagcagcacagcctacatgcagctgagcagcctgaccagcgaagatagcgccgtgtacttctgtgcccggtccatcacaacagtcgtgggctgcgctatggactattggggccagggaacaagcgtgaccgtgtctagtacgcgtgaggacctgaagaacgtgttcccacctgaggtggccgtgttcgagcctagcgaggccgagatcagccacacccagaaagccaccctcgtgtgcctggctaccggcttctaccccgaccatgtggaactgtcttggtgggtcaacggcaaagaggtgcacagcggcgtgtgtaccgacccccagccactgaaagaacagcccgccctgaacgacagccggtactgcctgagcagcagactgagagtgtccgccaccttctggcagaacccccggaaccacttcagatgccaggtgcagttctacggcctgagcgagaacgacgagtggacccaggacagagccaagcccgtgacccagatcgtgtctgccgaagcctggggcagagccgattgcgacgtgaagctggtggaaaagagcttcgagacagacaccaacctgaacttccagaacctgagcgtgatcggcttcagaatcctgctgctgaaagtggccggctttaacctgctgatgaccctgcggctgtggtccagc

SEQ ID NO: 4937 - DNA, 1911 bp, synthetic construct
  source 1..1911: mol_type = other DNA
atggccttaccagtgaccgccttgctcctgccgctggccttgctgctccacgccgccaggccgcagctccagctgcaagagtctggacctggcctggtcaagcctagcgagacactgagcctgacctgtaccgtgtccggcgatagcatcagcagcggcgattactactggggctggatcagacagcctcctggcaaaggactggaatggatcggccacatctactacagcggcgtgacctactacaaccccagcctgaagtccagagtgaccatcagcgtggacaccagccggaaccagttctccctgaagctgtctagcgtgacagccgccgataccgccgtgtactactgcaccagagaggacagcagcaactggcggagtagaggccagggaacactggtcacagttagctctctcgaggacctgaagaacgtgttcccacctgaggtggccgtgttcgagcctagcgaggccgagatcagccacacccagaaagccaccctcgtgtgcctggctaccggcttctaccccgaccatgtggaactgtcttggtgggtcaacggcaaagaggtgcacagcggcgtgtgtaccgacccccagccactgaaagaacagcccgccctgaacgacagccggtactgcctgagcagcagactgagagtgtccgccaccttctggcagaacccccggaaccacttcagatgccaggtgcagttctacggcctgagcgagaacgacgagtggacccaggacagagccaagcccgtgacccagatcgtgtctgccgaagcctggggcagagccgattgcgacgtgaagctggtggaaaagagcttcgagacagacaccaacctgaacttccagaacctgagcgtgatcggcttcagaatcctgctgctgaaagtggccggctttaacctgctgatgaccctgcggctgtggtccagcagggccaagcgatctggatctggagcaacaaacttctcactactcaaacaagcaggtgacgtggaggagaatcccgggcctactagtatggactggatttggcgcatccttttccttgtcggcgctgctaccggcgcgcattccttcgaagttcagttggtagagtctggaggcggagtggtacaaccggggcggtctcttagacttagttgcgcagcaagcggtttctctttctctggctatgggatgcactgggtgagacaggcccctgggaaaggactggagtgggtggcctacatttcatacgacgggagtaataaatactatgcagactccgttaagggcaggttcacgatctctcgggacaattccaagaatacattgtatcttcagatgaatagtctccgagctgaagacacggcggtttactactgcgctaaagacccggcctggggacttcgacttggagagagttctagctacgattttgacatttggggacaagggacaatggtcactgtctcaagtacgcgtatccagaaccctgatcctgccgtgtaccagctgcgggatagcaagagcagcgacaagagcgtgtgtctgttcaccgacttcgacagccagaccaacgtgtcccagagcaaggactccgacgtgtacatcaccgataagtgcgtgctggacatgcggagcatggacttcaagagcaactccgccgtggcctggtccaacaagtccgatttcgcctgcgccaacgccttcaacaacagcattatccccgaggacacattcttcccaagccccgagagcagctgcggctttaccagcgagagctaccagcagggcgtgctgagcgccaccatcctgtacgagatcctgctgggcaaggccaccctgtacgccgtgctggtgtctgccctggtgctgatggctatggtcaagcggaaggacagccgggga

SEQ ID NO: 4938 - DNA, 1923 bp, synthetic construct
  source 1..1923: mol_type = other DNA
atggccttaccagtgaccgccttgctcctgccgctggccttgctgctccacgccgccaggccgcagctccagctgcaagagtctggacctggcctggtcaagcctagcgagacactgagcctgacctgtaccgtgtccggcgatagcatcagcagcggcgattactactggggctggatcagacagcctcctggcaaaggactggaatggatcggccacatctactacagcggcgtgacctactacaaccccagcctgaagtccagagtgaccatcagcgtggacaccagccggaaccagttctccctgaagctgtctagcgtgacagccgccgataccgccgtgtactactgcaccagagaggacagcagcaactggcggagtagaggccagggaacactggtcacagttagctctctcgagatccagaaccctgatcctgccgtgtaccagctgcgggatagcaagagcagcgacaagagcgtgtgtctgttcaccgacttcgacagccagaccaacgtgtcccagagcaaggactccgacgtgtacatcaccgataagtgcgtgctggacatgcggagcatggacttcaagagcaactccgccgtggcctggtccaacaagtccgatttcgcctgcgccaacgccttcaacaacagcattatccccgaggacacattcttcccaagccccgagagcagctgcggctttaccagcgagagctaccagcagggcgtgctgagcgccaccatcctgtacgagatcctgctgggcaaggccaccctgtacgccgtgctggtgtctgccctggtgctgatggctatggtcaagcggaaggacagccggggacgcgccaagagaagcggatctggcgtgaagcagaccctgaatttcgacctgctgaagctggctggcgacgtggaatccaacccaggccctactagtatggactggatttggcgcatccttttccttgtcggcgctgctaccggcgcgcattccttcgaagttcagttggtagagtctggaggcggagtggtacaaccggggcggtctcttagacttagttgcgcagcaagcggtttctctttctctggctatgggatgcactgggtgagacaggcccctgggaaaggactggagtgggtggcctacatttcatacgacgggagtaataaatactatgcagactccgttaagggcaggttcacgatctctcgggacaattccaagaatacattgtatcttcagatgaatagtctccgagctgaagacacggcggtttactactgcgctaaagacccggcctggggacttcgacttggagagagttctagctacgattttgacatttggggacaagggacaatggtcactgtctcaagtacgcgtgaggacctgaagaacgtgttcccacctgaggtggccgtgttcgagcctagcgaggccgagatcagccacacccagaaagccaccctcgtgtgcctggctaccggcttctaccccgaccatgtggaactgtcttggtgggtcaacggcaaagaggtgcacagcggcgtgtgtaccgacccccagccactgaaagaacagcccgccctgaacgacagccggtactgcctgagcagcagactgagagtgtccgccaccttctggcagaacccccggaaccacttcagatgccaggtgcagttctacggcctgagcgagaacgacgagtggacccaggacagagccaagcccgtgacccagatcgtgtctgccgaagcctggggcagagccgattgcgacgtgaagctggtggaaaagagcttcgagacagacaccaacctgaacttccagaacctgagcgtgatcggcttcagaatcctgctgctgaaagtggccggctttaacctgctgatgaccctgcggctgtggtccagc

SEQ ID NO: 4939 - DNA, 1878 bp, synthetic construct
  source 1..1878: mol_type = other DNA
atggccttaccagtgaccgccttgctcctgccgctggccttgctgctccacgccgccaggccgcagctccagctgcaagagtctggacctggcctggtcaagcctagcgagacactgagcctgacctgtaccgtgtccggcgatagcatcagcagcggcgattactactggggctggatcagacagcctcctggcaaaggactggaatggatcggccacatctactacagcggcgtgacctactacaaccccagcctgaagtccagagtgaccatcagcgtggacaccagccggaaccagttctccctgaagctgtctagcgtgacagccgccgataccgccgtgtactactgcaccagagaggacagcagcaactggcggagtagaggccagggaacactggtcacagttagctctctcgaggacctgaagaacgtgttcccacctgaggtggccgtgttcgagcctagcgaggccgagatcagccacacccagaaagccaccctcgtgtgcctggctaccggcttctaccccgaccatgtggaactgtcttggtgggtcaacggcaaagaggtgcacagcggcgtgtgtaccgacccccagccactgaaagaacagcccgccctgaacgacagccggtactgcctgagcagcagactgagagtgtccgccaccttctggcagaacccccggaaccacttcagatgccaggtgcagttctacggcctgagcgagaacgacgagtggacccaggacagagccaagcccgtgacccagatcgtgtctgccgaagcctggggcagagccgattgcgacgtgaagctggtggaaaagagcttcgagacagacaccaacctgaacttccagaacctgagcgtgatcggcttcagaatcctgctgctgaaagtggccggctttaacctgctgatgaccctgcggctgtggtccagcagggccaagcgatctggatctggagcaacaaacttctcactactcaaacaagcaggtgacgtggaggagaatcccgggcctactagtatggactggatttggcgcatccttttccttgtcggcgctgctaccggcgcgcattccttcgaagtgcagctggttgaatctggcggaggactggttcagcctggcggatctctgagactgtcttgtgccgccagcggcttcagcttcagcgacttttggatgagctgggtccgacaggcccctggcaaaggacttgaatgggtcgccacaatcagccaggccggcagcgagaaggactacgtggactctgtgaagggcagattcaccatcagccgggacaacgccaagaagtccctgtacctccagatgaacagcctgagagccgaggacaccgccgtgtactattgtgcctctggcgtgtacagcttcgactacagaggccagggcaccctggtcacagtctcttctacgcgtatccagaaccctgatcctgccgtgtaccagctgcgggatagcaagagcagcgacaagagcgtgtgtctgttcaccgacttcgacagccagaccaacgtgtcccagagcaaggactccgacgtgtacatcaccgataagtgcgtgctggacatgcggagcatggacttcaagagcaactccgccgtggcctggtccaacaagtccgatttcgcctgcgccaacgccttcaacaacagcattatccccgaggacacattcttcccaagccccgagagcagctgcggctttaccagcgagagctaccagcagggcgtgctgagcgccaccatcctgtacgagatcctgctgggcaaggccaccctgtacgccgtgctggtgtctgccctggtgctgatggctatggtcaagcggaaggacagccgggga

SEQ ID NO: 4940 - DNA, 1890 bp, synthetic construct
  source 1..1890: mol_type = other DNA
atggccttaccagtgaccgccttgctcctgccgctggccttgctgctccacgccgccaggccgcagctccagctgcaagagtctggacctggcctggtcaagcctagcgagacactgagcctgacctgtaccgtgtccggcgatagcatcagcagcggcgattactactggggctggatcagacagcctcctggcaaaggactggaatggatcggccacatctactacagcggcgtgacctactacaaccccagcctgaagtccagagtgaccatcagcgtggacaccagccggaaccagttctccctgaagctgtctagcgtgacagccgccgataccgccgtgtactactgcaccagagaggacagcagcaactggcggagtagaggccagggaacactggtcacagttagctctctcgagatccagaaccctgatcctgccgtgtaccagctgcgggatagcaagagcagcgacaagagcgtgtgtctgttcaccgacttcgacagccagaccaacgtgtcccagagcaaggactccgacgtgtacatcaccgataagtgcgtgctggacatgcggagcatggacttcaagagcaactccgccgtggcctggtccaacaagtccgatttcgcctgcgccaacgccttcaacaacagcattatccccgaggacacattcttcccaagccccgagagcagctgcggctttaccagcgagagctaccagcagggcgtgctgagcgccaccatcctgtacgagatcctgctgggcaaggccaccctgtacgccgtgctggtgtctgccctggtgctgatggctatggtcaagcggaaggacagccggggacgcgccaagagaagcggatctggcgtgaagcagaccctgaatttcgacctgctgaagctggctggcgacgtggaatccaacccaggccctactagtatggactggatttggcgcatccttttccttgtcggcgctgctaccggcgcgcattccttcgaagtgcagctggttgaatctggcggaggactggttcagcctggcggatctctgagactgtcttgtgccgccagcggcttcagcttcagcgacttttggatgagctgggtccgacaggcccctggcaaaggacttgaatgggtcgccacaatcagccaggccggcagcgagaaggactacgtggactctgtgaagggcagattcaccatcagccgggacaacgccaagaagtccctgtacctccagatgaacagcctgagagccgaggacaccgccgtgtactattgtgcctctggcgtgtacagcttcgactacagaggccagggcaccctggtcacagtctcttctacgcgtgaggacctgaagaacgtgttcccacctgaggtggccgtgttcgagcctagcgaggccgagatcagccacacccagaaagccaccctcgtgtgcctggctaccggcttctaccccgaccatgtggaactgtcttggtgggtcaacggcaaagaggtgcacagcggcgtgtgtaccgacccccagccactgaaagaacagcccgccctgaacgacagccggtactgcctgagcagcagactgagagtgtccgccaccttctggcagaacccccggaaccacttcagatgccaggtgcagttctacggcctgagcgagaacgacgagtggacccaggacagagccaagcccgtgacccagatcgtgtctgccgaagcctggggcagagccgattgcgacgtgaagctggtggaaaagagcttcgagacagacaccaacctgaacttccagaacctgagcgtgatcggcttcagaatcctgctgctgaaagtggccggctttaacctgctgatgaccctgcggctgtggtccagc

SEQ ID NO: 4941 - DNA, 1884 bp, synthetic construct
  source 1..1884: mol_type = other DNA
atggccttaccagtgaccgccttgctcctgccgctggccttgctgctccacgccgccaggccgcagctccagctgcaagagtctggacctggcctggtcaagcctagcgagacactgagcctgacctgtaccgtgtccggcgatagcatcagcagcggcgattactactggggctggatcagacagcctcctggcaaaggactggaatggatcggccacatctactacagcggcgtgacctactacaaccccagcctgaagtccagagtgaccatcagcgtggacaccagccggaaccagttctccctgaagctgtctagcgtgacagccgccgataccgccgtgtactactgcaccagagaggacagcagcaactggcggagtagaggccagggaacactggtcacagttagctctctcgaggacctgaagaacgtgttcccacctgaggtggccgtgttcgagcctagcgaggccgagatcagccacacccagaaagccaccctcgtgtgcctggctaccggcttctaccccgaccatgtggaactgtcttggtgggtcaacggcaaagaggtgcacagcggcgtgtgtaccgacccccagccactgaaagaacagcccgccctgaacgacagccggtactgcctgagcagcagactgagagtgtccgccaccttctggcagaacccccggaaccacttcagatgccaggtgcagttctacggcctgagcgagaacgacgagtggacccaggacagagccaagcccgtgacccagatcgtgtctgccgaagcctggggcagagccgattgcgacgtgaagctggtggaaaagagcttcgagacagacaccaacctgaacttccagaacctgagcgtgatcggcttcagaatcctgctgctgaaagtggccggctttaacctgctgatgaccctgcggctgtggtccagcagggccaagcgatctggatctggagcaacaaacttctcactactcaaacaagcaggtgacgtggaggagaatcccgggcctactagtatggactggatttggcgcatccttttccttgtcggcgctgctaccggcgcgcattccttccaggtgcagctggttgaatctggcggaggactggttcagcctggcggatctctgagactgtcttgtgccgccagcggcttcaccttcaccaatcacgccatgagctgggtccgacaggcccctggaaaaggactggaactggtgtctagcatcagcggcaacggcagaaccacctactacgccgatagcgtgaagggcagattcaccatcagccgggacatcagcaagaacaccctggacctccagatgaacagcctgagagccgaggataccgccgtgtactactgtgccaaggatggcggagagacactggtggatagcagaggccagggcacactggtcacagtgtcatctacgcgtatccagaaccctgatcctgccgtgtaccagctgcgggatagcaagagcagcgacaagagcgtgtgtctgttcaccgacttcgacagccagaccaacgtgtcccagagcaaggactccgacgtgtacatcaccgataagtgcgtgctggacatgcggagcatggacttcaagagcaactccgccgtggcctggtccaacaagtccgatttcgcctgcgccaacgccttcaacaacagcattatccccgaggacacattcttcccaagccccgagagcagctgcggctttaccagcgagagctaccagcagggcgtgctgagcgccaccatcctgtacgagatcctgctgggcaaggccaccctgtacgccgtgctggtgtctgccctggtgctgatggctatggtcaagcggaaggacagccgggga

SEQ ID NO: 4942 - DNA, 1896 bp, synthetic construct
  source 1..1896: mol_type = other DNA
atggccttaccagtgaccgccttgctcctgccgctggccttgctgctccacgccgccaggccgcagctccagctgcaagagtctggacctggcctggtcaagcctagcgagacactgagcctgacctgtaccgtgtccggcgatagcatcagcagcggcgattactactggggctggatcagacagcctcctggcaaaggactggaatggatcggccacatctactacagcggcgtgacctactacaaccccagcctgaagtccagagtgaccatcagcgtggacaccagccggaaccagttctccctgaagctgtctagcgtgacagccgccgataccgccgtgtactactgcaccagagaggacagcagcaactggcggagtagaggccagggaacactggtcacagttagctctctcgagatccagaaccctgatcctgccgtgtaccagctgcgggatagcaagagcagcgacaagagcgtgtgtctgttcaccgacttcgacagccagaccaacgtgtcccagagcaaggactccgacgtgtacatcaccgataagtgcgtgctggacatgcggagcatggacttcaagagcaactccgccgtggcctggtccaacaagtccgatttcgcctgcgccaacgccttcaacaacagcattatccccgaggacacattcttcccaagccccgagagcagctgcggctttaccagcgagagctaccagcagggcgtgctgagcgccaccatcctgtacgagatcctgctgggcaaggccaccctgtacgccgtgctggtgtctgccctggtgctgatggctatggtcaagcggaaggacagccggggacgcgccaagagaagcggatctggcgtgaagcagaccctgaatttcgacctgctgaagctggctggcgacgtggaatccaacccaggccctactagtatggactggatttggcgcatccttttccttgtcggcgctgctaccggcgcgcattccttccaggtgcagctggttgaatctggcggaggactggttcagcctggcggatctctgagactgtcttgtgccgccagcggcttcaccttcaccaatcacgccatgagctgggtccgacaggcccctggaaaaggactggaactggtgtctagcatcagcggcaacggcagaaccacctactacgccgatagcgtgaagggcagattcaccatcagccgggacatcagcaagaacaccctggacctccagatgaacagcctgagagccgaggataccgccgtgtactactgtgccaaggatggcggagagacactggtggatagcagaggccagggcacactggtcacagtgtcatctacgcgtgaggacctgaagaacgtgttcccacctgaggtggccgtgttcgagcctagcgaggccgagatcagccacacccagaaagccaccctcgtgtgcctggctaccggcttctaccccgaccatgtggaactgtcttggtgggtcaacggcaaagaggtgcacagcggcgtgtgtaccgacccccagccactgaaagaacagcccgccctgaacgacagccggtactgcctgagcagcagactgagagtgtccgccaccttctggcagaacccccggaaccacttcagatgccaggtgcagttctacggcctgagcgagaacgacgagtggacccaggacagagccaagcccgtgacccagatcgtgtctgccgaagcctggggcagagccgattgcgacgtgaagctggtggaaaagagcttcgagacagacaccaacctgaacttccagaacctgagcgtgatcggcttcagaatcctgctgctgaaagtggccggctttaacctgctgatgaccctgcggctgtggtccagc

SEQ ID NO: 4943 - DNA, 1881 bp, synthetic construct
  source 1..1881: mol_type = other DNA
atggccttaccagtgaccgccttgctcctgccgctggccttgctgctccacgccgccaggccggaagtgcagctgcttgaaagtggcggcggactgattcagcctggcggatctctgagactgagctgtgccgccagcggcttcaccttttctagccacgccatgacctgggtccgacaggcacctggaaaagggcttgaatgggtgtccgccatcagcggctctggcgattacacacactacgccgacagcgtgaagggcagattcaccatcagcagagacaacagcaagaacaccgtgtacctccagatgaacagcctgagagccgaggacagcgccgtgtattattgcgccaaggatgaggatggcggcagcctgcttggacacagaggacaaggcaccctggtcaccgtttcttccctcgaggacctgaagaacgtgttcccacctgaggtggccgtgttcgagcctagcgaggccgagatcagccacacccagaaagccaccctcgtgtgcctggctaccggcttctaccccgaccatgtggaactgtcttggtgggtcaacggcaaagaggtgcacagcggcgtgtgtaccgacccccagccactgaaagaacagcccgccctgaacgacagccggtactgcctgagcagcagactgagagtgtccgccaccttctggcagaacccccggaaccacttcagatgccaggtgcagttctacggcctgagcgagaacgacgagtggacccaggacagagccaagcccgtgacccagatcgtgtctgccgaagcctggggcagagccgattgcgacgtgaagctggtggaaaagagcttcgagacagacaccaacctgaacttccagaacctgagcgtgatcggcttcagaatcctgctgctgaaagtggccggctttaacctgctgatgaccctgcggctgtggtccagcagggccaagcgatctggatctggagcaacaaacttctcactactcaaacaagcaggtgacgtggaggagaatcccgggcctactagtatggactggatttggcgcatccttttccttgtcggcgctgctaccggcgcgcattccttcgaagtgcagctggttgaatctggcggaggactggttcagcctggcggatctctgagactgtcttgtgccgccagcggcttcagcttcagcgacttttggatgagctgggtccgacaggcccctggcaaaggacttgaatgggtcgccacaatcagccaggccggcagcgagaaggactacgtggactctgtgaagggcagattcaccatcagccgggacaacgccaagaagtccctgtacctccagatgaacagcctgagagccgaggacaccgccgtgtactattgtgcctctggcgtgtacagcttcgactacagaggccagggcaccctggtcacagtctcttctacgcgtatccagaaccctgatcctgccgtgtaccagctgcgggatagcaagagcagcgacaagagcgtgtgtctgttcaccgacttcgacagccagaccaacgtgtcccagagcaaggactccgacgtgtacatcaccgataagtgcgtgctggacatgcggagcatggacttcaagagcaactccgccgtggcctggtccaacaagtccgatttcgcctgcgccaacgccttcaacaacagcattatccccgaggacacattcttcccaagccccgagagcagctgcggctttaccagcgagagctaccagcagggcgtgctgagcgccaccatcctgtacgagatcctgctgggcaaggccaccctgtacgccgtgctggtgtctgccctggtgctgatggctatggtcaagcggaaggacagccgggga

SEQ ID NO: 4944 - DNA, 1893 bp, synthetic construct
  source 1..1893: mol_type = other DNA
atggccttaccagtgaccgccttgctcctgccgctggccttgctgctccacgccgccaggccggaagtgcagctgcttgaaagtggcggcggactgattcagcctggcggatctctgagactgagctgtgccgccagcggcttcaccttttctagccacgccatgacctgggtccgacaggcacctggaaaagggcttgaatgggtgtccgccatcagcggctctggcgattacacacactacgccgacagcgtgaagggcagattcaccatcagcagagacaacagcaagaacaccgtgtacctccagatgaacagcctgagagccgaggacagcgccgtgtattattgcgccaaggatgaggatggcggcagcctgcttggacacagaggacaaggcaccctggtcaccgtttcttccctcgagatccagaaccctgatcctgccgtgtaccagctgcgggatagcaagagcagcgacaagagcgtgtgtctgttcaccgacttcgacagccagaccaacgtgtcccagagcaaggactccgacgtgtacatcaccgataagtgcgtgctggacatgcggagcatggacttcaagagcaactccgccgtggcctggtccaacaagtccgatttcgcctgcgccaacgccttcaacaacagcattatccccgaggacacattcttcccaagccccgagagcagctgcggctttaccagcgagagctaccagcagggcgtgctgagcgccaccatcctgtacgagatcctgctgggcaaggccaccctgtacgccgtgctggtgtctgccctggtgctgatggctatggtcaagcggaaggacagccggggacgcgccaagagaagcggatctggcgtgaagcagaccctgaatttcgacctgctgaagctggctggcgacgtggaatccaacccaggccctactagtatggactggatttggcgcatccttttccttgtcggcgctgctaccggcgcgcattccttcgaagtgcagctggttgaatctggcggaggactggttcagcctggcggatctctgagactgtcttgtgccgccagcggcttcagcttcagcgacttttggatgagctgggtccgacaggcccctggcaaaggacttgaatgggtcgccacaatcagccaggccggcagcgagaaggactacgtggactctgtgaagggcagattcaccatcagccgggacaacgccaagaagtccctgtacctccagatgaacagcctgagagccgaggacaccgccgtgtactattgtgcctctggcgtgtacagcttcgactacagaggccagggcaccctggtcacagtctcttctacgcgtgaggacctgaagaacgtgttcccacctgaggtggccgtgttcgagcctagcgaggccgagatcagccacacccagaaagccaccctcgtgtgcctggctaccggcttctaccccgaccatgtggaactgtcttggtgggtcaacggcaaagaggtgcacagcggcgtgtgtaccgacccccagccactgaaagaacagcccgccctgaacgacagccggtactgcctgagcagcagactgagagtgtccgccaccttctggcagaacccccggaaccacttcagatgccaggtgcagttctacggcctgagcgagaacgacgagtggacccaggacagagccaagcccgtgacccagatcgtgtctgccgaagcctggggcagagccgattgcgacgtgaagctggtggaaaagagcttcgagacagacaccaacctgaacttccagaacctgagcgtgatcggcttcagaatcctgctgctgaaagtggccggctttaacctgctgatgaccctgcggctgtggtccagc

SEQ ID NO: 4945 - DNA, 1899 bp, synthetic construct
  source 1..1899: mol_type = other DNA
atggccttaccagtgaccgccttgctcctgccgctggccttgctgctccacgccgccaggccgcaggtgcagctggttgaatctggcggaggactggttcagcctggcggatctctgagactgtcttgtgccgccagcggcttcaccttcaccaatcacgccatgagctgggtccgacaggcccctggaaaaggactggaactggtgtctagcatcagcggcaacggcagaaccacctactacgccgatagcgtgaagggcagattcaccatcagccgggacatcagcaagaacaccctggacctccagatgaacagcctgagagccgaggataccgccgtgtactactgtgccaaggatggcggagagacactggtggatagcagaggccagggcacactggtcacagtgtcatctctcgaggacctgaagaacgtgttcccacctgaggtggccgtgttcgagcctagcgaggccgagatcagccacacccagaaagccaccctcgtgtgcctggctaccggcttctaccccgaccatgtggaactgtcttggtgggtcaacggcaaagaggtgcacagcggcgtgtgtaccgacccccagccactgaaagaacagcccgccctgaacgacagccggtactgcctgagcagcagactgagagtgtccgccaccttctggcagaacccccggaaccacttcagatgccaggtgcagttctacggcctgagcgagaacgacgagtggacccaggacagagccaagcccgtgacccagatcgtgtctgccgaagcctggggcagagccgattgcgacgtgaagctggtggaaaagagcttcgagacagacaccaacctgaacttccagaacctgagcgtgatcggcttcagaatcctgctgctgaaagtggccggctttaacctgctgatgaccctgcggctgtggtccagcagggccaagcgatctggatctggagcaacaaacttctcactactcaaacaagcaggtgacgtggaggagaatcccgggcctactagtatggactggatttggcgcatccttttccttgtcggcgctgctaccggcgcgcattccttcgaagaagttcagctgcttgagtctggcggaggactggttcaacctggcggaagcctgagactgtcttgtgccgccagcggcttcatcttcagcagctacgccatgagctgggtccgacaggctcctggaaagggccaagaatgggtttccggcgttagcggcacaggcgtgaacacctactacgccgatagcgtgaagggcagattcaccatcagccgggacaacagcaagaacaccctgtacctccagatgaacagcctgagagccgaggacaccgccgtgtactattgtgcctctggcaaaggctgggacagcggctcttggtacgaggactatagaggccagggcaccctggtcacagtttcttcaacgcgtatccagaaccctgatcctgccgtgtaccagctgcgggatagcaagagcagcgacaagagcgtgtgtctgttcaccgacttcgacagccagaccaacgtgtcccagagcaaggactccgacgtgtacatcaccgataagtgcgtgctggacatgcggagcatggacttcaagagcaactccgccgtggcctggtccaacaagtccgatttcgcctgcgccaacgccttcaacaacagcattatccccgaggacacattcttcccaagccccgagagcagctgcggctttaccagcgagagctaccagcagggcgtgctgagcgccaccatcctgtacgagatcctgctgggcaaggccaccctgtacgccgtgctggtgtctgccctggtgctgatggctatggtcaagcggaaggacagccgggga

SEQ ID NO: 4946 - DNA, 1911 bp, synthetic construct
  source 1..1911: mol_type = other DNA
atggccttaccagtgaccgccttgctcctgccgctggccttgctgctccacgccgccaggccgcaggtgcagctggttgaatctggcggaggactggttcagcctggcggatctctgagactgtcttgtgccgccagcggcttcaccttcaccaatcacgccatgagctgggtccgacaggcccctggaaaaggactggaactggtgtctagcatcagcggcaacggcagaaccacctactacgccgatagcgtgaagggcagattcaccatcagccgggacatcagcaagaacaccctggacctccagatgaacagcctgagagccgaggataccgccgtgtactactgtgccaaggatggcggagagacactggtggatagcagaggccagggcacactggtcacagtgtcatctctcgagatccagaaccctgatcctgccgtgtaccagctgcgggatagcaagagcagcgacaagagcgtgtgtctgttcaccgacttcgacagccagaccaacgtgtcccagagcaaggactccgacgtgtacatcaccgataagtgcgtgctggacatgcggagcatggacttcaagagcaactccgccgtggcctggtccaacaagtccgatttcgcctgcgccaacgccttcaacaacagcattatccccgaggacacattcttcccaagccccgagagcagctgcggctttaccagcgagagctaccagcagggcgtgctgagcgccaccatcctgtacgagatcctgctgggcaaggccaccctgtacgccgtgctggtgtctgccctggtgctgatggctatggtcaagcggaaggacagccggggacgcgccaagagaagcggatctggcgtgaagcagaccctgaatttcgacctgctgaagctggctggcgacgtggaatccaacccaggccctactagtatggactggatttggcgcatccttttccttgtcggcgctgctaccggcgcgcattccttcgaagaagttcagctgcttgagtctggcggaggactggttcaacctggcggaagcctgagactgtcttgtgccgccagcggcttcatcttcagcagctacgccatgagctgggtccgacaggctcctggaaagggccaagaatgggtttccggcgttagcggcacaggcgtgaacacctactacgccgatagcgtgaagggcagattcaccatcagccgggacaacagcaagaacaccctgtacctccagatgaacagcctgagagccgaggacaccgccgtgtactattgtgcctctggcaaaggctgggacagcggctcttggtacgaggactatagaggccagggcaccctggtcacagtttcttcaacgcgtgaggacctgaagaacgtgttcccacctgaggtggccgtgttcgagcctagcgaggccgagatcagccacacccagaaagccaccctcgtgtgcctggctaccggcttctaccccgaccatgtggaactgtcttggtgggtcaacggcaaagaggtgcacagcggcgtgtgtaccgacccccagccactgaaagaacagcccgccctgaacgacagccggtactgcctgagcagcagactgagagtgtccgccaccttctggcagaacccccggaaccacttcagatgccaggtgcagttctacggcctgagcgagaacgacgagtggacccaggacagagccaagcccgtgacccagatcgtgtctgccgaagcctggggcagagccgattgcgacgtgaagctggtggaaaagagcttcgagacagacaccaacctgaacttccagaacctgagcgtgatcggcttcagaatcctgctgctgaaagtggccggctttaacctgctgatgaccctgcggctgtggtccagc

SEQ ID NO: 4947 - DNA, 1887 bp, synthetic construct
  source 1..1887: mol_type = other DNA
atggccttaccagtgaccgccttgctcctgccgctggccttgctgctccacgccgccaggccggaagtgcagctggttgaatctggcggaggactggttcaggctggcggatctctgagactgtcttgtgccgccagcggcagaacctttagcatgggctggtttagacaggcccctggcaaagagagagagttcgtcgccgccatcacatactctggcggcagcccttactacgccgactctgtgaagggcagattcaccatcagccgggacaacgccaagaacaccgtgtacctccagatgaacagcctgaagcctgaggacaccgccgtgtactactgcgccgccaatccaacatacggcagcgactggaacgccgagaattggggccagggaacccaagtgacagtgtctagcctcgaggacctgaagaacgtgttcccacctgaggtggccgtgttcgagcctagcgaggccgagatcagccacacccagaaagccaccctcgtgtgcctggctaccggcttctaccccgaccatgtggaactgtcttggtgggtcaacggcaaagaggtgcacagcggcgtgtgtaccgacccccagccactgaaagaacagcccgccctgaacgacagccggtactgcctgagcagcagactgagagtgtccgccaccttctggcagaacccccggaaccacttcagatgccaggtgcagttctacggcctgagcgagaacgacgagtggacccaggacagagccaagcccgtgacccagatcgtgtctgccgaagcctggggcagagccgattgcgacgtgaagctggtggaaaagagcttcgagacagacaccaacctgaacttccagaacctgagcgtgatcggcttcagaatcctgctgctgaaagtggccggctttaacctgctgatgaccctgcggctgtggtccagcagggccaagcgatctggatctggagcaacaaacttctcactactcaaacaagcaggtgacgtggaggagaatcccgggcctactagtatggactggatttggcgcatccttttccttgtcggcgctgctaccggcgcgcattccttcgaacaactgcaactgcaagagtctggccctggcctggtcaagccttctgaaaccctgagcctgacctgtaccgtgtccggcggctctatcagcagcggcgattactactggggctggatcagacagcctccaggcaagggactcgaatggatcggcagcatcagctacagcggctccacctactacaacccaagcctgaagtccagagtgaccatcagcgtggacaccagcagaaaccagttctccctgaagctgagcagcgtgacagccgccgatacagccgtgtattattgcaccagagaggacagcagcaactggcggagtagaggacagggcacactggtcacagtgtcctctacgcgtatccagaaccctgatcctgccgtgtaccagctgcgggatagcaagagcagcgacaagagcgtgtgtctgttcaccgacttcgacagccagaccaacgtgtcccagagcaaggactccgacgtgtacatcaccgataagtgcgtgctggacatgcggagcatggacttcaagagcaactccgccgtggcctggtccaacaagtccgatttcgcctgcgccaacgccttcaacaacagcattatccccgaggacacattcttcccaagccccgagagcagctgcggctttaccagcgagagctaccagcagggcgtgctgagcgccaccatcctgtacgagatcctgctgggcaaggccaccctgtacgccgtgctggtgtctgccctggtgctgatggctatggtcaagcggaaggacagccgggga

SEQ ID NO: 4948 - DNA, 1899 bp, synthetic construct
  source 1..1899: mol_type = other DNA
atggccttaccagtgaccgccttgctcctgccgctggccttgctgctccacgccgccaggccggaagtgcagctggttgaatctggcggaggactggttcaggctggcggatctctgagactgtcttgtgccgccagcggcagaacctttagcatgggctggtttagacaggcccctggcaaagagagagagttcgtcgccgccatcacatactctggcggcagcccttactacgccgactctgtgaagggcagattcaccatcagccgggacaacgccaagaacaccgtgtacctccagatgaacagcctgaagcctgaggacaccgccgtgtactactgcgccgccaatccaacatacggcagcgactggaacgccgagaattggggccagggaacccaagtgacagtgtctagcctcgagatccagaaccctgatcctgccgtgtaccagctgcgggatagcaagagcagcgacaagagcgtgtgtctgttcaccgacttcgacagccagaccaacgtgtcccagagcaaggactccgacgtgtacatcaccgataagtgcgtgctggacatgcggagcatggacttcaagagcaactccgccgtggcctggtccaacaagtccgatttcgcctgcgccaacgccttcaacaacagcattatccccgaggacacattcttcccaagccccgagagcagctgcggctttaccagcgagagctaccagcagggcgtgctgagcgccaccatcctgtacgagatcctgctgggcaaggccaccctgtacgccgtgctggtgtctgccctggtgctgatggctatggtcaagcggaaggacagccggggacgcgccaagagaagcggatctggcgtgaagcagaccctgaatttcgacctgctgaagctggctggcgacgtggaatccaacccaggccctactagtatggactggatttggcgcatccttttccttgtcggcgctgctaccggcgcgcattccttcgaacaactgcaactgcaagagtctggccctggcctggtcaagccttctgaaaccctgagcctgacctgtaccgtgtccggcggctctatcagcagcggcgattactactggggctggatcagacagcctccaggcaagggactcgaatggatcggcagcatcagctacagcggctccacctactacaacccaagcctgaagtccagagtgaccatcagcgtggacaccagcagaaaccagttctccctgaagctgagcagcgtgacagccgccgatacagccgtgtattattgcaccagagaggacagcagcaactggcggagtagaggacagggcacactggtcacagtgtcctctacgcgtgaggacctgaagaacgtgttcccacctgaggtggccgtgttcgagcctagcgaggccgagatcagccacacccagaaagccaccctcgtgtgcctggctaccggcttctaccccgaccatgtggaactgtcttggtgggtcaacggcaaagaggtgcacagcggcgtgtgtaccgacccccagccactgaaagaacagcccgccctgaacgacagccggtactgcctgagcagcagactgagagtgtccgccaccttctggcagaacccccggaaccacttcagatgccaggtgcagttctacggcctgagcgagaacgacgagtggacccaggacagagccaagcccgtgacccagatcgtgtctgccgaagcctggggcagagccgattgcgacgtgaagctggtggaaaagagcttcgagacagacaccaacctgaacttccagaacctgagcgtgatcggcttcagaatcctgctgctgaaagtggccggctttaacctgctgatgaccctgcggctgtggtccagc

SEQ ID NO: 4949 - DNA, 3396 bp, synthetic construct
  source 1..3396: mol_type = other DNA
atggccttaccagtgaccgccttgctcctgccgctggccttgctgctccacgccgccaggccggaagtgcagctggttgaatctggcggaggactggttcaggctggcggatctctgagactgtcttgtgccgccagcggcagaacctttagcatgggctggtttagacaggcccctggcaaagagagagagttcgtcgccgccatcacatactctggcggcagcccttactacgccgactctgtgaagggcagattcaccatcagccgggacaacgccaagaacaccgtgtacctccagatgaacagcctgaagcctgaggacaccgccgtgtactactgcgccgccaatccaacatacggcagcgactggaacgccgagaattggggccagggaacccaagtgacagtgtctagcggtaccggcggaggcggatctggcggcggaggtagcggtggcggaggatctgaattcgacatccagatgacacagagccctagcagcctgtctgccagcgtgggagacagagtgaccatcacatgcaaggccagcgaccacatcaacaactggctggcctggtatcagcagaagcctggacaggcccctaagctgctgatctacggcgctaccacactggaaacaggcgtgcccagcagattttctggcagcggctctggcaccgactacaccctgacaatatccagcctccagcctgaggacttcgccacctactactgtcagcagagctggaacaccccttggacattcggccagggcaccaagctggaaatcaagagactcgaggacctgaagaacgtgttcccacctgaggtggccgtgttcgagcctagcgaggccgagatcagccacacccagaaagccaccctcgtgtgcctggctaccggcttctaccccgaccatgtggaactgtcttggtgggtcaacggcaaagaggtgcacagcggcgtgtgtaccgacccccagccactgaaagaacagcccgccctgaacgacagccggtactgcctgagcagcagactgagagtgtccgccaccttctggcagaacccccggaaccacttcagatgccaggtgcagttctacggcctgagcgagaacgacgagtggacccaggacagagccaagcccgtgacccagatcgtgtctgccgaagcctggggcagagccgattgcgacgtgaagctggtggaaaagagcttcgagacagacaccaacctgaacttccagaacctgagcgtgatcggcttcagaatcctgctgctgaaagtggccggctttaacctgctgatgaccctgcggctgtggtccagcagggccaagcgatctggatctggagcaacaaacttctcactactcaaacaagcaggtgacgtggaggagaatcccgggcctactagtgccaccatggactggatttggcgcatccttttccttgtcggcgctgctaccggcgcccattccgggcccgaagtgcaactggttgaatccggtggcggcctggtgcaagcaggcggatctctcagacttagctgtgccgcctccggcagaaccttcacaatgggatggtttaggcaggctccagggaaagagagagagttcgtcgccgccatctctctgtctcccacactggcctactacgccgactctgtgaaaggccggttcaccatctccagagataatgccaagaacaccgtggtgctgcaaatgaactctctgaaacccgaggatacagccctgtactattgtgccgctgaccggaagtccgtgatgagcatcagacccgattactggggacagggcacacaagtcacagtgtcctctggatccggcggcggaggatctggcggaggcggatctgggggcggaggctctttcgaacaagttcagcttcaacagcctggcgctgagctggtcaaacctggcgcttctgtgaagatgagctgcaaagccagcggctacgccttcagcagctactggatcaactggatgaagcagaaacccggccagggactcgaatggatcggccaaatctatcccggcgacggcgacaccaactacaacggcaagttcaagggcagagccacactgaccgccgatacctctagcagcacagcctacatgcagctgagcagcctgaccagcgaagatagcgccgtgtacttctgtgcccggtccatcacaacagtcgtgggctgcgctatggactattggggccagggaacaagcgtgaccgtgtctagtacgcgtatccagaaccctgatcctgccgtgtaccagctgcgggatagcaagagcagcgacaagagcgtgtgtctgttcaccgacttcgacagccagaccaacgtgtcccagagcaaggactccgacgtgtacatcaccgataagtgcgtgctggacatgcggagcatggacttcaagagcaactccgccgtggcctggtccaacaagtccgatttcgcctgcgccaacgccttcaacaacagcattatccccgaggacacattcttcccaagccccgagagcagctgcggctttaccagcgagagctaccagcagggcgtgctgagcgccaccatcctgtacgagatcctgctgggcaaggccaccctgtacgccgtgctggtgtctgccctggtgctgatggctatggtcaagcggaaggacagccggggacgcgccaagagaagcggatctggcgtgaagcagaccctgaatttcgacctgctgaagctggctggcgacgtggaatccaacccaggcccttctagaggccatatgaccgagtacaagcccacggtgcgcctcgccacccgcgacgacgtccccagggccgtacgcaccctcgccgccgcgttcgccgactaccccgccacgcgccacaccgtcgatccggaccgccacatcgagcgggtcaccgagctgcaagaactcttcctcacgcgcgtcgggctcgacatcggcaaggtgtgggtcgcggacgacggcgccgcggtggcggtctggaccacgccggagagcgtcgaagcgggggcggtgttcgccgagatcggcccgcgcatggccgagttgagcggttcccggctggccgcgcagcaacagatggaaggcctcctggcgccgcaccggcccaaggagcccgcgtggttcctggccaccgtcggcgtctcgcccgaccaccagggcaagggtctgggcagcgccgtcgtgctccccggagtggaggcggccgagcgcgccggggtgcccgccttcctggagacctccgcgccccgcaacctccccttctacgagcggctcggcttcaccgtcaccgccgacgtcgaggtgcccgaaggaccgcgcacctggtgcatgacccgcaagcccggtgcctga

SEQ ID NO: 4950 - DNA, 2310 bp, synthetic construct
  source 1..2310: mol_type = other DNA
atggccttaccagtgaccgccttgctcctgccgctggccttgctgctccacgccgccaggccggaagtgcagctggttgaatctggcggaggactggttcagcctggcggatctctgagactgtcttgtgccgcctctggcttcgccagcgactactatatcatcggctggttcagacaggcccctggcaaagagagagagggcgtcagctgtatcagcagcagatacgccaacaccaactacgccgacagcgtgaagggcagattcaccatcagccgggacaacgccaagaacaccgtgtacctccagatgaacagcctgaagcctgaggacaccgccgtgtactactgtgccgccgacaccagaagatacacctgtcctgacattgccaccatgcaccggaacttcgattcttggggccagggcacactggtcaccgtttcttctggtaccggcggaggcggatctggcggcggaggtagcggtggcggaggatctgaattcgacatccagatgacacagagccctagcagcctgtctgccagcgtgggagacagagtgaccatcacatgcaaggccagcgaccacatcaacaactggctggcctggtatcagcagaagcctggacaggcccctaagctgctgatctacggcgctaccacactggaaacaggcgtgcccagcagattttctggcagcggctctggcaccgactacaccctgacaatatccagcctccagcctgaggacttcgccacctactactgtcagcagagctggaacaccccttggacattcggccagggcaccaagctggaaatcaagagactcgaggacctgaagaacgtgttcccacctgaggtggccgtgttcgagcctagcgaggccgagatcagccacacccagaaagccaccctcgtgtgcctggctaccggcttctaccccgaccatgtggaactgtcttggtgggtcaacggcaaagaggtgcacagcggcgtgtgtaccgacccccagccactgaaagaacagcccgccctgaacgacagccggtactgcctgagcagcagactgagagtgtccgccaccttctggcagaacccccggaaccacttcagatgccaggtgcagttctacggcctgagcgagaacgacgagtggacccaggacagagccaagcccgtgacccagatcgtgtctgccgaagcctggggcagagccgattgcgacgtgaagctggtggaaaagagcttcgagacagacaccaacctgaacttccagaacctgagcgtgatcggcttcagaatcctgctgctgaaagtggccggctttaacctgctgatgaccctgcggctgtggtccagcagggccaagcgatctggatctggagcaacaaacttctcactactcaaacaagcaggtgacgtggaggagaatcccgggcctactagtatggactggatttggcgcatccttttccttgtcggcgctgctaccggcgcgcattccttcgaacaagttcagcttcaacagcctggcgctgagctggtcaaacctggcgcttctgtgaagatgagctgcaaagccagcggctacgccttcagcagctactggatcaactggatgaagcagaaacccggccagggactcgaatggatcggccaaatctatcccggcgacggcgacaccaactacaacggcaagttcaagggcagagccacactgaccgccgatacctctagcagcacagcctacatgcagctgagcagcctgaccagcgaagatagcgccgtgtacttctgtgcccggtccatcacaacagtcgtgggctgcgctatggactattggggccagggaacaagcgtgaccgtgtctagtacgcgtatccagaaccctgatcctgccgtgtaccagctgcgggatagcaagagcagcgacaagagcgtgtgtctgttcaccgacttcgacagccagaccaacgtgtcccagagcaaggactccgacgtgtacatcaccgataagtgcgtgctggacatgcggagcatggacttcaagagcaactccgccgtggcctggtccaacaagtccgatttcgcctgcgccaacgccttcaacaacagcattatccccgaggacacattcttcccaagccccgagagcagctgcggctttaccagcgagagctaccagcagggcgtgctgagcgccaccatcctgtacgagatcctgctgggcaaggccaccctgtacgccgtgctggtgtctgccctggtgctgatggctatggtcaagcggaaggacagccggggataa

SEQ ID NO: 4951 - DNA, 2310 bp, synthetic construct
  source 1..2310: mol_type = other DNA
atggccttaccagtgaccgccttgctcctgccgctggccttgctgctccacgccgccaggccggaagtgcagctggttgaatctggcggaggactggttcagcctggcggatctctgagactgagctgtgaagccagcggcttcgccagcgacgattacatcatcggctggttcagacaggcccctggcaaagagagagagggcgtcagctgcatcagctctaagtacgccaacaccgtgtacaccgacagcgtgaagggcagattcagactgagcagaggcaccgccaagaataccgtgtacctccagatgagcgccctgaagcctgaggataccgccgtgtactactgcgctatggacagccgcagagtgacatgccctgagatcagcaccatgcaccggaacttcgattcttggggccagggcacactggtcacagtgtcatctggtaccggcggaggcggatctggcggcggaggtagcggtggcggaggatctgaattcgacatccagatgacacagagccctagcagcctgtctgccagcgtgggagacagagtgaccatcacatgcaaggccagcgaccacatcaacaactggctggcctggtatcagcagaagcctggacaggcccctaagctgctgatctacggcgctaccacactggaaacaggcgtgcccagcagattttctggcagcggctctggcaccgactacaccctgacaatatccagcctccagcctgaggacttcgccacctactactgtcagcagagctggaacaccccttggacattcggccagggcaccaagctggaaatcaagagactcgaggacctgaagaacgtgttcccacctgaggtggccgtgttcgagcctagcgaggccgagatcagccacacccagaaagccaccctcgtgtgcctggctaccggcttctaccccgaccatgtggaactgtcttggtgggtcaacggcaaagaggtgcacagcggcgtgtgtaccgacccccagccactgaaagaacagcccgccctgaacgacagccggtactgcctgagcagcagactgagagtgtccgccaccttctggcagaacccccggaaccacttcagatgccaggtgcagttctacggcctgagcgagaacgacgagtggacccaggacagagccaagcccgtgacccagatcgtgtctgccgaagcctggggcagagccgattgcgacgtgaagctggtggaaaagagcttcgagacagacaccaacctgaacttccagaacctgagcgtgatcggcttcagaatcctgctgctgaaagtggccggctttaacctgctgatgaccctgcggctgtggtccagcagggccaagcgatctggatctggagcaacaaacttctcactactcaaacaagcaggtgacgtggaggagaatcccgggcctactagtatggactggatttggcgcatccttttccttgtcggcgctgctaccggcgcgcattccttcgaacaagttcagcttcaacagcctggcgctgagctggtcaaacctggcgcttctgtgaagatgagctgcaaagccagcggctacgccttcagcagctactggatcaactggatgaagcagaaacccggccagggactcgaatggatcggccaaatctatcccggcgacggcgacaccaactacaacggcaagttcaagggcagagccacactgaccgccgatacctctagcagcacagcctacatgcagctgagcagcctgaccagcgaagatagcgccgtgtacttctgtgcccggtccatcacaacagtcgtgggctgcgctatggactattggggccagggaacaagcgtgaccgtgtctagtacgcgtatccagaaccctgatcctgccgtgtaccagctgcgggatagcaagagcagcgacaagagcgtgtgtctgttcaccgacttcgacagccagaccaacgtgtcccagagcaaggactccgacgtgtacatcaccgataagtgcgtgctggacatgcggagcatggacttcaagagcaactccgccgtggcctggtccaacaagtccgatttcgcctgcgccaacgccttcaacaacagcattatccccgaggacacattcttcccaagccccgagagcagctgcggctttaccagcgagagctaccagcagggcgtgctgagcgccaccatcctgtacgagatcctgctgggcaaggccaccctgtacgccgtgctggtgtctgccctggtgctgatggctatggtcaagcggaaggacagccggggataa

SEQ ID NO: 4952 - DNA, 2307 bp, synthetic construct
  source 1..2307: mol_type = other DNA
atggccttaccagtgaccgccttgctcctgccgctggccttgctgctccacgccgccaggccggaagtgcagctggttgaatctggcggaggactggttcagcctggcggatctctgagactgtcttgtgccgcctctggcttcgccagcgactactatatcatcggctggttcagacaggcccctggcaaagagagagagggcgtcagctgtatcagcagcagatacgccaacaccaactacgccgacagcgtgaagggcagattcaccatcagccgggacaacgccaagaacaccgtgtacctccagatgaacagcctgaagcctgaggacaccgccgtgtactactgtgccgccgacaccagaagatacacctgtcctgacattgccaccatgcaccggaacttcgattcttggggccagggcacactggtcaccgtttcttctggtaccggcggaggcggatctggcggcggaggtagcggtggcggaggatctgaattcgacatccagatgacacagagccctagcagcctgtctgccagcgtgggagacagagtgaccatcacatgcaaggccagcgaccacatcaacaactggctggcctggtatcagcagaagcctggacaggcccctaagctgctgatctacggcgctaccacactggaaacaggcgtgcccagcagattttctggcagcggctctggcaccgactacaccctgacaatatccagcctccagcctgaggacttcgccacctactactgtcagcagagctggaacaccccttggacattcggccagggcaccaagctggaaatcaagagactcgagatccagaaccctgatcctgccgtgtaccagctgcgggatagcaagagcagcgacaagagcgtgtgtctgttcaccgacttcgacagccagaccaacgtgtcccagagcaaggactccgacgtgtacatcaccgataagtgcgtgctggacatgcggagcatggacttcaagagcaactccgccgtggcctggtccaacaagtccgatttcgcctgcgccaacgccttcaacaacagcattatccccgaggacacattcttcccaagccccgagagcagctgcggctttaccagcgagagctaccagcagggcgtgctgagcgccaccatcctgtacgagatcctgctgggcaaggccaccctgtacgccgtgctggtgtctgccctggtgctgatggctatggtcaagcggaaggacagccggggaagggccaagcgatctggatctggagcaacaaacttctcactactcaaacaagcaggtgacgtggaggagaatcccgggcctactagtatggactggatttggcgcatccttttccttgtcggcgctgctaccggcgcgcattccttcgaacaagttcagcttcaacagcctggcgctgagctggtcaaacctggcgcttctgtgaagatgagctgcaaagccagcggctacgccttcagcagctactggatcaactggatgaagcagaaacccggccagggactcgaatggatcggccaaatctatcccggcgacggcgacaccaactacaacggcaagttcaagggcagagccacactgaccgccgatacctctagcagcacagcctacatgcagctgagcagcctgaccagcgaagatagcgccgtgtacttctgtgcccggtccatcacaacagtcgtgggctgcgctatggactattggggccagggaacaagcgtgaccgtgtctagtacgcgtgacctgaagaacgtgttcccacctgaggtggccgtgttcgagcctagcgaggccgagatcagccacacccagaaagccaccctcgtgtgcctggctaccggcttctaccccgaccatgtggaactgtcttggtgggtcaacggcaaagaggtgcacagcggcgtgtgtaccgacccccagccactgaaagaacagcccgccctgaacgacagccggtactgcctgagcagcagactgagagtgtccgccaccttctggcagaacccccggaaccacttcagatgccaggtgcagttctacggcctgagcgagaacgacgagtggacccaggacagagccaagcccgtgacccagatcgtgtctgccgaagcctggggcagagccgattgcgacgtgaagctggtggaaaagagcttcgagacagacaccaacctgaacttccagaacctgagcgtgatcggcttcagaatcctgctgctgaaagtggccggctttaacctgctgatgaccctgcggctgtggtccagc

SEQ ID NO: 4953 - DNA, 2307 bp, synthetic construct
  source 1..2307: mol_type = other DNA
atggccttaccagtgaccgccttgctcctgccgctggccttgctgctccacgccgccaggccggaagtgcagctggttgaatctggcggaggactggttcagcctggcggatctctgagactgagctgtgaagccagcggcttcgccagcgacgattacatcatcggctggttcagacaggcccctggcaaagagagagagggcgtcagctgcatcagctctaagtacgccaacaccgtgtacaccgacagcgtgaagggcagattcagactgagcagaggcaccgccaagaataccgtgtacctccagatgagcgccctgaagcctgaggataccgccgtgtactactgcgctatggacagccgcagagtgacatgccctgagatcagcaccatgcaccggaacttcgattcttggggccagggcacactggtcacagtgtcatctggtaccggcggaggcggatctggcggcggaggtagcggtggcggaggatctgaattcgacatccagatgacacagagccctagcagcctgtctgccagcgtgggagacagagtgaccatcacatgcaaggccagcgaccacatcaacaactggctggcctggtatcagcagaagcctggacaggcccctaagctgctgatctacggcgctaccacactggaaacaggcgtgcccagcagattttctggcagcggctctggcaccgactacaccctgacaatatccagcctccagcctgaggacttcgccacctactactgtcagcagagctggaacaccccttggacattcggccagggcaccaagctggaaatcaagagactcgagatccagaaccctgatcctgccgtgtaccagctgcgggatagcaagagcagcgacaagagcgtgtgtctgttcaccgacttcgacagccagaccaacgtgtcccagagcaaggactccgacgtgtacatcaccgataagtgcgtgctggacatgcggagcatggacttcaagagcaactccgccgtggcctggtccaacaagtccgatttcgcctgcgccaacgccttcaacaacagcattatccccgaggacacattcttcccaagccccgagagcagctgcggctttaccagcgagagctaccagcagggcgtgctgagcgccaccatcctgtacgagatcctgctgggcaaggccaccctgtacgccgtgctggtgtctgccctggtgctgatggctatggtcaagcggaaggacagccggggaagggccaagcgatctggatctggagcaacaaacttctcactactcaaacaagcaggtgacgtggaggagaatcccgggcctactagtatggactggatttggcgcatccttttccttgtcggcgctgctaccggcgcgcattccttcgaacaagttcagcttcaacagcctggcgctgagctggtcaaacctggcgcttctgtgaagatgagctgcaaagccagcggctacgccttcagcagctactggatcaactggatgaagcagaaacccggccagggactcgaatggatcggccaaatctatcccggcgacggcgacaccaactacaacggcaagttcaagggcagagccacactgaccgccgatacctctagcagcacagcctacatgcagctgagcagcctgaccagcgaagatagcgccgtgtacttctgtgcccggtccatcacaacagtcgtgggctgcgctatggactattggggccagggaacaagcgtgaccgtgtctagtacgcgtgacctgaagaacgtgttcccacctgaggtggccgtgttcgagcctagcgaggccgagatcagccacacccagaaagccaccctcgtgtgcctggctaccggcttctaccccgaccatgtggaactgtcttggtgggtcaacggcaaagaggtgcacagcggcgtgtgtaccgacccccagccactgaaagaacagcccgccctgaacgacagccggtactgcctgagcagcagactgagagtgtccgccaccttctggcagaacccccggaaccacttcagatgccaggtgcagttctacggcctgagcgagaacgacgagtggacccaggacagagccaagcccgtgacccagatcgtgtctgccgaagcctggggcagagccgattgcgacgtgaagctggtggaaaagagcttcgagacagacaccaacctgaacttccagaacctgagcgtgatcggcttcagaatcctgctgctgaaagtggccggctttaacctgctgatgaccctgcggctgtggtccagc

SEQ ID NO: 4954 - DNA, 2280 bp, synthetic construct
  source 1..2280: mol_type = other DNA
atggccttaccagtgaccgccttgctcctgccgctggccttgctgctccacgccgccaggccgcaagtcaaactggaagaaagcggtggcggcctggtgcaacctggcgaatctctgagactgagctgtagcgccagcggctccatcttcaaggtgttcagagtgttcgccatgagctggtacaggcaaggccctggcaagcagagagagctggtcgcctctatcagcagcggcgagacaaccacatacgccgaatctgtgaaaggccggttcaccatcagccgggataatgccaagaataccgcctatctccagatggactccctgaagcctgaagatacagctgtgtactactgcaacgccgaccataccttcaccggcgatttttggggccagggaacccaagtgaccgtgtctagtggtaccggcggaggcggatctggcggcggaggtagcggtggcggaggatctgaattcgacatccagatgacacagagccctagcagcctgtctgccagcgtgggagacagagtgaccatcacatgcaaggccagcgaccacatcaacaactggctggcctggtatcagcagaagcctggacaggcccctaagctgctgatctacggcgctaccacactggaaacaggcgtgcccagcagattttctggcagcggctctggcaccgactacaccctgacaatatccagcctccagcctgaggacttcgccacctactactgtcagcagagctggaacaccccttggacattcggccagggcaccaagctggaaatcaagagactcgagatccagaaccctgatcctgccgtgtaccagctgcgggatagcaagagcagcgacaagagcgtgtgtctgttcaccgacttcgacagccagaccaacgtgtcccagagcaaggactccgacgtgtacatcaccgataagtgcgtgctggacatgcggagcatggacttcaagagcaactccgccgtggcctggtccaacaagtccgatttcgcctgcgccaacgccttcaacaacagcattatccccgaggacacattcttcccaagccccgagagcagctgcggctttaccagcgagagctaccagcagggcgtgctgagcgccaccatcctgtacgagatcctgctgggcaaggccaccctgtacgccgtgctggtgtctgccctggtgctgatggctatggtcaagcggaaggacagccggggaagggccaagcgatctggatctggagcaacaaacttctcactactcaaacaagcaggtgacgtggaggagaatcccgggcctactagtatggactggatttggcgcatccttttccttgtcggcgctgctaccggcgcgcattccttcgaacaagttcagcttcaacagcctggcgctgagctggtcaaacctggcgcttctgtgaagatgagctgcaaagccagcggctacgccttcagcagctactggatcaactggatgaagcagaaacccggccagggactcgaatggatcggccaaatctatcccggcgacggcgacaccaactacaacggcaagttcaagggcagagccacactgaccgccgatacctctagcagcacagcctacatgcagctgagcagcctgaccagcgaagatagcgccgtgtacttctgtgcccggtccatcacaacagtcgtgggctgcgctatggactattggggccagggaacaagcgtgaccgtgtctagtacgcgtgacctgaagaacgtgttcccacctgaggtggccgtgttcgagcctagcgaggccgagatcagccacacccagaaagccaccctcgtgtgcctggctaccggcttctaccccgaccatgtggaactgtcttggtgggtcaacggcaaagaggtgcacagcggcgtgtgtaccgacccccagccactgaaagaacagcccgccctgaacgacagccggtactgcctgagcagcagactgagagtgtccgccaccttctggcagaacccccggaaccacttcagatgccaggtgcagttctacggcctgagcgagaacgacgagtggacccaggacagagccaagcccgtgacccagatcgtgtctgccgaagcctggggcagagccgattgcgacgtgaagctggtggaaaagagcttcgagacagacaccaacctgaacttccagaacctgagcgtgatcggcttcagaatcctgctgctgaaagtggccggctttaacctgctgatgaccctgcggctgtggtccagc

SEQ ID NO: 4955 - DNA, 2286 bp, synthetic construct
  source 1..2286: mol_type = other DNA
atggccttaccagtgaccgccttgctcctgccgctggccttgctgctccacgccgccaggccggacatccagatgacacagagccctagcagcctgtctgccagcgtgggagacagagtgaccatcacatgcaaggccagcgaccacatcaacaactggctggcctggtatcagcagaagcctggacaggcccctaagctgctgatctacggcgctaccacactggaaacaggcgtgcccagcagattttctggcagcggctctggcaccgactacaccctgacaatatccagcctccagcctgaggacttcgccacctactactgtcagcagagctggaacaccccttggacattcggccagggcaccaagctggaaatcaagagactcgaggacctgaagaacgtgttcccacctgaggtggccgtgttcgagcctagcgaggccgagatcagccacacccagaaagccaccctcgtgtgcctggctaccggcttctaccccgaccatgtggaactgtcttggtgggtcaacggcaaagaggtgcacagcggcgtgtgtaccgacccccagccactgaaagaacagcccgccctgaacgacagccggtactgcctgagcagcagactgagagtgtccgccaccttctggcagaacccccggaaccacttcagatgccaggtgcagttctacggcctgagcgagaacgacgagtggacccaggacagagccaagcccgtgacccagatcgtgtctgccgaagcctggggcagagccgattgcgacgtgaagctggtggaaaagagcttcgagacagacaccaacctgaacttccagaacctgagcgtgatcggcttcagaatcctgctgctgaaagtggccggctttaacctgctgatgaccctgcggctgtggtccagcagggccaagcgatctggatctggagcaacaaacttctcactactcaaacaagcaggtgacgtggaggagaatcccgggcctactagtgccaccatggactggatttggcgcatccttttccttgtcggcgctgctaccggcgcccattccgggcccgaagtgcagctggttgaatctggcggaggactggttcaggctggcggatctctgagactgtcttgtgccgccagcggcagaacctttagcatgggctggtttagacaggcccctggcaaagagagagagttcgtcgccgccatcacatactctggcggcagcccttactacgccgactctgtgaagggcagattcaccatcagccgggacaacgccaagaacaccgtgtacctccagatgaacagcctgaagcctgaggacaccgccgtgtactactgcgccgccaatccaacatacggcagcgactggaacgccgagaattggggccagggaacccaagtgacagtgtctagcggatccggcggcggaggatctggcggaggcggatctgggggcggaggctctttcgaacaagttcagcttcaacagcctggcgctgagctggtcaaacctggcgcttctgtgaagatgagctgcaaagccagcggctacgccttcagcagctactggatcaactggatgaagcagaaacccggccagggactcgaatggatcggccaaatctatcccggcgacggcgacaccaactacaacggcaagttcaagggcagagccacactgaccgccgatacctctagcagcacagcctacatgcagctgagcagcctgaccagcgaagatagcgccgtgtacttctgtgcccggtccatcacaacagtcgtgggctgcgctatggactattggggccagggaacaagcgtgaccgtgtctagtacgcgtatccagaaccctgatcctgccgtgtaccagctgcgggatagcaagagcagcgacaagagcgtgtgtctgttcaccgacttcgacagccagaccaacgtgtcccagagcaaggactccgacgtgtacatcaccgataagtgcgtgctggacatgcggagcatggacttcaagagcaactccgccgtggcctggtccaacaagtccgatttcgcctgcgccaacgccttcaacaacagcattatccccgaggacacattcttcccaagccccgagagcagctgcggctttaccagcgagagctaccagcagggcgtgctgagcgccaccatcctgtacgagatcctgctgggcaaggccaccctgtacgccgtgctggtgtctgccctggtgctgatggctatggtcaagcggaaggacagccggggataa

SEQ ID NO: 4956 - DNA, 2289 bp, synthetic construct
  source 1..2289: mol_type = other DNA
atggccttaccagtgaccgccttgctcctgccgctggccttgctgctccacgccgccaggccggacatccagatgacacagagccctagcagcctgtctgccagcgtgggagacagagtgaccatcacatgcaaggccagcgaccacatcaacaactggctggcctggtatcagcagaagcctggacaggcccctaagctgctgatctacggcgctaccacactggaaacaggcgtgcccagcagattttctggcagcggctctggcaccgactacaccctgacaatatccagcctccagcctgaggacttcgccacctactactgtcagcagagctggaacaccccttggacattcggccagggcaccaagctggaaatcaagagactcgaggacctgaagaacgtgttcccacctgaggtggccgtgttcgagcctagcgaggccgagatcagccacacccagaaagccaccctcgtgtgcctggctaccggcttctaccccgaccatgtggaactgtcttggtgggtcaacggcaaagaggtgcacagcggcgtgtgtaccgacccccagccactgaaagaacagcccgccctgaacgacagccggtactgcctgagcagcagactgagagtgtccgccaccttctggcagaacccccggaaccacttcagatgccaggtgcagttctacggcctgagcgagaacgacgagtggacccaggacagagccaagcccgtgacccagatcgtgtctgccgaagcctggggcagagccgattgcgacgtgaagctggtggaaaagagcttcgagacagacaccaacctgaacttccagaacctgagcgtgatcggcttcagaatcctgctgctgaaagtggccggctttaacctgctgatgaccctgcggctgtggtccagcagggccaagcgatctggatctggagcaacaaacttctcactactcaaacaagcaggtgacgtggaggagaatcccgggcctactagtgccaccatggactggatttggcgcatccttttccttgtcggcgctgctaccggcgcccattccgggcccgaagtgcaactggtggaatctgggggcggactggtgcagccaggcggaagtctgaggctgtcttgtgccgcctccggcagcatcttcggcttcaacgacatggcctggtatcggcaggctcccggaaaacagcgcgagctggtggctctgattagcagagtgggcgtgaccagcagcgccgactctgtgaagggcagattcacaatctccagagtgaacgccaaggatacagtgtacctccagatgaactctctgaaacctgaggatacagcagtgtactattgctacatggaccagcggctggacggcagcacactggcctactggggacagggaactcaagtgacagtgtctagcggatccggcggcggaggatctggcggaggcggatctgggggcggaggctctttcgaacaagttcagcttcaacagcctggcgctgagctggtcaaacctggcgcttctgtgaagatgagctgcaaagccagcggctacgccttcagcagctactggatcaactggatgaagcagaaacccggccagggactcgaatggatcggccaaatctatcccggcgacggcgacaccaactacaacggcaagttcaagggcagagccacactgaccgccgatacctctagcagcacagcctacatgcagctgagcagcctgaccagcgaagatagcgccgtgtacttctgtgcccggtccatcacaacagtcgtgggctgcgctatggactattggggccagggaacaagcgtgaccgtgtctagtacgcgtatccagaaccctgatcctgccgtgtaccagctgcgggatagcaagagcagcgacaagagcgtgtgtctgttcaccgacttcgacagccagaccaacgtgtcccagagcaaggactccgacgtgtacatcaccgataagtgcgtgctggacatgcggagcatggacttcaagagcaactccgccgtggcctggtccaacaagtccgatttcgcctgcgccaacgccttcaacaacagcattatccccgaggacacattcttcccaagccccgagagcagctgcggctttaccagcgagagctaccagcagggcgtgctgagcgccaccatcctgtacgagatcctgctgggcaaggccaccctgtacgccgtgctggtgtctgccctggtgctgatggctatggtcaagcggaaggacagccggggataa

SEQ ID NO: 4957 - DNA, 2277 bp, synthetic construct
  source 1..2277: mol_type = other DNA
atggccttaccagtgaccgccttgctcctgccgctggccttgctgctccacgccgccaggccggacatccagatgacacagagccctagcagcctgtctgccagcgtgggagacagagtgaccatcacatgcaaggccagcgaccacatcaacaactggctggcctggtatcagcagaagcctggacaggcccctaagctgctgatctacggcgctaccacactggaaacaggcgtgcccagcagattttctggcagcggctctggcaccgactacaccctgacaatatccagcctccagcctgaggacttcgccacctactactgtcagcagagctggaacaccccttggacattcggccagggcaccaagctggaaatcaagagactcgaggacctgaagaacgtgttcccacctgaggtggccgtgttcgagcctagcgaggccgagatcagccacacccagaaagccaccctcgtgtgcctggctaccggcttctaccccgaccatgtggaactgtcttggtgggtcaacggcaaagaggtgcacagcggcgtgtgtaccgacccccagccactgaaagaacagcccgccctgaacgacagccggtactgcctgagcagcagactgagagtgtccgccaccttctggcagaacccccggaaccacttcagatgccaggtgcagttctacggcctgagcgagaacgacgagtggacccaggacagagccaagcccgtgacccagatcgtgtctgccgaagcctggggcagagccgattgcgacgtgaagctggtggaaaagagcttcgagacagacaccaacctgaacttccagaacctgagcgtgatcggcttcagaatcctgctgctgaaagtggccggctttaacctgctgatgaccctgcggctgtggtccagcagggccaagcgatctggatctggagcaacaaacttctcactactcaaacaagcaggtgacgtggaggagaatcccgggcctactagtgccaccatggactggatttggcgcatccttttccttgtcggcgctgctaccggcgcccattccgggcccgaggtgcagctggttgaatctggcggaggactggttcaggctggcggatctctgagactgtcttgtgccgccagcggctctgtgttcagcggcaatgtgatgggctggtacagacaggcccctggcaaagaaagagagtgggttgccgccattgccagcggcggcagcatctactacagagactctgtgaagggcagattcaccatcagccgggacaacgccaagaacaccgtgtacctccagatgaacagcctgaagcctgaggacaccgccgtgtactactgcaactctcaccctcctacactgccctattggggcctgggaacccaagtgacagtgtcctctggatccggcggcggaggatctggcggaggcggatctgggggcggaggctctttcgaacaagttcagcttcaacagcctggcgctgagctggtcaaacctggcgcttctgtgaagatgagctgcaaagccagcggctacgccttcagcagctactggatcaactggatgaagcagaaacccggccagggactcgaatggatcggccaaatctatcccggcgacggcgacaccaactacaacggcaagttcaagggcagagccacactgaccgccgatacctctagcagcacagcctacatgcagctgagcagcctgaccagcgaagatagcgccgtgtacttctgtgcccggtccatcacaacagtcgtgggctgcgctatggactattggggccagggaacaagcgtgaccgtgtctagtacgcgtatccagaaccctgatcctgccgtgtaccagctgcgggatagcaagagcagcgacaagagcgtgtgtctgttcaccgacttcgacagccagaccaacgtgtcccagagcaaggactccgacgtgtacatcaccgataagtgcgtgctggacatgcggagcatggacttcaagagcaactccgccgtggcctggtccaacaagtccgatttcgcctgcgccaacgccttcaacaacagcattatccccgaggacacattcttcccaagccccgagagcagctgcggctttaccagcgagagctaccagcagggcgtgctgagcgccaccatcctgtacgagatcctgctgggcaaggccaccctgtacgccgtgctggtgtctgccctggtgctgatggctatggtcaagcggaaggacagccggggataa

SEQ ID NO: 4958 - DNA, 2271 bp, synthetic construct
  source 1..2271: mol_type = other DNA
atggccttaccagtgaccgccttgctcctgccgctggccttgctgctccacgccgccaggccggacatccagatgacacagagccctagcagcctgtctgccagcgtgggagacagagtgaccatcacatgcaaggccagcgaccacatcaacaactggctggcctggtatcagcagaagcctggacaggcccctaagctgctgatctacggcgctaccacactggaaacaggcgtgcccagcagattttctggcagcggctctggcaccgactacaccctgacaatatccagcctccagcctgaggacttcgccacctactactgtcagcagagctggaacaccccttggacattcggccagggcaccaagctggaaatcaagagactcgaggacctgaagaacgtgttcccacctgaggtggccgtgttcgagcctagcgaggccgagatcagccacacccagaaagccaccctcgtgtgcctggctaccggcttctaccccgaccatgtggaactgtcttggtgggtcaacggcaaagaggtgcacagcggcgtgtgtaccgacccccagccactgaaagaacagcccgccctgaacgacagccggtactgcctgagcagcagactgagagtgtccgccaccttctggcagaacccccggaaccacttcagatgccaggtgcagttctacggcctgagcgagaacgacgagtggacccaggacagagccaagcccgtgacccagatcgtgtctgccgaagcctggggcagagccgattgcgacgtgaagctggtggaaaagagcttcgagacagacaccaacctgaacttccagaacctgagcgtgatcggcttcagaatcctgctgctgaaagtggccggctttaacctgctgatgaccctgcggctgtggtccagcagggccaagcgatctggatctggagcaacaaacttctcactactcaaacaagcaggtgacgtggaggagaatcccgggcctactagtgccaccatggactggatttggcgcatccttttccttgtcggcgctgctaccggcgcccattccgggcccgaagttcagctgctggaatctggcggaggactcgttcaacctggcggctctctgagactgagctgtgccgcttctggcttcagcttctctagctacgccctgagctgggttcgacaagctcccggaaagggccttgaatgggtgtccagcatcggcgagaatgacggcaccacagactatgccgatgccgtgaaaggccggtttaccatcagcagagacaattccaagaacacgctctatctgcaaatgaactccctgcgcgtggaagatacagccgtgtattattgcgtgaaggacggcatccactggggacagggaaccctggttacagtgtctagcggatccggcggcggaggatctggcggaggcggatctgggggcggaggctctttcgaacaagttcagcttcaacagcctggcgctgagctggtcaaacctggcgcttctgtgaagatgagctgcaaagccagcggctacgccttcagcagctactggatcaactggatgaagcagaaacccggccagggactcgaatggatcggccaaatctatcccggcgacggcgacaccaactacaacggcaagttcaagggcagagccacactgaccgccgatacctctagcagcacagcctacatgcagctgagcagcctgaccagcgaagatagcgccgtgtacttctgtgcccggtccatcacaacagtcgtgggctgcgctatggactattggggccagggaacaagcgtgaccgtgtctagtacgcgtatccagaaccctgatcctgccgtgtaccagctgcgggatagcaagagcagcgacaagagcgtgtgtctgttcaccgacttcgacagccagaccaacgtgtcccagagcaaggactccgacgtgtacatcaccgataagtgcgtgctggacatgcggagcatggacttcaagagcaactccgccgtggcctggtccaacaagtccgatttcgcctgcgccaacgccttcaacaacagcattatccccgaggacacattcttcccaagccccgagagcagctgcggctttaccagcgagagctaccagcagggcgtgctgagcgccaccatcctgtacgagatcctgctgggcaaggccaccctgtacgccgtgctggtgtctgccctggtgctgatggctatggtcaagcggaaggacagccggggataa

SEQ ID NO: 4959 - DNA, 3378 bp, synthetic construct
  source 1..3378: mol_type = other DNA
atgggacccagactgctgttttgggctctgctgtgtctgctcggcacaggacctgttgaagctggcgtgacacagagccccacacacctgattaagaccagaggccagcaggccacactgagatgcagccctatcagcggccacaccagcgtgtactggtatcagcaggctctcggactgggcctccagttcctgctttggtacgacgagggcgaagagagaaaccggggcaacttccctcctcggttttccggcagacagttccccaactacagcagcgagctgaacgtgaacgccctggaactggaagatagcgccctgtacctgtgtgcctcttctcttggtggacctcgcggactggctggactgagaggggatgagcagtttttcggccctggcaccagactgaccgtgctggaaggtaccggcggaggcggatctggcggcggagaattcgacatccagatgacacagagccctagcagcctgtctgccagcgtgggagacagagtgaccatcacatgcaaggccagcgaccacatcaacaactggctggcctggtatcagcagaagcctggacaggcccctaagctgctgatctacggcgctaccacactggaaacaggcgtgcccagcagattttctggcagcggctctggcaccgactacaccctgacaatatccagcctccagcctgaggacttcgccacctactactgtcagcagagctggaacaccccttggacattcggccagggcaccaagctggaaatcaagagactcgaggacctgaagaacgtgttcccacctgaggtggccgtgttcgagcctagcgaggccgagatcagccacacccagaaagccaccctcgtgtgcctggctaccggcttctaccccgaccatgtggaactgtcttggtgggtcaacggcaaagaggtgcacagcggcgtgtgtaccgacccccagccactgaaagaacagcccgccctgaacgacagccggtactgcctgagcagcagactgagagtgtccgccaccttctggcagaacccccggaaccacttcagatgccaggtgcagttctacggcctgagcgagaacgacgagtggacccaggacagagccaagcccgtgacccagatcgtgtctgccgaagcctggggcagagccgattgcgacgtgaagctggtggaaaagagcttcgagacagacaccaacctgaacttccagaacctgagcgtgatcggcttcagaatcctgctgctgaaagtggccggctttaacctgctgatgaccctgcggctgtggtccagcagggccaagcgatctggatctggagcaacaaacttctcactactcaaacaagcaggtgacgtggaggagaatcccgggcctactagtgccaccatggactggatttggcgcatccttttccttgtcggcgctgctaccggcgcccattccgggcccgaagtgcagctggttgaatctggcggaggactggttcaggctggcggatctctgagactgtcttgtgccgccagcggcagaacctttagcatgggctggtttagacaggcccctggcaaagagagagagttcgtcgccgccatcacatactctggcggcagcccttactacgccgactctgtgaagggcagattcaccatcagccgggacaacgccaagaacaccgtgtacctccagatgaacagcctgaagcctgaggacaccgccgtgtactactgcgccgccaatccaacatacggcagcgactggaacgccgagaattggggccagggaacccaagtgacagtgtctagcggatccggcggcggaggatctggcggaggcggatctgggggcggaggctctttcgaacaagttcagcttcaacagcctggcgctgagctggtcaaacctggcgcttctgtgaagatgagctgcaaagccagcggctacgccttcagcagctactggatcaactggatgaagcagaaacccggccagggactcgaatggatcggccaaatctatcccggcgacggcgacaccaactacaacggcaagttcaagggcagagccacactgaccgccgatacctctagcagcacagcctacatgcagctgagcagcctgaccagcgaagatagcgccgtgtacttctgtgcccggtccatcacaacagtcgtgggctgcgctatggactattggggccagggaacaagcgtgaccgtgtctagtacgcgtatccagaaccctgatcctgccgtgtaccagctgcgggatagcaagagcagcgacaagagcgtgtgtctgttcaccgacttcgacagccagaccaacgtgtcccagagcaaggactccgacgtgtacatcaccgataagtgcgtgctggacatgcggagcatggacttcaagagcaactccgccgtggcctggtccaacaagtccgatttcgcctgcgccaacgccttcaacaacagcattatccccgaggacacattcttcccaagccccgagagcagctgcggctttaccagcgagagctaccagcagggcgtgctgagcgccaccatcctgtacgagatcctgctgggcaaggccaccctgtacgccgtgctggtgtctgccctggtgctgatggctatggtcaagcggaaggacagccggggacgcgccaagagaagcggatctggcgtgaagcagaccctgaatttcgacctgctgaagctggctggcgacgtggaatccaacccaggcccttctagaggccatatgaccgagtacaagcccacggtgcgcctcgccacccgcgacgacgtccccagggccgtacgcaccctcgccgccgcgttcgccgactaccccgccacgcgccacaccgtcgatccggaccgccacatcgagcgggtcaccgagctgcaagaactcttcctcacgcgcgtcgggctcgacatcggcaaggtgtgggtcgcggacgacggcgccgcggtggcggtctggaccacgccggagagcgtcgaagcgggggcggtgttcgccgagatcggcccgcgcatggccgagttgagcggttcccggctggccgcgcagcaacagatggaaggcctcctggcgccgcaccggcccaaggagcccgcgtggttcctggccaccgtcggcgtctcgcccgaccaccagggcaagggtctgggcagcgccgtcgtgctccccggagtggaggcggccgagcgcgccggggtgcccgccttcctggagacctccgcgccccgcaacctccccttctacgagcggctcggcttcaccgtcaccgccgacgtcgaggtgcccgaaggaccgcgcacctggtgcatgacccgcaagcccggtgcctga

SEQ ID NO: 4960 - DNA, 3375 bp, synthetic construct
  source 1..3375: mol_type = other DNA
atgggacccagactgctgttttgggctctgctgtgtctgctcggcacaggacctgttgaagctggcgtgacacagagccccacacacctgattaagaccagaggccagcaggccacactgagatgcagccctatcagcggccacaccagcgtgtactggtatcagcaggctctcggactgggcctccagttcctgctttggtacgacgagggcgaagagagaaaccggggcaacttccctcctcggttttccggcagacagttccccaactacagcagcgagctgaacgtgaacgccctggaactggaagatagcgccctgtacctgtgtgccagctctctcggcggagatgaactgggagccgatggcaacgagcagttctttggccctggcaccagactgaccgtgctggaaggtaccggcggaggcggatctggcggcggaagcgaattcgacatccagatgacacagagccctagcagcctgtctgccagcgtgggagacagagtgaccatcacatgcaaggccagcgaccacatcaacaactggctggcctggtatcagcagaagcctggacaggcccctaagctgctgatctacggcgctaccacactggaaacaggcgtgcccagcagattttctggcagcggctctggcaccgactacaccctgacaatatccagcctccagcctgaggacttcgccacctactactgtcagcagagctggaacaccccttggacattcggccagggcaccaagctggaaatcaagagactcgaggacctgaagaacgtgttcccacctgaggtggccgtgttcgagcctagcgaggccgagatcagccacacccagaaagccaccctcgtgtgcctggctaccggcttctaccccgaccatgtggaactgtcttggtgggtcaacggcaaagaggtgcacagcggcgtgtgtaccgacccccagccactgaaagaacagcccgccctgaacgacagccggtactgcctgagcagcagactgagagtgtccgccaccttctggcagaacccccggaaccacttcagatgccaggtgcagttctacggcctgagcgagaacgacgagtggacccaggacagagccaagcccgtgacccagatcgtgtctgccgaagcctggggcagagccgattgcgacgtgaagctggtggaaaagagcttcgagacagacaccaacctgaacttccagaacctgagcgtgatcggcttcagaatcctgctgctgaaagtggccggctttaacctgctgatgaccctgcggctgtggtccagcagggccaagcgatctggatctggagcaacaaacttctcactactcaaacaagcaggtgacgtggaggagaatcccgggcctactagtgccaccatggactggatttggcgcatccttttccttgtcggcgctgctaccggcgcccattccgggcccgaagtgcagctggttgaatctggcggaggactggttcaggctggcggatctctgagactgtcttgtgccgccagcggcagaacctttagcatgggctggtttagacaggcccctggcaaagagagagagttcgtcgccgccatcacatactctggcggcagcccttactacgccgactctgtgaagggcagattcaccatcagccgggacaacgccaagaacaccgtgtacctccagatgaacagcctgaagcctgaggacaccgccgtgtactactgcgccgccaatccaacatacggcagcgactggaacgccgagaattggggccagggaacccaagtgacagtgtctagcggatccggcggcggaggatctggcggaggcggatctgggggcggaggctctttcgaacaagttcagcttcaacagcctggcgctgagctggtcaaacctggcgcttctgtgaagatgagctgcaaagccagcggctacgccttcagcagctactggatcaactggatgaagcagaaacccggccagggactcgaatggatcggccaaatctatcccggcgacggcgacaccaactacaacggcaagttcaagggcagagccacactgaccgccgatacctctagcagcacagcctacatgcagctgagcagcctgaccagcgaagatagcgccgtgtacttctgtgcccggtccatcacaacagtcgtgggctgcgctatggactattggggccagggaacaagcgtgaccgtgtctagtacgcgtatccagaaccctgatcctgccgtgtaccagctgcgggatagcaagagcagcgacaagagcgtgtgtctgttcaccgacttcgacagccagaccaacgtgtcccagagcaaggactccgacgtgtacatcaccgataagtgcgtgctggacatgcggagcatggacttcaagagcaactccgccgtggcctggtccaacaagtccgatttcgcctgcgccaacgccttcaacaacagcattatccccgaggacacattcttcccaagccccgagagcagctgcggctttaccagcgagagctaccagcagggcgtgctgagcgccaccatcctgtacgagatcctgctgggcaaggccaccctgtacgccgtgctggtgtctgccctggtgctgatggctatggtcaagcggaaggacagccggggacgcgccaagagaagcggatctggcgtgaagcagaccctgaatttcgacctgctgaagctggctggcgacgtggaatccaacccaggcccttctagaggccatatgaccgagtacaagcccacggtgcgcctcgccacccgcgacgacgtccccagggccgtacgcaccctcgccgccgcgttcgccgactaccccgccacgcgccacaccgtcgatccggaccgccacatcgagcgggtcaccgagctgcaagaactcttcctcacgcgcgtcgggctcgacatcggcaaggtgtgggtcgcggacgacggcgccgcggtggcggtctggaccacgccggagagcgtcgaagcgggggcggtgttcgccgagatcggcccgcgcatggccgagttgagcggttcccggctggccgcgcagcaacagatggaaggcctcctggcgccgcaccggcccaaggagcccgcgtggttcctggccaccgtcggcgtctcgcccgaccaccagggcaagggtctgggcagcgccgtcgtgctccccggagtggaggcggccgagcgcgccggggtgcccgccttcctggagacctccgcgccccgcaacctccccttctacgagcggctcggcttcaccgtcaccgccgacgtcgaggtgcccgaaggaccgcgcacctggtgcatgacccgcaagcccggtgcctga

SEQ ID NO: 4961 - DNA, 2700 bp, synthetic construct
  source 1..2700: mol_type = other DNA
atggccttaccagtgaccgccttgctcctgccgctggccttgctgctccacgccgccaggccggcatgcctgttcaatcaagaggtgcagatccctctgaccgagagctactgtggcccctgtcctaagaactggatctgctacaagaacaactgctaccagttcttcgacgagagcaagaattggtacgagagccaggccagctgcatgagccagaatgccagcctgctgaaggtgtacagcaaagaggaccaggacctgctgaaactggtcaagagcgcccactggatgggccttgtgcacatccccaccaatggctcttggcagtgggaggacggcagcattctgagccctaacctgctgaccatcatcgagatgcagaagggcgactgcgccctgtacgccagcagctttaagggctacatcgagaattgcagcaccccgaacacctacatctgtatgcagagaaccgttctcgaggacctgaagaacgtgttcccacctgaggtggccgtgttcgagcctagcgaggccgagatcagccacacccagaaagccaccctcgtgtgcctggctaccggcttctaccccgaccatgtggaactgtcttggtgggtcaacggcaaagaggtgcacagcggcgtgtgtaccgacccccagccactgaaagaacagcccgccctgaacgacagccggtactgcctgagcagcagactgagagtgtccgccaccttctggcagaacccccggaaccacttcagatgccaggtgcagttctacggcctgagcgagaacgacgagtggacccaggacagagccaagcccgtgacccagatcgtgtctgccgaagcctggggcagagccgattgcgacgtgaagctggtggaaaagagcttcgagacagacaccaacctgaacttccagaacctgagcgtgatcggcttcagaatcctgctgctgaaagtggccggctttaacctgctgatgaccctgcggctgtggtccagcagggccaagcgatctggatctggagcaacaaacttctcactactcaaacaagcaggtgacgtggaggagaatcccgggcctactagtatggactggatttggcgcatccttttccttgtcggcgctgctaccggcgcgcattccttcgaagacctctttaatcaagaagtccagattccactcaccgaatcctactgcggaccttgtccaaaaaattggatttgttataagaacaactgttatcaattctttgatgagtctaaaaattggtatgagtcccaggcttcctgcatgtctcagaacgcttctctgctgaaagtctactctaaagaagatcaggatctcctgaagctcgtcaagtctgcccattggatggggctcgtccacattcctaccaacggaagctggcaatgggaagatggctccatcctgtctccaaatctgctcacgattattgaaatgcagaaaggggattgtgctctctacgccagctccttcaagggatttattgagaactgtagcacgcccaatacttatatctgtatgcaacggaccgtgacgcgtatccagaaccctgatcctgccgtgtaccagctgcgggatagcaagagcagcgacaagagcgtgtgtctgttcaccgacttcgacagccagaccaacgtgtcccagagcaaggactccgacgtgtacatcaccgataagtgcgtgctggacatgcggagcatggacttcaagagcaactccgccgtggcctggtccaacaagtccgatttcgcctgcgccaacgccttcaacaacagcattatccccgaggacacattcttcccaagccccgagagcagctgcggctttaccagcgagagctaccagcagggcgtgctgagcgccaccatcctgtacgagatcctgctgggcaaggccaccctgtacgccgtgctggtgtctgccctggtgctgatggctatggtcaagcggaaggacagccggggacgcgccaagagaagcggatctggcgtgaagcagaccctgaatttcgacctgctgaagctggctggcgacgtggaatccaacccaggcccttctagaggccatatgaccgagtacaagcccacggtgcgcctcgccacccgcgacgacgtccccagggccgtacgcaccctcgccgccgcgttcgccgactaccccgccacgcgccacaccgtcgatccggaccgccacatcgagcgggtcaccgagctgcaagaactcttcctcacgcgcgtcgggctcgacatcggcaaggtgtgggtcgcggacgacggcgccgcggtggcggtctggaccacgccggagagcgtcgaagcgggggcggtgttcgccgagatcggcccgcgcatggccgagttgagcggttcccggctggccgcgcagcaacagatggaaggcctcctggcgccgcaccggcccaaggagcccgcgtggttcctggccaccgtcggcgtctcgcccgaccaccagggcaagggtctgggcagcgccgtcgtgctccccggagtggaggcggccgagcgcgccggggtgcccgccttcctggagacctccgcgccccgcaacctccccttctacgagcggctcggcttcaccgtcaccgccgacgtcgaggtgcccgaaggaccgcgcacctggtgcatgacccgcaagcccggtgcctga

SEQ ID NO: 4962 - DNA, 2850 bp, synthetic construct
  source 1..2850: mol_type = other DNA
atggccttaccagtgaccgccttgctcctgccgctggccttgctgctccacgccgccaggccggacatccagatgacacagagccctagcagcctgtctgccagcgtgggagacagagtgaccatcacatgcaaggccagcgaccacatcaacaactggctggcctggtatcagcagaagcctggacaggcccctaagctgctgatctacggcgctaccacactggaaacaggcgtgcccagcagattttctggcagcggctctggcaccgactacaccctgacaatatccagcctccagcctgaggacttcgccacctactactgtcagcagagctggaacaccccttggacattcggccagggcaccaagctggaaatcaagagactcgaggacctgaagaacgtgttcccacctgaggtggccgtgttcgagcctagcgaggccgagatcagccacacccagaaagccaccctcgtgtgcctggctaccggcttctaccccgaccatgtggaactgtcttggtgggtcaacggcaaagaggtgcacagcggcgtgtgtaccgacccccagccactgaaagaacagcccgccctgaacgacagccggtactgcctgagcagcagactgagagtgtccgccaccttctggcagaacccccggaaccacttcagatgccaggtgcagttctacggcctgagcgagaacgacgagtggacccaggacagagccaagcccgtgacccagatcgtgtctgccgaagcctggggcagagccgattgcgacgtgaagctggtggaaaagagcttcgagacagacaccaacctgaacttccagaacctgagcgtgatcggcttcagaatcctgctgctgaaagtggccggctttaacctgctgatgaccctgcggctgtggtccagcagggccaagcgatctggatctggagcaacaaacttctcactactcaaacaagcaggtgacgtggaggagaatcccgggcctactagtgccaccatggactggatttggcgcatccttttccttgtcggcgctgctaccggcgcccattccgggcccatgggaagctggcttgagttctaccacagactcaacgccattgacagcaggctgtgggcacttggcggaagcgaagctgaactcgccgcttttgaaaaagaaattgccgctttcgagtccgagcttcaggcttacaaaggcaaagggaatcctgaggtcgagagcctgagagatcacgctgcccacattagagagtggttgcaggcataccggcacaatggatccggcggcggaggatctggcggaggcggatctgggggcggaggctctttcgaacaagttcagcttcaacagcctggcgctgagctggtcaaacctggcgcttctgtgaagatgagctgcaaagccagcggctacgccttcagcagctactggatcaactggatgaagcagaaacccggccagggactcgaatggatcggccaaatctatcccggcgacggcgacaccaactacaacggcaagttcaagggcagagccacactgaccgccgatacctctagcagcacagcctacatgcagctgagcagcctgaccagcgaagatagcgccgtgtacttctgtgcccggtccatcacaacagtcgtgggctgcgctatggactattggggccagggaacaagcgtgaccgtgtctagtacgcgtatccagaaccctgatcctgccgtgtaccagctgcgggatagcaagagcagcgacaagagcgtgtgtctgttcaccgacttcgacagccagaccaacgtgtcccagagcaaggactccgacgtgtacatcaccgataagtgcgtgctggacatgcggagcatggacttcaagagcaactccgccgtggcctggtccaacaagtccgatttcgcctgcgccaacgccttcaacaacagcattatccccgaggacacattcttcccaagccccgagagcagctgcggctttaccagcgagagctaccagcagggcgtgctgagcgccaccatcctgtacgagatcctgctgggcaaggccaccctgtacgccgtgctggtgtctgccctggtgctgatggctatggtcaagcggaaggacagccggggacgcgccaagagaagcggatctggcgtgaagcagaccctgaatttcgacctgctgaagctggctggcgacgtggaatccaacccaggcccttctagaggccatatgaccgagtacaagcccacggtgcgcctcgccacccgcgacgacgtccccagggccgtacgcaccctcgccgccgcgttcgccgactaccccgccacgcgccacaccgtcgatccggaccgccacatcgagcgggtcaccgagctgcaagaactcttcctcacgcgcgtcgggctcgacatcggcaaggtgtgggtcgcggacgacggcgccgcggtggcggtctggaccacgccggagagcgtcgaagcgggggcggtgttcgccgagatcggcccgcgcatggccgagttgagcggttcccggctggccgcgcagcaacagatggaaggcctcctggcgccgcaccggcccaaggagcccgcgtggttcctggccaccgtcggcgtctcgcccgaccaccagggcaagggtctgggcagcgccgtcgtgctccccggagtggaggcggccgagcgcgccggggtgcccgccttcctggagacctccgcgccccgcaacctccccttctacgagcggctcggcttcaccgtcaccgccgacgtcgaggtgcccgaaggaccgcgcacctggtgcatgacccgcaagcccggtgcctga

SEQ ID NO: 4963 - DNA, 2850 bp, synthetic construct
  source 1..2850: mol_type = other DNA
atggccttaccagtgaccgccttgctcctgccgctggccttgctgctccacgccgccaggccggcatgcatgggcagttggttcgagttctacgaccggctgaatgccatcgacgccagactgtgggctctcggaggatctgaagctgagctggccgccttcgagaaagagatcgccgcctttgagagcgagctgcaagcctacaaaggcaagggcaaccccgaggtggaaaacctgagagtgcacgccgctgccatcagagaatggctccaggcttacagacacaacggtaccggcggaggcggatctggcggcggaggtagcggtggcggaggatctgaattcgacatccagatgacacagagccctagcagcctgtctgccagcgtgggagacagagtgaccatcacatgcaaggccagcgaccacatcaacaactggctggcctggtatcagcagaagcctggacaggcccctaagctgctgatctacggcgctaccacactggaaacaggcgtgcccagcagattttctggcagcggctctggcaccgactacaccctgacaatatccagcctccagcctgaggacttcgccacctactactgtcagcagagctggaacaccccttggacattcggccagggcaccaagctggaaatcaagagactcgaggacctgaagaacgtgttcccacctgaggtggccgtgttcgagcctagcgaggccgagatcagccacacccagaaagccaccctcgtgtgcctggctaccggcttctaccccgaccatgtggaactgtcttggtgggtcaacggcaaagaggtgcacagcggcgtgtgtaccgacccccagccactgaaagaacagcccgccctgaacgacagccggtactgcctgagcagcagactgagagtgtccgccaccttctggcagaacccccggaaccacttcagatgccaggtgcagttctacggcctgagcgagaacgacgagtggacccaggacagagccaagcccgtgacccagatcgtgtctgccgaagcctggggcagagccgattgcgacgtgaagctggtggaaaagagcttcgagacagacaccaacctgaacttccagaacctgagcgtgatcggcttcagaatcctgctgctgaaagtggccggctttaacctgctgatgaccctgcggctgtggtccagcagggccaagcgatctggatctggagcaacaaacttctcactactcaaacaagcaggtgacgtggaggagaatcccgggcctactagtatggactggatttggcgcatccttttccttgtcggcgctgctaccggcgcgcattccttcgaacaagttcagcttcaacagcctggcgctgagctggtcaaacctggcgcttctgtgaagatgagctgcaaagccagcggctacgccttcagcagctactggatcaactggatgaagcagaaacccggccagggactcgaatggatcggccaaatctatcccggcgacggcgacaccaactacaacggcaagttcaagggcagagccacactgaccgccgatacctctagcagcacagcctacatgcagctgagcagcctgaccagcgaagatagcgccgtgtacttctgtgcccggtccatcacaacagtcgtgggctgcgctatggactattggggccagggaacaagcgtgaccgtgtctagtacgcgtatccagaaccctgatcctgccgtgtaccagctgcgggatagcaagagcagcgacaagagcgtgtgtctgttcaccgacttcgacagccagaccaacgtgtcccagagcaaggactccgacgtgtacatcaccgataagtgcgtgctggacatgcggagcatggacttcaagagcaactccgccgtggcctggtccaacaagtccgatttcgcctgcgccaacgccttcaacaacagcattatccccgaggacacattcttcccaagccccgagagcagctgcggctttaccagcgagagctaccagcagggcgtgctgagcgccaccatcctgtacgagatcctgctgggcaaggccaccctgtacgccgtgctggtgtctgccctggtgctgatggctatggtcaagcggaaggacagccggggacgcgccaagagaagcggatctggcgtgaagcagaccctgaatttcgacctgctgaagctggctggcgacgtggaatccaacccaggcccttctagaggccatatgaccgagtacaagcccacggtgcgcctcgccacccgcgacgacgtccccagggccgtacgcaccctcgccgccgcgttcgccgactaccccgccacgcgccacaccgtcgatccggaccgccacatcgagcgggtcaccgagctgcaagaactcttcctcacgcgcgtcgggctcgacatcggcaaggtgtgggtcgcggacgacggcgccgcggtggcggtctggaccacgccggagagcgtcgaagcgggggcggtgttcgccgagatcggcccgcgcatggccgagttgagcggttcccggctggccgcgcagcaacagatggaaggcctcctggcgccgcaccggcccaaggagcccgcgtggttcctggccaccgtcggcgtctcgcccgaccaccagggcaagggtctgggcagcgccgtcgtgctccccggagtggaggcggccgagcgcgccggggtgcccgccttcctggagacctccgcgccccgcaacctccccttctacgagcggctcggcttcaccgtcaccgccgacgtcgaggtgcccgaaggaccgcgcacctggtgcatgacccgcaagcccggtgcctga

SEQ ID NO: 4964 - DNA, 3201 bp, synthetic construct
  source 1..3201: mol_type = other DNA
atggccttaccagtgaccgccttgctcctgccgctggccttgctgctccacgccgccaggccggcatgcatggaccccgacctggaaatcagagccgccttcctgcggcagagaaacacagccctgagaacagaggtggccgagctggaacaagaggtgcagcggctggaaaacgaggtgtcccagtacgagacaagatacggccctctcggaggcggaaaaggtaccggcggaggcggatctggcggcggaggtagcggtggcggaggatctgaattcgacatccagatgacacagagccctagcagcctgtctgccagcgtgggagacagagtgaccatcacatgcaaggccagcgaccacatcaacaactggctggcctggtatcagcagaagcctggacaggcccctaagctgctgatctacggcgctaccacactggaaacaggcgtgcccagcagattttctggcagcggctctggcaccgactacaccctgacaatatccagcctccagcctgaggacttcgccacctactactgtcagcagagctggaacaccccttggacattcggccagggcaccaagctggaaatcaagagactcgaggacctgaagaacgtgttcccacctgaggtggccgtgttcgagcctagcgaggccgagatcagccacacccagaaagccaccctcgtgtgcctggctaccggcttctaccccgaccatgtggaactgtcttggtgggtcaacggcaaagaggtgcacagcggcgtgtgtaccgacccccagccactgaaagaacagcccgccctgaacgacagccggtactgcctgagcagcagactgagagtgtccgccaccttctggcagaacccccggaaccacttcagatgccaggtgcagttctacggcctgagcgagaacgacgagtggacccaggacagagccaagcccgtgacccagatcgtgtctgccgaagcctggggcagagccgattgcgacgtgaagctggtggaaaagagcttcgagacagacaccaacctgaacttccagaacctgagcgtgatcggcttcagaatcctgctgctgaaagtggccggctttaacctgctgatgaccctgcggctgtggtccagcagggccaagcgatctggatctggagcaacaaacttctcactactcaaacaagcaggtgacgtggaggagaatcccgggcctactagtgccaccatggactggatttggcgcatccttttccttgtcggcgctgctaccggcgcccattccgggcccgaagtgcagctggttgaatctggcggaggactggttcaggctggcggatctctgagactgtcttgtgccgccagcggcagaacctttagcatgggctggtttagacaggcccctggcaaagagagagagttcgtcgccgccatcacatactctggcggcagcccttactacgccgactctgtgaagggcagattcaccatcagccgggacaacgccaagaacaccgtgtacctccagatgaacagcctgaagcctgaggacaccgccgtgtactactgcgccgccaatccaacatacggcagcgactggaacgccgagaattggggccagggaacccaagtgacagtgtctagcggatccggcggcggaggatctggcggaggcggatctgggggcggaggctctttcgaacaagttcagcttcaacagcctggcgctgagctggtcaaacctggcgcttctgtgaagatgagctgcaaagccagcggctacgccttcagcagctactggatcaactggatgaagcagaaacccggccagggactcgaatggatcggccaaatctatcccggcgacggcgacaccaactacaacggcaagttcaagggcagagccacactgaccgccgatacctctagcagcacagcctacatgcagctgagcagcctgaccagcgaagatagcgccgtgtacttctgtgcccggtccatcacaacagtcgtgggctgcgctatggactattggggccagggaacaagcgtgaccgtgtctagtacgcgtatccagaaccctgatcctgccgtgtaccagctgcgggatagcaagagcagcgacaagagcgtgtgtctgttcaccgacttcgacagccagaccaacgtgtcccagagcaaggactccgacgtgtacatcaccgataagtgcgtgctggacatgcggagcatggacttcaagagcaactccgccgtggcctggtccaacaagtccgatttcgcctgcgccaacgccttcaacaacagcattatccccgaggacacattcttcccaagccccgagagcagctgcggctttaccagcgagagctaccagcagggcgtgctgagcgccaccatcctgtacgagatcctgctgggcaaggccaccctgtacgccgtgctggtgtctgccctggtgctgatggctatggtcaagcggaaggacagccggggacgcgccaagagaagcggatctggcgtgaagcagaccctgaatttcgacctgctgaagctggctggcgacgtggaatccaacccaggcccttctagaggccatatgaccgagtacaagcccacggtgcgcctcgccacccgcgacgacgtccccagggccgtacgcaccctcgccgccgcgttcgccgactaccccgccacgcgccacaccgtcgatccggaccgccacatcgagcgggtcaccgagctgcaagaactcttcctcacgcgcgtcgggctcgacatcggcaaggtgtgggtcgcggacgacggcgccgcggtggcggtctggaccacgccggagagcgtcgaagcgggggcggtgttcgccgagatcggcccgcgcatggccgagttgagcggttcccggctggccgcgcagcaacagatggaaggcctcctggcgccgcaccggcccaaggagcccgcgtggttcctggccaccgtcggcgtctcgcccgaccaccagggcaagggtctgggcagcgccgtcgtgctccccggagtggaggcggccgagcgcgccggggtgcccgccttcctggagacctccgcgccccgcaacctccccttctacgagcggctcggcttcaccgtcaccgccgacgtcgaggtgcccgaaggaccgcgcacctggtgcatgacccgcaagcccggtgcctga

SEQ ID NO: 4965 - DNA, 2850 bp, synthetic construct
  source 1..2850: mol_type = other DNA
atggccttaccagtgaccgccttgctcctgccgctggccttgctgctccacgccgccaggccggacatccagatgacacagagccctagcagcctgtctgccagcgtgggagacagagtgaccatcacatgcaaggccagcgaccacatcaacaactggctggcctggtatcagcagaagcctggacaggcccctaagctgctgatctacggcgctaccacactggaaacaggcgtgcccagcagattttctggcagcggctctggcaccgactacaccctgacaatatccagcctccagcctgaggacttcgccacctactactgtcagcagagctggaacaccccttggacattcggccagggcaccaagctggaaatcaagagactcgaggacctgaagaacgtgttcccacctgaggtggccgtgttcgagcctagcgaggccgagatcagccacacccagaaagccaccctcgtgtgcctggctaccggcttctaccccgaccatgtggaactgtcttggtgggtcaacggcaaagaggtgcacagcggcgtgtgtaccgacccccagccactgaaagaacagcccgccctgaacgacagccggtactgcctgagcagcagactgagagtgtccgccaccttctggcagaacccccggaaccacttcagatgccaggtgcagttctacggcctgagcgagaacgacgagtggacccaggacagagccaagcccgtgacccagatcgtgtctgccgaagcctggggcagagccgattgcgacgtgaagctggtggaaaagagcttcgagacagacaccaacctgaacttccagaacctgagcgtgatcggcttcagaatcctgctgctgaaagtggccggctttaacctgctgatgaccctgcggctgtggtccagcagggccaagcgatctggatctggagcaacaaacttctcactactcaaacaagcaggtgacgtggaggagaatcccgggcctactagtgccaccatggactggatttggcgcatccttttccttgtcggcgctgctaccggcgcccattccgggcccatgggatcttggagcgagttttacgatcggctgcacgccattcaccaccggctgtatgctctcggaggaagcgaagctgagctggccgcttttgaaaaagaaattgccgctttcgagtccgagcttcaggcttacaaaggcaaagggaatcctgaggtcgaggccctgagagataccgccgccttcatcagaacccggttgcaggcataccggcacaacggatccggcggcggaggatctggcggaggcggatctgggggcggaggctctttcgaacaagttcagcttcaacagcctggcgctgagctggtcaaacctggcgcttctgtgaagatgagctgcaaagccagcggctacgccttcagcagctactggatcaactggatgaagcagaaacccggccagggactcgaatggatcggccaaatctatcccggcgacggcgacaccaactacaacggcaagttcaagggcagagccacactgaccgccgatacctctagcagcacagcctacatgcagctgagcagcctgaccagcgaagatagcgccgtgtacttctgtgcccggtccatcacaacagtcgtgggctgcgctatggactattggggccagggaacaagcgtgaccgtgtctagtacgcgtatccagaaccctgatcctgccgtgtaccagctgcgggatagcaagagcagcgacaagagcgtgtgtctgttcaccgacttcgacagccagaccaacgtgtcccagagcaaggactccgacgtgtacatcaccgataagtgcgtgctggacatgcggagcatggacttcaagagcaactccgccgtggcctggtccaacaagtccgatttcgcctgcgccaacgccttcaacaacagcattatccccgaggacacattcttcccaagccccgagagcagctgcggctttaccagcgagagctaccagcagggcgtgctgagcgccaccatcctgtacgagatcctgctgggcaaggccaccctgtacgccgtgctggtgtctgccctggtgctgatggctatggtcaagcggaaggacagccggggacgcgccaagagaagcggatctggcgtgaagcagaccctgaatttcgacctgctgaagctggctggcgacgtggaatccaacccaggcccttctagaggccatatgaccgagtacaagcccacggtgcgcctcgccacccgcgacgacgtccccagggccgtacgcaccctcgccgccgcgttcgccgactaccccgccacgcgccacaccgtcgatccggaccgccacatcgagcgggtcaccgagctgcaagaactcttcctcacgcgcgtcgggctcgacatcggcaaggtgtgggtcgcggacgacggcgccgcggtggcggtctggaccacgccggagagcgtcgaagcgggggcggtgttcgccgagatcggcccgcgcatggccgagttgagcggttcccggctggccgcgcagcaacagatggaaggcctcctggcgccgcaccggcccaaggagcccgcgtggttcctggccaccgtcggcgtctcgcccgaccaccagggcaagggtctgggcagcgccgtcgtgctccccggagtggaggcggccgagcgcgccggggtgcccgccttcctggagacctccgcgccccgcaacctccccttctacgagcggctcggcttcaccgtcaccgccgacgtcgaggtgcccgaaggaccgcgcacctggtgcatgacccgcaagcccggtgcctga

SEQ ID NO: 4966 - DNA, 3480 bp, synthetic construct
  source 1..3480: mol_type = other DNA
atggccttaccagtgaccgccttgctcctgccgctggccttgctgctccacgccgccaggccggacatccagatgacacagagccctagcagcctgtctgccagcgtgggagacagagtgaccatcacatgcaaggccagcgaccacatcaacaactggctggcctggtatcagcagaagcctggacaggcccctaagctgctgatctacggcgctaccacactggaaacaggcgtgcccagcagattttctggcagcggctctggcaccgactacaccctgacaatatccagcctccagcctgaggacttcgccacctactactgtcagcagagctggaacaccccttggacattcggccagggcaccaagctggaaatcaagagactcgaggacctgaagaacgtgttcccacctgaggtggccgtgttcgagcctagcgaggccgagatcagccacacccagaaagccaccctcgtgtgcctggctaccggcttctaccccgaccatgtggaactgtcttggtgggtcaacggcaaagaggtgcacagcggcgtgtgtaccgacccccagccactgaaagaacagcccgccctgaacgacagccggtactgcctgagcagcagactgagagtgtccgccaccttctggcagaacccccggaaccacttcagatgccaggtgcagttctacggcctgagcgagaacgacgagtggacccaggacagagccaagcccgtgacccagatcgtgtctgccgaagcctggggcagagccgattgcgacgtgaagctggtggaaaagagcttcgagacagacaccaacctgaacttccagaacctgagcgtgatcggcttcagaatcctgctgctgaaagtggccggctttaacctgctgatgaccctgcggctgtggtccagcagggccaagcgatctggatctggagcaacaaacttctcactactcaaacaagcaggtgacgtggaggagaatcccgggcctactagtaccatggactggatttggcgcatccttttccttgtcggcgctgctaccggcgcccattccctgttcaatcaagaggtgcagatccctctgaccgagagctactgtggcccctgtcctaagaactggatctgctacaagaacaactgctaccagttcttcgacgagagcaagaattggtacgagagccaggccagctgcatgagccagaatgccagcctgctgaaggtgtacagcaaagaggaccaggacctgctgaaactggtcaagagcgcccactggatgggccttgtgcacatccccaccaatggctcttggcagtgggaggacggcagcattctgagccctaacctgctgaccatcatcgagatgcagaagggcgactgcgccctgtacgccagcagctttaagggctacatcgagaattgcagcaccccgaacacctacatctgtatgcagagaaccgtttctggcggaggcggctctggaggaggcggaagtggcggcggaggcgacctctttaatcaagaagtccagattccactcaccgaatcctactgcggaccttgtccaaaaaattggatttgttataagaacaactgttatcaattctttgatgagtctaaaaattggtatgagtcccaggcttcctgcatgtctcagaacgcttctctgctgaaagtctactctaaagaagatcaggatctcctgaagctcgtcaagtctgcccattggatggggctcgtccacattcctaccaacggaagctggcaatgggaagatggctccatcctgtctccaaatctgctcacgattattgaaatgcagaaaggggattgtgctctctacgccagctccttcaagggatatattgagaactgtagcacgcccaatacttatatctgtatgcaacggaccgtgggatccggcggcggaggatctggcggaggcggatctgggggcggaggctctttcgaacaagttcagcttcaacagcctggcgctgagctggtcaaacctggcgcttctgtgaagatgagctgcaaagccagcggctacgccttcagcagctactggatcaactggatgaagcagaaacccggccagggactcgaatggatcggccaaatctatcccggcgacggcgacaccaactacaacggcaagttcaagggcagagccacactgaccgccgatacctctagcagcacagcctacatgcagctgagcagcctgaccagcgaagatagcgccgtgtacttctgtgcccggtccatcacaacagtcgtgggctgcgctatggactattggggccagggaacaagcgtgaccgtgtctagtacgcgtatccagaaccctgatcctgccgtgtaccagctgcgggatagcaagagcagcgacaagagcgtgtgtctgttcaccgacttcgacagccagaccaacgtgtcccagagcaaggactccgacgtgtacatcaccgataagtgcgtgctggacatgcggagcatggacttcaagagcaactccgccgtggcctggtccaacaagtccgatttcgcctgcgccaacgccttcaacaacagcattatccccgaggacacattcttcccaagccccgagagcagctgcggctttaccagcgagagctaccagcagggcgtgctgagcgccaccatcctgtacgagatcctgctgggcaaggccaccctgtacgccgtgctggtgtctgccctggtgctgatggctatggtcaagcggaaggacagccggggacgcgccaagagaagcggatctggcgtgaagcagaccctgaatttcgacctgctgaagctggctggcgacgtggaatccaacccaggcccttctagaggccatatgaccgagtacaagcccacggtgcgcctcgccacccgcgacgacgtccccagggccgtacgcaccctcgccgccgcgttcgccgactaccccgccacgcgccacaccgtcgatccggaccgccacatcgagcgggtcaccgagctgcaagaactcttcctcacgcgcgtcgggctcgacatcggcaaggtgtgggtcgcggacgacggcgccgcggtggcggtctggaccacgccggagagcgtcgaagcgggggcggtgttcgccgagatcggcccgcgcatggccgagttgagcggttcccggctggccgcgcagcaacagatggaaggcctcctggcgccgcaccggcccaaggagcccgcgtggttcctggccaccgtcggcgtctcgcccgaccaccagggcaagggtctgggcagcgccgtcgtgctccccggagtggaggcggccgagcgcgccggggtgcccgccttcctggagacctccgcgccccgcaacctccccttctacgagcggctcggcttcaccgtcaccgccgacgtcgaggtgcccgaaggaccgcgcacctggtgcatgacccgcaagcccggtgcctga

SEQ ID NO: 4967 - DNA, 1857 bp, synthetic construct
  source 1..1857: mol_type = other DNA
atggccttaccagtgaccgccttgctcctgccgctggccttgctgctccacgccgccaggccggacatccagatgacacagactacatcctccctgtctgcctctctgggagacagagtcaccatcagttgcagggcaagtcaggacattagtaagtacctgaactggtatcagcagaaaccagatggaactgttaaactcctgatctaccatacatcaagattacactcaggagtcccatcaaggttcagtggcagtgggtctggaacagattattctctcaccattagcaacctggagcaagaagatattgccacttacttttgccaacagggtaatacgcttccgtacacgttcggaggggggaccaagctggagatcacactcgaggacctgaagaacgtgttcccacctgaggtggccgtgttcgagcctagcgaggccgagatcagccacacccagaaagccaccctcgtgtgcctggctaccggcttctaccccgaccatgtggaactgtcttggtgggtcaacggcaaagaggtgcacagcggcgtgtgtaccgacccccagccactgaaagaacagcccgccctgaacgacagccggtactgcctgagcagcagactgagagtgtccgccaccttctggcagaacccccggaaccacttcagatgccaggtgcagttctacggcctgagcgagaacgacgagtggacccaggacagagccaagcccgtgacccagatcgtgtctgccgaagcctggggcagagccgattgcggctttaccagcgagagctaccagcagggcgtgctgagcgccaccaacctgagcgtgatcggcttcagaatcctgctgctgaaagtggccggctttaacctgctgatgaccctgcggctgtggtccagcagggccaagcgatctggatctggagcaacaaacttctcactactcaaacaagcaggtgacgtggaggagaatcccgggcctactagtatggactggatttggcgcatccttttccttgtcggcgctgctaccggcgcgcattccttcgaagtgaaactgcaggagtcaggacctggcctggtggcgccctcacagagcctgtccgtcacatgcactgtctcaggggtctcattacccgactatggtgtaagctggattcgccagcctccacgaaagggtctggagtggctgggagtaatatggggtagtgaaaccacatactataattcagctctcaaatccagactgaccatcatcaaggacaactccaagagccaagttttcttaaaaatgaacagtctgcaaactgatgacacagccatttactactgtgccaaacattattactacggtggtagctatgctatggactactggggccaaggaacctcagtcaccgtctcctcaacgcgtatccagaaccctgatcctgccgtgtaccagctgcgggatagcaagagcagcgacaagagcgtgtgtctgttcaccgacttcgacagccagaccaacgtgtcccagagcaaggactccgacgtgtacatcaccgataagtgcgtgctggacatgcggagcatggacttcaagagcaactccgccgtggcctggtccaacaagtccgatttcgcctgcgccaacgccttcaacaacagcattatccccgaggacacattcttcccaagccccgagagcagctgcgacgtgaagctggtggaaaagagcttcgagacagacaccaacctgaacttccagatcctgtacgagatcctgctgggcaaggccaccctgtacgccgtgctggtgtctgccctggtgctgatggctatggtcaagcggaaggacagccgggga

SEQ ID NO: 4968 - DNA, 1860 bp, synthetic construct
  source 1..1860: mol_type = other DNA
atggccttaccagtgaccgccttgctcctgccgctggccttgctgctccacgccgccaggccggagatcgtgatgacccagagccctgccaccctgtctctgagccctggcgaaagagccaccctgagctgtagagccagccaggacatcagcaagtacctgaactggtatcagcagaagcccggccaggcccccagactgctgatctaccacaccagcagactgcacagcggcatccccgccagattttctggctctggcagcggcaccgactacaccctgacaatcagcagcctccagcccgaggacttcgccgtgtacttctgtcagcaaggcaacaccctgccctacaccttcggccagggcaccaagctggaaatcaagctcgaggacctgaagaacgtgttcccacctgaggtggccgtgttcgagcctagcgaggccgagatcagccacacccagaaagccaccctcgtgtgcctggctaccggcttctaccccgaccatgtggaactgtcttggtgggtcaacggcaaagaggtgcacagcggcgtgtgtaccgacccccagccactgaaagaacagcccgccctgaacgacagccggtactgcctgagcagcagactgagagtgtccgccaccttctggcagaacccccggaaccacttcagatgccaggtgcagttctacggcctgagcgagaacgacgagtggacccaggacagagccaagcccgtgacccagatcgtgtctgccgaagcctggggcagagccgattgcggctttaccagcgagagctaccagcagggcgtgctgagcgccaccaacctgagcgtgatcggcttcagaatcctgctgctgaaagtggccggctttaacctgctgatgaccctgcggctgtggtccagcagggccaagcgatctggatctggagcaacaaacttctcactactcaaacaagcaggtgacgtggaggagaatcccgggcctactagtatggactggatttggcgcatccttttccttgtcggcgctgctaccggcgcgcattccttcgaacaggtgcaactccaggaatctggccctggcctcgtgaagcccagcgagacactgagcctgacctgtaccgtgtccggcgtgtccctgcctgactatggcgtgtcctggatcagacagccccctggcaagggcctggaatggatcggagtgatttggggcagcgaaaccacctactacaacagctccctgaagtccagagtgaccatctccaaggacaactccaagaaccaggtgtccctgaagctgagcagcgtgacagccgccgacaccgccgtgtattactgcgccaagcactactactacggcggcagctacgctatggactactggggccagggaaccctcgtgaccgtgtctagtacgcgtatccagaaccctgatcctgccgtgtaccagctgcgggatagcaagagcagcgacaagagcgtgtgtctgttcaccgacttcgacagccagaccaacgtgtcccagagcaaggactccgacgtgtacatcaccgataagtgcgtgctggacatgcggagcatggacttcaagagcaactccgccgtggcctggtccaacaagtccgatttcgcctgcgccaacgccttcaacaacagcattatccccgaggacacattcttcccaagccccgagagcagctgcgacgtgaagctggtggaaaagagcttcgagacagacaccaacctgaacttccagatcctgtacgagatcctgctgggcaaggccaccctgtacgccgtgctggtgtctgccctggtgctgatggctatggtcaagcggaaggacagccgggga

SEQ ID NO: 4969 - DNA, 1863 bp, synthetic construct
  source 1..1863: mol_type = other DNA
atggccttaccagtgaccgccttgctcctgccgctggccttgctgctccacgccgccaggccggacgagatcgtgctgacacagagccccgccaccctgtcactgtctccaggcgaaagagccaccctgagctgtagcgccagcagcagcgtgtcctacatgcactggtatcagcagaagcccggccaggcccccagactgctgatctacgataccagcaagctggcctccggcatccccgccagattttctggcagcggctccggcaccgacttcaccctgacaatcagcagcctggaacccgaggacgtggccgtgtactactgttttcaaggcagcgtgtaccccttcaccttcggccagggcaccaagctggaaatcaagagactcgaggacctgaagaacgtgttcccacctgaggtggccgtgttcgagcctagcgaggccgagatcagccacacccagaaagccaccctcgtgtgcctggctaccggcttctaccccgaccatgtggaactgtcttggtgggtcaacggcaaagaggtgcacagcggcgtgtgtaccgacccccagccactgaaagaacagcccgccctgaacgacagccggtactgcctgagcagcagactgagagtgtccgccaccttctggcagaacccccggaaccacttcagatgccaggtgcagttctacggcctgagcgagaacgacgagtggacccaggacagagccaagcccgtgacccagatcgtgtctgccgaagcctggggcagagccgattgcggctttaccagcgagagctaccagcagggcgtgctgagcgccaccaacctgagcgtgatcggcttcagaatcctgctgctgaaagtggccggctttaacctgctgatgaccctgcggctgtggtccagcagggccaagcgatctggatctggagcaacaaacttctcactactcaaacaagcaggtgacgtggaggagaatcccgggcctactagtatggactggatttggcgcatccttttccttgtcggcgctgctaccggcgcgcattccttcgaacaggtgcagctccaggaatctggccctggcctcgtgaagcctagccagaccctgagcctgacctgtaccgtgtctggcggcagcatcagcacaagcggcatgggcgtgggctggatcagacagcaccctggcaagggcctggaatggatcggccacatttggtgggacgacgacaagcggtacaaccccgccctgaagtccagagtgaccatcagcgtggacaccagcaagaaccagttcagcctgaagctgagcagcgtgacagccgccgataccgccgtgtattattgcgcccggatggaactgtggtcctactacttcgactactggggccagggaaccctcgtgaccgtgtctagtacgcgtatccagaaccctgatcctgccgtgtaccagctgcgggatagcaagagcagcgacaagagcgtgtgtctgttcaccgacttcgacagccagaccaacgtgtcccagagcaaggactccgacgtgtacatcaccgataagtgcgtgctggacatgcggagcatggacttcaagagcaactccgccgtggcctggtccaacaagtccgatttcgcctgcgccaacgccttcaacaacagcattatccccgaggacacattcttcccaagccccgagagcagctgcgacgtgaagctggtggaaaagagcttcgagacagacaccaacctgaacttccagatcctgtacgagatcctgctgggcaaggccaccctgtacgccgtgctggtgtctgccctggtgctgatggctatggtcaagcggaaggacagccgggga

SEQ ID NO: 4970 - DNA, 1857 bp, synthetic construct
  source 1..1857: mol_type = other DNA
atggccttaccagtgaccgccttgctcctgccgctggccttgctgctccacgccgccaggccggactacatccacgtgacacagagccctagcagcctgtccgtgtccatcggcgatagagtgaccatcaactgccagacctctcaaggcgtgggcagcgacctgcactggtatcagcacaaacctggcagagcccctaagctgctgatccaccatgccagctctgtggaagatggcgtgcccagcagattttccggcaccggatttcacaccagcttcaacctgacaatcaacgacctccaggccgacgacatcggcacctactactgtcaagtgctccagagcttcggcagaggcagcagactggatacaaaactcgaggacctgaagaacgtgttcccacctgaggtggccgtgttcgagcctagcgaggccgagatcagccacacccagaaagccaccctcgtgtgcctggctaccggcttctaccccgaccatgtggaactgtcttggtgggtcaacggcaaagaggtgcacagcggcgtgtgtaccgacccccagccactgaaagaacagcccgccctgaacgacagccggtactgcctgagcagcagactgagagtgtccgccaccttctggcagaacccccggaaccacttcagatgccaggtgcagttctacggcctgagcgagaacgacgagtggacccaggacagagccaagcccgtgacccagatcgtgtctgccgaagcctggggcagagccgattgcggctttaccagcgagagctaccagcagggcgtgctgagcgccaccaacctgagcgtgatcggcttcagaatcctgctgctgaaagtggccggctttaacctgctgatgaccctgcggctgtggtccagcagggccaagcgatctggatctggagcaacaaacttctcactactcaaacaagcaggtgacgtggaggagaatcccgggcctactagtatggactggatttggcgcatccttttccttgtcggcgctgctaccggcgcgcattccttcgaaagggcacacctggtgcagtctggcaccgccatgaagaaacctggcgcttccgtcagagtgtcctgtcagacaagcggctacaccttcacagcccacatcctgttctggttcagacaggccccaggcagaggactggaatgggtcggatggatcaagccccagtacggggccgtgaatttcggcggaggcttcagagacagagtgaccctgaccagggacgtgtaccgggaaatcgcctacatggacatccggggcctgaagcctgatgacaccgccgtgtactactgcgccagggatagaagctacggcgacagctcttgggctctcgatgcttggggacagggcacaacagtggtggtgtctgctacgcgtatccagaaccctgatcctgccgtgtaccagctgcgggatagcaagagcagcgacaagagcgtgtgtctgttcaccgacttcgacagccagaccaacgtgtcccagagcaaggactccgacgtgtacatcaccgataagtgcgtgctggacatgcggagcatggacttcaagagcaactccgccgtggcctggtccaacaagtccgatttcgcctgcgccaacgccttcaacaacagcattatccccgaggacacattcttcccaagccccgagagcagctgcgacgtgaagctggtggaaaagagcttcgagacagacaccaacctgaacttccagatcctgtacgagatcctgctgggcaaggccaccctgtacgccgtgctggtgtctgccctggtgctgatggctatggtcaagcggaaggacagccgggga

SEQ ID NO: 4971 - DNA, 1887 bp, synthetic construct
  source 1..1887: mol_type = other DNA
atggccttaccagtgaccgccttgctcctgccgctggccttgctgctccacgccgccaggccggacgtgcagatgatccagacccccgatagcctggccgtgtccctgggacagagagccaccatctcttgcagagccagcgagagcgtggacaactacggcatcagcttcatgcactggtatcagcagaagcccggccagagccccaagctgctgatctacagagcctccaacctggaaagcggcatccccgccagattttccggcagcggcagcagaaccgacttcaccctgaccatcaaccccgtggaaaccgacgacgtggcaacctactactgccagcagaacaacaaggacccccccacctttggcggaggcaccaagctggaaatcaagctcgaggacctgaagaacgtgttcccacctgaggtggccgtgttcgagcctagcgaggccgagatcagccacacccagaaagccaccctcgtgtgcctggctaccggcttctaccccgaccatgtggaactgtcttggtgggtcaacggcaaagaggtgcacagcggcgtgtgtaccgacccccagccactgaaagaacagcccgccctgaacgacagccggtactgcctgagcagcagactgagagtgtccgccaccttctggcagaacccccggaaccacttcagatgccaggtgcagttctacggcctgagcgagaacgacgagtggacccaggacagagccaagcccgtgacccagatcgtgtctgccgaagcctggggcagagccgattgcggctttaccagcgagagctaccagcagggcgtgctgagcgccaccaacctgagcgtgatcggcttcagaatcctgctgctgaaagtggccggctttaacctgctgatgaccctgcggctgtggtccagcagggccaagcgatctggatctggagcaacaaacttctcactactcaaacaagcaggtgacgtggaggagaatcccgggcctactagtatggactggatttggcgcatccttttccttgtcggcgctgctaccggcgcgcattccttcgaagggggaggcggctctcaggtgcaactccagcagtctggcgctgagcttgtgaagcctggggccagcgtgaagattagctgcaaggccagcggctacgccttcagcagctactggatgaactgggtcaagcagcggcctggcaagggcctggaatggatcggccaaatctaccccggcgacggcgacaccacctacaacggcaagttcaagggcaaggccaccctgacagccgacaagagcagcagcaccgtgtacatgcaactgaacagcctgaccagcgaggacagcgccgtgtacttctgcgtgcggtactactacggcagctccggctacttcgactattggggccagggcaccacactgaccgtgtcctctacgcgtatccagaaccctgatcctgccgtgtaccagctgcgggatagcaagagcagcgacaagagcgtgtgtctgttcaccgacttcgacagccagaccaacgtgtcccagagcaaggactccgacgtgtacatcaccgataagtgcgtgctggacatgcggagcatggacttcaagagcaactccgccgtggcctggtccaacaagtccgatttcgcctgcgccaacgccttcaacaacagcattatccccgaggacacattcttcccaagccccgagagcagctgcgacgtgaagctggtggaaaagagcttcgagacagacaccaacctgaacttccagatcctgtacgagatcctgctgggcaaggccaccctgtacgccgtgctggtgtctgccctggtgctgatggctatggtcaagcggaaggacagccgggga

SEQ ID NO: 4972 - DNA, 1860 bp, synthetic construct
  source 1..1860: mol_type = other DNA
atggccttaccagtgaccgccttgctcctgccgctggccttgctgctccacgccgccaggccggacgtgcagatgatccagacccccagcagcctgtctgccagcctgggcgatagagtgaccatcagctgtcgggccagccaggacatcggcaactacctgaactggtatcagcagaaacccgacggcaccgtgaagctgctgatctactacaccagcagactgcacagcggcgtgcccagcagattttctggcagcggctctggcaccgagtacagcctgaccatctccaacctggaacaggaagatattgctacctacttctgtcagcaaggcagcgccctgccccctacatttggcggcggaacaaagctggaaatcaacctcgaggacctgaagaacgtgttcccacctgaggtggccgtgttcgagcctagcgaggccgagatcagccacacccagaaagccaccctcgtgtgcctggctaccggcttctaccccgaccatgtggaactgtcttggtgggtcaacggcaaagaggtgcacagcggcgtgtgtaccgacccccagccactgaaagaacagcccgccctgaacgacagccggtactgcctgagcagcagactgagagtgtccgccaccttctggcagaacccccggaaccacttcagatgccaggtgcagttctacggcctgagcgagaacgacgagtggacccaggacagagccaagcccgtgacccagatcgtgtctgccgaagcctggggcagagccgattgcggctttaccagcgagagctaccagcagggcgtgctgagcgccaccaacctgagcgtgatcggcttcagaatcctgctgctgaaagtggccggctttaacctgctgatgaccctgcggctgtggtccagcagggccaagcgatctggatctggagcaacaaacttctcactactcaaacaagcaggtgacgtggaggagaatcccgggcctactagtatggactggatttggcgcatccttttccttgtcggcgctgctaccggcgcgcattccttcgaagctctccagctccagcagtctggcgcagaactcgtgcggcctggcgcttctgtgaccctgagctgtaaagccagcggctacaccttcaccgactacgagatgcactgggtcaagcagacccctgtgcacggcctggaatggatcggagccatcgaccctgagacaggcggcaccgcctacaaccagaagttcgagggcaaggccatcctgaccgccgacaagagcagcagcacagcctacatggaactgcggagcctgacctccgaggacagccccgtgtactactgtgccagacggcggtactacggcagcagctccttcgactattggggccagggcaccaccctgaccgtgtctagtacgcgtatccagaaccctgatcctgccgtgtaccagctgcgggatagcaagagcagcgacaagagcgtgtgtctgttcaccgacttcgacagccagaccaacgtgtcccagagcaaggactccgacgtgtacatcaccgataagtgcgtgctggacatgcggagcatggacttcaagagcaactccgccgtggcctggtccaacaagtccgatttcgcctgcgccaacgccttcaacaacagcattatccccgaggacacattcttcccaagccccgagagcagctgcgacgtgaagctggtggaaaagagcttcgagacagacaccaacctgaacttccagatcctgtacgagatcctgctgggcaaggccaccctgtacgccgtgctggtgtctgccctggtgctgatggctatggtcaagcggaaggacagccgggga

SEQ ID NO: 4973 - DNA, 1872 bp, synthetic construct
  source 1..1872: mol_type = other DNA
atggccttaccagtgaccgccttgctcctgccgctggccttgctgctccacgccgccaggccggacatcgtcctgacccagtccccagccagcctggcggtgtccctgggtcaacgagctaccatttcctgcagagcctctaagtccgtatccacttccggctatagttacctgcattggtaccaacagaaaccagggcagccacccaagctgctcatctatctggcctcaaacctggagtccggcgtgcccgccagattctccggaagtgggagcggcaccgactttacattgaacatccacccagtcgaagaggaagatgctgccacttattactgtcagcactccagggagctgccatttacatttggctctggcacaaaactggagatcaaactcgaggacctgaagaacgtgttcccacctgaggtggccgtgttcgagcctagcgaggccgagatcagccacacccagaaagccaccctcgtgtgcctggctaccggcttctaccccgaccatgtggaactgtcttggtgggtcaacggcaaagaggtgcacagcggcgtgtgtaccgacccccagccactgaaagaacagcccgccctgaacgacagccggtactgcctgagcagcagactgagagtgtccgccaccttctggcagaacccccggaaccacttcagatgccaggtgcagttctacggcctgagcgagaacgacgagtggacccaggacagagccaagcccgtgacccagatcgtgtctgccgaagcctggggcagagccgattgcggctttaccagcgagagctaccagcagggcgtgctgagcgccaccaacctgagcgtgatcggcttcagaatcctgctgctgaaagtggccggctttaacctgctgatgaccctgcggctgtggtccagcagggccaagcgatctggatctggagcaacaaacttctcactactcaaacaagcaggtgacgtggaggagaatcccgggcctactagtatggactggatttggcgcatccttttccttgtcggcgctgctaccggcgcgcattccttcgaacaggttcagctggtcgagtccgggggaggtctggtacagccgggtggcagcctcaagctgtcatgtgccgcatctggttttgactttagcaggtattggatgagctgggtccgccaggccccgggcaagggacttgagtggattggagaaataaaccctacttccagcacaatcaacttcacaccttctttgaaagataaggtttttatctctcgggataacgctaaaaacacactgtacttgcagatgtctaaggtgcgaagcgaagacaccgccctctattattgcgcccggggtaattactaccgctatggggatgcgatggactattgggggcaaggtacctccgtcacggtctcaacgcgtatccagaaccctgatcctgccgtgtaccagctgcgggatagcaagagcagcgacaagagcgtgtgtctgttcaccgacttcgacagccagaccaacgtgtcccagagcaaggactccgacgtgtacatcaccgataagtgcgtgctggacatgcggagcatggacttcaagagcaactccgccgtggcctggtccaacaagtccgatttcgcctgcgccaacgccttcaacaacagcattatccccgaggacacattcttcccaagccccgagagcagctgcgacgtgaagctggtggaaaagagcttcgagacagacaccaacctgaacttccagatcctgtacgagatcctgctgggcaaggccaccctgtacgccgtgctggtgtctgccctggtgctgatggctatggtcaagcggaaggacagccgggga

SEQ ID NO: 4974 - DNA, 1866 bp, synthetic construct
  source 1..1866: mol_type = other DNA
atggccttaccagtgaccgccttgctcctgccgctggccttgctgctccacgccgccaggccggacatccagatgacccagagccctagctcactgagcgccagcgtgggcgacagggtgaccattacctgctccgccagccaggacatcagcaactacctgaactggtaccagcagaagcccggcaaggcccccaagctgctgatctactacacctccaacctgcactccggcgtgcccagcaggttcagcggaagcggcagcggcaccgatttcaccctgaccatctccagcctgcagcccgaggacttcgccacctactactgccagcagtacaggaagctcccctggactttcggccagggcaccaaactggagatcaagcgtctcgaggacctgaagaacgtgttcccacctgaggtggccgtgttcgagcctagcgaggccgagatcagccacacccagaaagccaccctcgtgtgcctggctaccggcttctaccccgaccatgtggaactgtcttggtgggtcaacggcaaagaggtgcacagcggcgtgtgtaccgacccccagccactgaaagaacagcccgccctgaacgacagccggtactgcctgagcagcagactgagagtgtccgccaccttctggcagaacccccggaaccacttcagatgccaggtgcagttctacggcctgagcgagaacgacgagtggacccaggacagagccaagcccgtgacccagatcgtgtctgccgaagcctggggcagagccgattgcggctttaccagcgagagctaccagcagggcgtgctgagcgccaccaacctgagcgtgatcggcttcagaatcctgctgctgaaagtggccggctttaacctgctgatgaccctgcggctgtggtccagcagggccaagcgatctggatctggagcaacaaacttctcactactcaaacaagcaggtgacgtggaggagaatcccgggcctactagtatggactggatttggcgcatccttttccttgtcggcgctgctaccggcgcgcattccttcgaacaggtgcagctggtccagagcggcgccgaagtgaagaagcccggcagctccgtgaaagtgagctgcaaggccagcggcggcaccttcagcaactactggatgcactgggtgaggcaggcccccggacagggcctggagtggatgggcgccacctacaggggccacagcgacacctactacaaccagaagttcaagggccgggtgaccatcaccgccgacaagagcaccagcaccgcctacatggaactgagcagcctcaggagcgaggacaccgctgtgtattactgcgccaggggcgccatctacgacggctacgacgtgctggacaactggggccagggcacactggtgaccgtgtccagcacgcgtatccagaaccctgatcctgccgtgtaccagctgcgggatagcaagagcagcgacaagagcgtgtgtctgttcaccgacttcgacagccagaccaacgtgtcccagagcaaggactccgacgtgtacatcaccgataagtgcgtgctggacatgcggagcatggacttcaagagcaactccgccgtggcctggtccaacaagtccgatttcgcctgcgccaacgccttcaacaacagcattatccccgaggacacattcttcccaagccccgagagcagctgcgacgtgaagctggtggaaaagagcttcgagacagacaccaacctgaacttccagatcctgtacgagatcctgctgggcaaggccaccctgtacgccgtgctggtgtctgccctggtgctgatggctatggtcaagcggaaggacagccgggga

SEQ ID NO: 4975 - DNA, 1866 bp, synthetic construct
  source 1..1866: mol_type = other DNA
atggccttaccagtgaccgccttgctcctgccgctggccttgctgctccacgccgccaggccggacatcgtgctgacacagagccctgccaccctgtctctgagccctggcgatagagccaccatcagctgtagagccagcgagagcgtgaccatcctgggcagccacctgatctactggtatcagcagaagcccggccagccccccagactgctgattcagctggcctccaatgtgcagaccggcgtgccagccagattttccggcagcggcagcagaaccgacttcaccctgaccatcagcagcgtggaacccgaggacttcgccgtgtactactgcctccagagccggaccatccccagaacattcggccagggcaccaagctggaaatcaagagactcgaggacctgaagaacgtgttcccacctgaggtggccgtgttcgagcctagcgaggccgagatcagccacacccagaaagccaccctcgtgtgcctggctaccggcttctaccccgaccatgtggaactgtcttggtgggtcaacggcaaagaggtgcacagcggcgtgtgtaccgacccccagccactgaaagaacagcccgccctgaacgacagccggtactgcctgagcagcagactgagagtgtccgccaccttctggcagaacccccggaaccacttcagatgccaggtgcagttctacggcctgagcgagaacgacgagtggacccaggacagagccaagcccgtgacccagatcgtgtctgccgaagcctggggcagagccgattgcggctttaccagcgagagctaccagcagggcgtgctgagcgccaccaacctgagcgtgatcggcttcagaatcctgctgctgaaagtggccggctttaacctgctgatgaccctgcggctgtggtccagcagggccaagcgatctggatctggagcaacaaacttctcactactcaaacaagcaggtgacgtggaggagaatcccgggcctactagtatggactggatttggcgcatccttttccttgtcggcgctgctaccggcgcgcattccttcgaacaggtgcagctggtgcagtctggccccgaagtgaagaaacccggcgagtccgtgaagatcagctgcaaggccagcggctacaccttccggcactacagcatgaactgggtcaagcaggccccaggccagggcctgaagtggatgggcagaatcaacaccgagagcggcgtgcccatctacgccgacgacttcaagggccggttcagcttcaccgtggacaccagcgccagcaccgcctacctggaaatctccagcctgaccagcgaggataccgccgtgtatttctgctccaacgactacctgtacagcctggatttctggggccagggaaccaccctgacagtgtcctctacgcgtatccagaaccctgatcctgccgtgtaccagctgcgggatagcaagagcagcgacaagagcgtgtgtctgttcaccgacttcgacagccagaccaacgtgtcccagagcaaggactccgacgtgtacatcaccgataagtgcgtgctggacatgcggagcatggacttcaagagcaactccgccgtggcctggtccaacaagtccgatttcgcctgcgccaacgccttcaacaacagcattatccccgaggacacattcttcccaagccccgagagcagctgcgacgtgaagctggtggaaaagagcttcgagacagacaccaacctgaacttccagatcctgtacgagatcctgctgggcaaggccaccctgtacgccgtgctggtgtctgccctggtgctgatggctatggtcaagcggaaggacagccgggga

SEQ ID NO: 4976 - DNA, 1869 bp, synthetic construct
  source 1..1869: mol_type = other DNA
atggccttaccagtgaccgccttgctcctgccgctggccttgctgctccacgccgccaggccgcagtctgtgctgacacagcctcctagtgtgtctggcgctcctggacagagagtgaccatcagctgtacaggcagcagcagcaatatcggagccggctttgacgtgcactggtatcagcagctgcctggcacagcccctaaactgctgatctacggcaacagcaacagacccagcggcgtgcccgatagattttccggctctaagagcggcacaagcgccagcctggctattactggactccaggccgaggacgaggccgactactactgtcagagctacgacagcagcctgagcggctacgttttcggcaccggcaccaaagtgacagtgcttggtctcgaggacctgaagaacgtgttcccacctgaggtggccgtgttcgagcctagcgaggccgagatcagccacacccagaaagccaccctcgtgtgcctggctaccggcttctaccccgaccatgtggaactgtcttggtgggtcaacggcaaagaggtgcacagcggcgtgtgtaccgacccccagccactgaaagaacagcccgccctgaacgacagccggtactgcctgagcagcagactgagagtgtccgccaccttctggcagaacccccggaaccacttcagatgccaggtgcagttctacggcctgagcgagaacgacgagtggacccaggacagagccaagcccgtgacccagatcgtgtctgccgaagcctggggcagagccgattgcggctttaccagcgagagctaccagcagggcgtgctgagcgccaccaacctgagcgtgatcggcttcagaatcctgctgctgaaagtggccggctttaacctgctgatgaccctgcggctgtggtccagcagggccaagcgatctggatctggagcaacaaacttctcactactcaaacaagcaggtgacgtggaggagaatcccgggcctactagtatggactggatttggcgcatccttttccttgtcggcgctgctaccggcgcgcattccttcgaacaagttcagctggttcagagcggagccgaagtgaagaaacctggggcctctgtgaaggtgtcctgcaaggcttccggctacacctttaccgattactacatgcactgggtccgacaggctcccggccaaagacttgaatggatgggctggatcaaccccaacagcggcggcacaaattacgcccagaagttccaggaccggatcaccgtgaccagagacaccagctccaacaccggctacatggaactgacccggctgagatccgatgacaccgccgtgtactactgcgctagaagcccttactccggcgtgctggataagtggggacagggcacactggtcaccgtgtcatctacgcgtatccagaaccctgatcctgccgtgtaccagctgcgggatagcaagagcagcgacaagagcgtgtgtctgttcaccgacttcgacagccagaccaacgtgtcccagagcaaggactccgacgtgtacatcaccgataagtgcgtgctggacatgcggagcatggacttcaagagcaactccgccgtggcctggtccaacaagtccgatttcgcctgcgccaacgccttcaacaacagcattatccccgaggacacattcttcccaagccccgagagcagctgcgacgtgaagctggtggaaaagagcttcgagacagacaccaacctgaacttccagatcctgtacgagatcctgctgggcaaggccaccctgtacgccgtgctggtgtctgccctggtgctgatggctatggtcaagcggaaggacagccgggga

SEQ ID NO: 4977 - DNA, 1860 bp, synthetic construct
  source 1..1860: mol_type = other DNA
atggccttaccagtgaccgccttgctcctgccgctggccttgctgctccacgccgccaggccgcaggctgttctgacacagcctccatctgcctctggcacacctggacagagagtgaccatctcctgtagcggcagcagcagcaacatcggcagctacaccgtgtcctggtatcagcagctccctggaacagcccctaagttcctgatctacagcaacaaccagcggcctagcggcgtgcccgatagattttctggcagcaagagcggcacaagcgccagcctggctatttctggactccagtctgaggacgaggccgactactattgtgccgcctgggacgatagcctgaacggctatgtgtttggcaccggcaccaaagtgacagtgcttggtctcgaggacctgaagaacgtgttcccacctgaggtggccgtgttcgagcctagcgaggccgagatcagccacacccagaaagccaccctcgtgtgcctggctaccggcttctaccccgaccatgtggaactgtcttggtgggtcaacggcaaagaggtgcacagcggcgtgtgtaccgacccccagccactgaaagaacagcccgccctgaacgacagccggtactgcctgagcagcagactgagagtgtccgccaccttctggcagaacccccggaaccacttcagatgccaggtgcagttctacggcctgagcgagaacgacgagtggacccaggacagagccaagcccgtgacccagatcgtgtctgccgaagcctggggcagagccgattgcggctttaccagcgagagctaccagcagggcgtgctgagcgccaccaacctgagcgtgatcggcttcagaatcctgctgctgaaagtggccggctttaacctgctgatgaccctgcggctgtggtccagcagggccaagcgatctggatctggagcaacaaacttctcactactcaaacaagcaggtgacgtggaggagaatcccgggcctactagtatggactggatttggcgcatccttttccttgtcggcgctgctaccggcgcgcattccttcgaagttcaactggttcagagcggagccgaagtgaagaagcctggcgagagcctgaagattagctgcaaaggcagcggctacgacttcaccacctactggatcggctgggtccgacagatgcctggcaaaggactggaatggatgggcatcatctaccccggcgacagcgacaccagatacagccctagcgttagaggccgcgtgaccatcagcgccgacaagtctatcaacaccgcctacctccagtggtccagcctggaagcctctgacaccgccatgtactactgcgccagaatgtggaccttcagccaggatggatggggccagggaacactggtcacagtgtcatctacgcgtatccagaaccctgatcctgccgtgtaccagctgcgggatagcaagagcagcgacaagagcgtgtgtctgttcaccgacttcgacagccagaccaacgtgtcccagagcaaggactccgacgtgtacatcaccgataagtgcgtgctggacatgcggagcatggacttcaagagcaactccgccgtggcctggtccaacaagtccgatttcgcctgcgccaacgccttcaacaacagcattatccccgaggacacattcttcccaagccccgagagcagctgcgacgtgaagctggtggaaaagagcttcgagacagacaccaacctgaacttccagatcctgtacgagatcctgctgggcaaggccaccctgtacgccgtgctggtgtctgccctggtgctgatggctatggtcaagcggaaggacagccgggga

SEQ ID NO: 4978 - DNA, 1869 bp, synthetic construct
  source 1..1869: mol_type = other DNA
atggccttaccagtgaccgccttgctcctgccgctggccttgctgctccacgccgccaggccggacatcgtgatgacccagagccccgatagcctggccgtgtctctgggagagagagccaccatcaactgcaagagcagccagagcatcctgtacagcagcaaccagaagaactacctggcctggtatcagcagaagcccggccagagccctaagctgctgatctactgggccagcaccagagaaagcggcgtgcccgatagattcagcggcagcggctctggcaccgacttcaccctgaccatcagttctcttcaggccgaggacgtggccgtgtactactgccaccagtacatcagctcctacaccttcggccagggcaccaagctggaaatcaagctcgaggacctgaagaacgtgttcccacctgaggtggccgtgttcgagcctagcgaggccgagatcagccacacccagaaagccaccctcgtgtgcctggctaccggcttctaccccgaccatgtggaactgtcttggtgggtcaacggcaaagaggtgcacagcggcgtgtgtaccgacccccagccactgaaagaacagcccgccctgaacgacagccggtactgcctgagcagcagactgagagtgtccgccaccttctggcagaacccccggaaccacttcagatgccaggtgcagttctacggcctgagcgagaacgacgagtggacccaggacagagccaagcccgtgacccagatcgtgtctgccgaagcctggggcagagccgattgcggctttaccagcgagagctaccagcagggcgtgctgagcgccaccaacctgagcgtgatcggcttcagaatcctgctgctgaaagtggccggctttaacctgctgatgaccctgcggctgtggtccagcagggccaagcgatctggatctggagcaacaaacttctcactactcaaacaagcaggtgacgtggaggagaatcccgggcctactagtatggactggatttggcgcatccttttccttgtcggcgctgctaccggcgcgcattccttcgaacaggtgcagctggtgcagtctggcgctgaagtgaagaaacctggggccagcgtgaaggtgtcctgcaaggccagcggctacacctttgccagccagtggatgcactggatgagacaggcccctggacagggcctggaatggatcggctggatcaaccccggcaacgtgaacaccaagtacaacgagaagttcaagggcagagccaccctgacagtggacaccagcaccaacaccgcctacatggaactgagcagcctgcggagcgaggacaccgccgtgtattattgcgccagaagcacctggtacagacccctggattattggggccagggaacccttgtgaccgtgtcctctacgcgtatccagaaccctgatcctgccgtgtaccagctgcgggatagcaagagcagcgacaagagcgtgtgtctgttcaccgacttcgacagccagaccaacgtgtcccagagcaaggactccgacgtgtacatcaccgataagtgcgtgctggacatgcggagcatggacttcaagagcaactccgccgtggcctggtccaacaagtccgatttcgcctgcgccaacgccttcaacaacagcattatccccgaggacacattcttcccaagccccgagagcagctgcgacgtgaagctggtggaaaagagcttcgagacagacaccaacctgaacttccagatcctgtacgagatcctgctgggcaaggccaccctgtacgccgtgctggtgtctgccctggtgctgatggctatggtcaagcggaaggacagccgggga

SEQ ID NO: 4979 - DNA, 1869 bp, synthetic construct
  source 1..1869: mol_type = other DNA
atggccttaccagtgaccgccttgctcctgccgctggccttgctgctccacgccgccaggccggaccacatcgtgctgacccagagccctagcagcctgtctgccagcctgggcgacagagtgaccatcagctgtagagccagccaggacatcagcacctacctgaactggtatcagcagaaacccgacggcaccgtgaagctgctgatcttctacaccagcagactgcacgccggggtgcccagcagattttctggcagcggctctggcacccaccacagcctgaccatctccaacctggaacaggaagatattgctacctacttctgtcagcaaggcaacagcctgcccttcaccttcggcagcggcaccaagctggaaatcaagagactcgaggacctgaagaacgtgttcccacctgaggtggccgtgttcgagcctagcgaggccgagatcagccacacccagaaagccaccctcgtgtgcctggctaccggcttctaccccgaccatgtggaactgtcttggtgggtcaacggcaaagaggtgcacagcggcgtgtgtaccgacccccagccactgaaagaacagcccgccctgaacgacagccggtactgcctgagcagcagactgagagtgtccgccaccttctggcagaacccccggaaccacttcagatgccaggtgcagttctacggcctgagcgagaacgacgagtggacccaggacagagccaagcccgtgacccagatcgtgtctgccgaagcctggggcagagccgattgcggctttaccagcgagagctaccagcagggcgtgctgagcgccaccaacctgagcgtgatcggcttcagaatcctgctgctgaaagtggccggctttaacctgctgatgaccctgcggctgtggtccagcagggccaagcgatctggatctggagcaacaaacttctcactactcaaacaagcaggtgacgtggaggagaatcccgggcctactagtatggactggatttggcgcatccttttccttgtcggcgctgctaccggcgcgcattccttcgaacaggtgcagctgaaagagagcggccctgagctggaaaagcctggggccagcgtgaagattagctgcaaggccagcggctacagcttcaccgcctacagcatgaactgggtcaagcagaacaacggcatgagcctggaatggatcggcagcatcgacccctactacggcgacaccaaatacgcccagaagttcaagggcaaggccaccctgaccgtggataaggccagcagcaccgcctacctccagctgaagtctctgaccagcgaggacagcgccgtgtactactgcgccagacggatgattaccaccggcgactggtacttcgacgtgtggggagccggaaccaccgtgacagtgtctagcacgcgtatccagaaccctgatcctgccgtgtaccagctgcgggatagcaagagcagcgacaagagcgtgtgtctgttcaccgacttcgacagccagaccaacgtgtcccagagcaaggactccgacgtgtacatcaccgataagtgcgtgctggacatgcggagcatggacttcaagagcaactccgccgtggcctggtccaacaagtccgatttcgcctgcgccaacgccttcaacaacagcattatccccgaggacacattcttcccaagccccgagagcagctgcgacgtgaagctggtggaaaagagcttcgagacagacaccaacctgaacttccagatcctgtacgagatcctgctgggcaaggccaccctgtacgccgtgctggtgtctgccctggtgctgatggctatggtcaagcggaaggacagccgggga

SEQ ID NO: 4980 - DNA, 1869 bp, synthetic construct; identical to SEQ ID NO: 4979
  source 1..1869: mol_type = other DNA

SEQ ID NO: 4981 - DNA, 1869 bp, synthetic construct
  source 1..1869: mol_type = other DNA
atggccttaccagtgaccgccttgctcctgccgctggccttgctgctccacgccgccaggccggacgagatcgtgctgacacagagccctgccaccctgtctctgagccctggcgaaagagccaccctgagctgtagagccagccagagcgtgtccagctacctggcctggtatcagcagaagcccggccaggctccccggctgctgatctacgatgccagcaatagagccaccggcatccccgccagattttccggctctggcagcggcaccgacttcaccctgaccatcagctccctggaacccgaggacttcgccgtgtactactgccagcagcggagcaactggcccatcacattcggccagggcacccggctggaaatcaaactcgaggacctgaagaacgtgttcccacctgaggtggccgtgttcgagcctagcgaggccgagatcagccacacccagaaagccaccctcgtgtgcctggctaccggcttctaccccgaccatgtggaactgtcttggtgggtcaacggcaaagaggtgcacagcggcgtgtgtaccgacccccagccactgaaagaacagcccgccctgaacgacagccggtactgcctgagcagcagactgagagtgtccgccaccttctggcagaacccccggaaccacttcagatgccaggtgcagttctacggcctgagcgagaacgacgagtggacccaggacagagccaagcccgtgacccagatcgtgtctgccgaagcctggggcagagccgattgcggctttaccagcgagagctaccagcagggcgtgctgagcgccaccaacctgagcgtgatcggcttcagaatcctgctgctgaaagtggccggctttaacctgctgatgaccctgcggctgtggtccagcagggccaagcgatctggatctggagcaacaaacttctcactactcaaacaagcaggtgacgtggaggagaatcccgggcctactagtatggactggatttggcgcatccttttccttgtcggcgctgctaccggcgcgcattccttcgaagaagtgcagctggtggaatcaggcggcggactggtgcagcctggcagaagcctgagactgagctgtgccgccagcggcttcaccttcaacgactacgccatgcactgggtgcgccaggcccctggaaaaggactggaatgggtgtccacaatcagctggaacagcggcagcatcggctacgccgatagcgtgaagggccggttcaccatcagccgggacaacgccaagaagtccctgtacctccagatgaacagcctgcgggccgaggacacagccctgtactattgcgccaaggacatccagtacggcaactactactacggcatggacgtgtggggccagggaaccaccgtgaccgtgtcatctacgcgtatccagaaccctgatcctgccgtgtaccagctgcgggatagcaagagcagcgacaagagcgtgtgtctgttcaccgacttcgacagccagaccaacgtgtcccagagcaaggactccgacgtgtacatcaccgataagtgcgtgctggacatgcggagcatggacttcaagagcaactccgccgtggcctggtccaacaagtccgatttcgcctgcgccaacgccttcaacaacagcattatccccgaggacacattcttcccaagccccgagagcagctgcgacgtgaagctggtggaaaagagcttcgagacagacaccaacctgaacttccagatcctgtacgagatcctgctgggcaaggccaccctgtacgccgtgctggtgtctgccctggtgctgatggctatggtcaagcggaaggacagccgggga

SEQ ID NO: 4982 - DNA, 1875 bp, synthetic construct
  source 1..1875: mol_type = other DNA
atggccttaccagtgaccgccttgctcctgccgctggccttgctgctccacgccgccaggccggacatcgtgatgacccagacccccctgagcctgcctgtgacacctggcgagcctgccagcatctcctgcagaagcagcaagagcctgctgcacagcaacggcatcacctacctgtactggtatctgcagaaacccggccagagcccccaactgctgatctaccagatgagcaacctggtgtccggcgtgcccgacagattttctggcagcggctccggcaccgacttcaccctgaagatcagccgggtggaagccgaggacgtgggcgtgtactactgcgcccagaacctggaactgccctacacctttggcggcggaacaaaggtggaaatcaagcggctcgaggacctgaagaacgtgttcccacctgaggtggccgtgttcgagcctagcgaggccgagatcagccacacccagaaagccaccctcgtgtgcctggctaccggcttctaccccgaccatgtggaactgtcttggtgggtcaacggcaaagaggtgcacagcggcgtgtgtaccgacccccagccactgaaagaacagcccgccctgaacgacagccggtactgcctgagcagcagactgagagtgtccgccaccttctggcagaacccccggaaccacttcagatgccaggtgcagttctacggcctgagcgagaacgacgagtggacccaggacagagccaagcccgtgacccagatcgtgtctgccgaagcctggggcagagccgattgcggctttaccagcgagagctaccagcagggcgtgctgagcgccaccaacctgagcgtgatcggcttcagaatcctgctgctgaaagtggccggctttaacctgctgatgaccctgcggctgtggtccagcagggccaagcgatctggatctggagcaacaaacttctcactactcaaacaagcaggtgacgtggaggagaatcccgggcctactagtatggactggatttggcgcatccttttccttgtcggcgctgctaccggcgcgcattccttcgaacaggtgcaactggtgcagagcggagccgaagtgaaaaagcccggcagcagcgtgaaggtgtcctgcaaggccagcggctacgccttcagctactcctggatcaactgggtgcgccaggcccctggacagggcctggaatggatgggcagaatcttccccggcgacggcgacaccgactacaacggcaagttcaagggcagagtgaccatcaccgccgacaagagcaccagcaccgcctacatggaactgagcagcctgcggagcgaggataccgccgtgtactattgtgccagaaacgtgttcgacggctactggctggtgtactggggccagggaacacttgtgaccgtgtccagcacgcgtatccagaaccctgatcctgccgtgtaccagctgcgggatagcaagagcagcgacaagagcgtgtgtctgttcaccgacttcgacagccagaccaacgtgtcccagagcaaggactccgacgtgtacatcaccgataagtgcgtgctggacatgcggagcatggacttcaagagcaactccgccgtggcctggtccaacaagtccgatttcgcctgcgccaacgccttcaacaacagcattatccccgaggacacattcttcccaagccccgagagcagctgcgacgtgaagctggtggaaaagagcttcgagacagacaccaacctgaacttccagatcctgtacgagatcctgctgggcaaggccaccctgtacgccgtgctggtgtctgccctggtgctgatggctatggtcaagcggaaggacagccgggga

SEQ ID NO: 4983 - DNA, 1878 bp, synthetic construct
  source 1..1878: mol_type = other DNA
atggccttaccagtgaccgccttgctcctgccgctggccttgctgctccacgccgccaggccggacatccagatgacccagagccccagcagcctgtctgccagcgtgggcgacagagtgaccatcacctgtcggagcagccagagcatcgtgcactccgtgggcaacaccttcctggaatggtatcagcagaagcccggcaaggcccccaagctgctgatctacaaggtgtccaacagattcagcggcgtgcccagcaggtttagcggctctggcagcggcaccgacttcaccctgaccatctctagcctccagcccgaggacttcgccacctactactgttttcaaggcagccagttcccctacaccttcggccagggaacaaaggtggaaatcaagcggctcgaggacctgaagaacgtgttcccacctgaggtggccgtgttcgagcctagcgaggccgagatcagccacacccagaaagccaccctcgtgtgcctggctaccggcttctaccccgaccatgtggaactgtcttggtgggtcaacggcaaagaggtgcacagcggcgtgtgtaccgacccccagccactgaaagaacagcccgccctgaacgacagccggtactgcctgagcagcagactgagagtgtccgccaccttctggcagaacccccggaaccacttcagatgccaggtgcagttctacggcctgagcgagaacgacgagtggacccaggacagagccaagcccgtgacccagatcgtgtctgccgaagcctggggcagagccgattgcggctttaccagcgagagctaccagcagggcgtgctgagcgccaccaacctgagcgtgatcggcttcagaatcctgctgctgaaagtggccggctttaacctgctgatgaccctgcggctgtggtccagcagggccaagcgatctggatctggagcaacaaacttctcactactcaaacaagcaggtgacgtggaggagaatcccgggcctactagtatggactggatttggcgcatccttttccttgtcggcgctgctaccggcgcgcattccttcgaagaagtgcaactggtggaaagcggaggcggcctggtgcagcctggcggatctctgagactgagctgtgccgccagcggctacgagttcagccggtcctggatgaactgggtgcgccaggcccctggcaagggactggaatgggtgggaagaatctaccccggcgacggcgacaccaactacagcggcaagttcaagggccggttcaccatcagcgccgacaccagcaagaacaccgcctacctccagatgaacagcctgcgggccgaggataccgccgtgtactactgtgccagagatggcagctcctgggactggtacttcgacgtgtggggacagggaacccttgtgaccgtgtccagcacgcgtatccagaaccctgatcctgccgtgtaccagctgcgggatagcaagagcagcgacaagagcgtgtgtctgttcaccgacttcgacagccagaccaacgtgtcccagagcaaggactccgacgtgtacatcaccgataagtgcgtgctggacatgcggagcatggacttcaagagcaactccgccgtggcctggtccaacaagtccgatttcgcctgcgccaacgccttcaacaacagcattatccccgaggacacattcttcccaagccccgagagcagctgcgacgtgaagctggtggaaaagagcttcgagacagacaccaacctgaacttccagatcctgtacgagatcctgctgggcaaggccaccctgtacgccgtgctggtgtctgccctggtgctgatggctatggtcaagcggaaggacagccgggga

SEQ ID NO: 4984 - DNA, 1872 bp, synthetic construct
  source 1..1872: mol_type = other DNA
atggccttaccagtgaccgccttgctcctgccgctggccttgctgctccacgccgccaggccggacatccagatgacccagagccccagcagcctgtctgccagcgtgggcgacagagtgaccatcacctgtagagccagccagaccatctggtcctacctgaactggtatcagcagaggcccggcaaggcccccaacctgctgatctatgccgccagctctctccagagcggcgtgcccagcagattttccggcagaggcagcggcaccgacttcaccctgaccatcagttccttgcaggccgaggacttcgccacctactactgccagcagagctacagcatcccccagattttcggccagggcaccaagctggaaatcaagctcgaggacctgaagaacgtgttcccacctgaggtggccgtgttcgagcctagcgaggccgagatcagccacacccagaaagccaccctcgtgtgcctggctaccggcttctaccccgaccatgtggaactgtcttggtgggtcaacggcaaagaggtgcacagcggcgtgtgtaccgacccccagccactgaaagaacagcccgccctgaacgacagccggtactgcctgagcagcagactgagagtgtccgccaccttctggcagaacccccggaaccacttcagatgccaggtgcagttctacggcctgagcgagaacgacgagtggacccaggacagagccaagcccgtgacccagatcgtgtctgccgaagcctggggcagagccgattgcggctttaccagcgagagctaccagcagggcgtgctgagcgccaccaacctgagcgtgatcggcttcagaatcctgctgctgaaagtggccggctttaacctgctgatgaccctgcggctgtggtccagcagggccaagcgatctggatctggagcaacaaacttctcactactcaaacaagcaggtgacgtggaggagaatcccgggcctactagtatggactggatttggcgcatccttttccttgtcggcgctgctaccggcgcgcattccttcgaacaggtgcagctccagcagtctggacccggcctcgtgaagcctagccagacactgagcctgacctgcgccatcagcggcgatagcgtgtccagcaatagcgccgcctggaactggatcagacagtccccctctcggggcctggaatggctgggccggacctactaccgcagcaagtggtacaacgactacgccgtgtccgtgaagtcccggatcaccatcaaccccgacaccagcaagaaccagttctccttgcaactgaacagcgtgacccccgaggacaccgccgtgtactactgcgccagagaagtgaccggcgacctggaagatgccttcgacatctggggccagggaacaatggtcacagtgtccagcacgcgtatccagaaccctgatcctgccgtgtaccagctgcgggatagcaagagcagcgacaagagcgtgtgtctgttcaccgacttcgacagccagaccaacgtgtcccagagcaaggactccgacgtgtacatcaccgataagtgcgtgctggacatgcggagcatggacttcaagagcaactccgccgtggcctggtccaacaagtccgatttcgcctgcgccaacgccttcaacaacagcattatccccgaggacacattcttcccaagccccgagagcagctgcgacgtgaagctggtggaaaagagcttcgagacagacaccaacctgaacttccagatcctgtacgagatcctgctgggcaaggccaccctgtacgccgtgctggtgtctgccctggtgctgatggctatggtcaagcggaaggacagccgggga

SEQ ID NO: 4985 - DNA, 1851 bp, synthetic construct
  source 1..1851: mol_type = other DNA
atggccttaccagtgaccgccttgctcctgccgctggccttgctgctccacgccgccaggccggacatccagatgacccagagccccgccaccatcgagaacacaagcctgtctgccagcgtgggcgacagagtgaccatcacctgtagagccagccagggcatcagctcttggctgacctggtatcagcagaagcccgagaaggcccccaagagcctgatctacgccgccagctctctgcagtctggcgtgcccagcagattttccggcagcggctctggcaccgacttcaccctgacaatcagcagcctgcagcccgaggacttcgccacctactactgccagcagtacgacagctaccccatcaccttcggccagggcacccggctggaaatcaagctcgaggacctgaagaacgtgttcccacctgaggtggccgtgttcgagcctagcgaggccgagatcagccacacccagaaagccaccctcgtgtgcctggctaccggcttctaccccgaccatgtggaactgtcttggtgggtcaacggcaaagaggtgcacagcggcgtgtgtaccgacccccagccactgaaagaacagcccgccctgaacgacagccggtactgcctgagcagcagactgagagtgtccgccaccttctggcagaacccccggaaccacttcagatgccaggtgcagttctacggcctgagcgagaacgacgagtggacccaggacagagccaagcccgtgacccagatcgtgtctgccgaagcctggggcagagccgattgcggctttaccagcgagagctaccagcagggcgtgctgagcgccaccaacctgagcgtgatcggcttcagaatcctgctgctgaaagtggccggctttaacctgctgatgaccctgcggctgtggtccagcagggccaagcgatctggatctggagcaacaaacttctcactactcaaacaagcaggtgacgtggaggagaatcccgggcctactagtatggactggatttggcgcatccttttccttgtcggcgctgctaccggcgcgcattccttcgaacaggtgcaactgcagcagtggggagccggactgctgaagcctagcgagacactgagcctgacctgcgccgtgtacggcggcagcttcagcgcctactattggagctggatcagacagccccctggcaagggcctggaatggatcggcgacatcaatcacggcggaggcaccaactacaaccccagcctgaagtcccgcgtgaccatctccgtggacaccagcaagaaccagttctccctgaagctgaacagcgtgacagccgccgacacagccgtgtactactgtgccagcctgaccgcctattggggccagggatctcttgtgaccgtgtccagcacgcgtatccagaaccctgatcctgccgtgtaccagctgcgggatagcaagagcagcgacaagagcgtgtgtctgttcaccgacttcgacagccagaccaacgtgtcccagagcaaggactccgacgtgtacatcaccgataagtgcgtgctggacatgcggagcatggacttcaagagcaactccgccgtggcctggtccaacaagtccgatttcgcctgcgccaacgccttcaacaacagcattatccccgaggacacattcttcccaagccccgagagcagctgcgacgtgaagctggtggaaaagagcttcgagacagacaccaacctgaacttccagatcctgtacgagatcctgctgggcaaggccaccctgtacgccgtgctggtgtctgccctggtgctgatggctatggtcaagcggaaggacagccgggga

SEQ ID NO: 4986 - DNA, 1866 bp, synthetic construct
  source 1..1866: mol_type = other DNA
atggccttaccagtgaccgccttgctcctgccgctggccttgctgctccacgccgccaggccggacgagatcgtgctgacccagagccctgatagcctggccgtgtctctgggcgagagagccaccatcaactgcaaggccagccagagcgtggacttcgacggcgacagctacctgaactggtatcagcagaagcccggccagccccccaaggtgctgatctatgccgccagcacactgcagagcggcgtgcccagcagattttctggcagcggctccggcaccgacttcaccctgaccatcaacagcctggaagccgaggacgccgccacctactactgccagcagagcaacgaggacccctggacctttggcggcggaacaaaggtggaaatcaagctcgaggacctgaagaacgtgttcccacctgaggtggccgtgttcgagcctagcgaggccgagatcagccacacccagaaagccaccctcgtgtgcctggctaccggcttctaccccgaccatgtggaactgtcttggtgggtcaacggcaaagaggtgcacagcggcgtgtgtaccgacccccagccactgaaagaacagcccgccctgaacgacagccggtactgcctgagcagcagactgagagtgtccgccaccttctggcagaacccccggaaccacttcagatgccaggtgcagttctacggcctgagcgagaacgacgagtggacccaggacagagccaagcccgtgacccagatcgtgtctgccgaagcctggggcagagccgattgcggctttaccagcgagagctaccagcagggcgtgctgagcgccaccaacctgagcgtgatcggcttcagaatcctgctgctgaaagtggccggctttaacctgctgatgaccctgcggctgtggtccagcagggccaagcgatctggatctggagcaacaaacttctcactactcaaacaagcaggtgacgtggaggagaatcccgggcctactagtatggactggatttggcgcatccttttccttgtcggcgctgctaccggcgcgcattccttcgaacaggtgcaactggtgcagtccggcgctgaagtgaagaaacctggggccagcgtgaaggtgtcctgcaaggtgtccggctacacctttaccgactactacattacctgggtgcgccaggcccctggacaggccctggaatggatgggctggatctaccccggcagcggcaacaccaagtacagccagaagttccagggcagattcgtgttcagcgtggacaccagcgccagcaccgcctacctgcaactgtctagcctgaaggccgaagataccgccgtgtactactgcgccaactacggcaactattggttcgcctattggggccagggaacccttgtgaccgtgtcctctacgcgtatccagaaccctgatcctgccgtgtaccagctgcgggatagcaagagcagcgacaagagcgtgtgtctgttcaccgacttcgacagccagaccaacgtgtcccagagcaaggactccgacgtgtacatcaccgataagtgcgtgctggacatgcggagcatggacttcaagagcaactccgccgtggcctggtccaacaagtccgatttcgcctgcgccaacgccttcaacaacagcattatccccgaggacacattcttcccaagccccgagagcagctgcgacgtgaagctggtggaaaagagcttcgagacagacaccaacctgaacttccagatcctgtacgagatcctgctgggcaaggccaccctgtacgccgtgctggtgtctgccctggtgctgatggctatggtcaagcggaaggacagccgggga

SEQ ID NO: 4987 - DNA, 1857 bp, synthetic construct
  source 1..1857: mol_type = other DNA
atggccttaccagtgaccgccttgctcctgccgctggccttgctgctccacgccgccaggccggacatccagatgacccagagccccagcagcctgtctgccagcgtgggcgacagagtgaccatcacctgtagagccagccagggcatcagctcttggctggcctggtatcagcagaagcccgagaaggcccccaagagcctgatctacgccgcctctagtctccagagcggcgtgcccagcagattttctggcagcggctccggcaccgacttcaccctgacaatcagctccctccagcccgaggacttcgccacctactactgccagcagtacaacagctaccctcccacctttggcggaggcaccaaggtggaaatcaagctcgaggacctgaagaacgtgttcccacctgaggtggccgtgttcgagcctagcgaggccgagatcagccacacccagaaagccaccctcgtgtgcctggctaccggcttctaccccgaccatgtggaactgtcttggtgggtcaacggcaaagaggtgcacagcggcgtgtgtaccgacccccagccactgaaagaacagcccgccctgaacgacagccggtactgcctgagcagcagactgagagtgtccgccaccttctggcagaacccccggaaccacttcagatgccaggtgcagttctacggcctgagcgagaacgacgagtggacccaggacagagccaagcccgtgacccagatcgtgtctgccgaagcctggggcagagccgattgcggctttaccagcgagagctaccagcagggcgtgctgagcgccaccaacctgagcgtgatcggcttcagaatcctgctgctgaaagtggccggctttaacctgctgatgaccctgcggctgtggtccagcagggccaagcgatctggatctggagcaacaaacttctcactactcaaacaagcaggtgacgtggaggagaatcccgggcctactagtatggactggatttggcgcatccttttccttgtcggcgctgctaccggcgcgcattccttcgaagaagtgcaactggtgcagtctggcggagggctggtgcatcctgggggaagcctgagactgagctgtgccggctctggcttcgccttcagcagcagcaccatgcactggatcagacaggcccctggcaagggcctggaatggatcagcctgatcggaagcggagggggcatctactacggcgacagcgtgaagggccggttcaccatcagccgggacaacgccaagaacagcctgtacctccagatgaactccctgcgggccgaggacatggccgtgtactattgtgtgcggggctacttcgactgggtggactacttcgattactggggccagggcaccctcgtgaccgtgtcatctacgcgtatccagaaccctgatcctgccgtgtaccagctgcgggatagcaagagcagcgacaagagcgtgtgtctgttcaccgacttcgacagccagaccaacgtgtcccagagcaaggactccgacgtgtacatcaccgataagtgcgtgctggacatgcggagcatggacttcaagagcaactccgccgtggcctggtccaacaagtccgatttcgcctgcgccaacgccttcaacaacagcattatccccgaggacacattcttcccaagccccgagagcagctgcgacgtgaagctggtggaaaagagcttcgagacagacaccaacctgaacttccagatcctgtacgagatcctgctgggcaaggccaccctgtacgccgtgctggtgtctgccctggtgctgatggctatggtcaagcggaaggacagccgggga

SEQ ID NO: 4988 - DNA, 1887 bp, synthetic construct
  source 1..1887: mol_type = other DNA
atggccttaccagtgaccgccttgctcctgccgctggccttgctgctccacgccgccaggccggacgacatcgtgatgacacagtcaccagatagcctcaccgtctccctgggggagcggaccaccattaattgtaaatccagccaaagcgtgctggactcaagcaagaacaagaatagcctcgcctggtatcagcagaagcccggtcagcctccaaagctgctgctttcttgggcctccaccagagagtccgggattcctgataggtttagtggttcaggctccggcacagattttactctgaccattgattctctccagccagaggattctgcaacttattactgccagcaaagcgcccactttcctataacttttggccagggaacccgacttgaaatcaagctcgaggacctgaagaacgtgttcccacctgaggtggccgtgttcgagcctagcgaggccgagatcagccacacccagaaagccaccctcgtgtgcctggctaccggcttctaccccgaccatgtggaactgtcttggtgggtcaacggcaaagaggtgcacagcggcgtgtgtaccgacccccagccactgaaagaacagcccgccctgaacgacagccggtactgcctgagcagcagactgagagtgtccgccaccttctggcagaacccccggaaccacttcagatgccaggtgcagttctacggcctgagcgagaacgacgagtggacccaggacagagccaagcccgtgacccagatcgtgtctgccgaagcctggggcagagccgattgcggctttaccagcgagagctaccagcagggcgtgctgagcgccaccaacctgagcgtgatcggcttcagaatcctgctgctgaaagtggccggctttaacctgctgatgaccctgcggctgtggtccagcagggccaagcgatctggatctggagcaacaaacttctcactactcaaacaagcaggtgacgtggaggagaatcccgggcctactagtatggactggatttggcgcatccttttccttgtcggcgctgctaccggcgcgcattccttcgaacaggtgcagctggtgcagagcggtgccgaagtgaagaaaccaggtgcatccgttaaagtttcatgtaaggctagtggatataccttcaccaattacggaatgaactgggtgaaacaggcccctggccagggactgaagtggatggggtggattaacacctacaccggggagccgacttatgcagacgactttaaggggcgggtcacgatgacctccgacacctccaccagtaccgcctacctggagctgcacaaccttaggtcagacgataccgccgtgtattactgtgcccgatggtcttggtccgacggatactatgtctacttcgactattggggccaggggaccacagttaccgtgtcctctacgcgtatccagaaccctgatcctgccgtgtaccagctgcgggatagcaagagcagcgacaagagcgtgtgtctgttcaccgacttcgacagccagaccaacgtgtcccagagcaaggactccgacgtgtacatcaccgataagtgcgtgctggacatgcggagcatggacttcaagagcaactccgccgtggcctggtccaacaagtccgatttcgcctgcgccaacgccttcaacaacagcattatccccgaggacacattcttcccaagccccgagagcagctgcgacgtgaagctggtggaaaagagcttcgagacagacaccaacctgaacttccagatcctgtacgagatcctgctgggcaaggccaccctgtacgccgtgctggtgtctgccctggtgctgatggctatggtcaagcggaaggacagccgggga

SEQ ID NO: 4989 - DNA, 1875 bp, synthetic construct
  source 1..1875: mol_type = other DNA
atggccttaccagtgaccgccttgctcctgccgctggccttgctgctccacgccgccaggccggacgagatcgtgctgacacagagccctggaagcctggccgtgtctcctggcgagcgcgtgacaatgagctgcaagagcagccagagcgtgttcttcagcagctcccagaagaactacctggcctggtatcagcagatccccggccagagccccagactgctgatctactgggccagcaccagagaaagcggcgtgcccgatagattcaccggcagcggctctggcaccgacttcaccctgacaatcagcagcgtgcagcccgaggacctggctatctactactgccaccagtacctgagcagccggaccttcggccagggcaccaagctggaaatcaagagactcgaggacctgaagaacgtgttcccacctgaggtggccgtgttcgagcctagcgaggccgagatcagccacacccagaaagccaccctcgtgtgcctggctaccggcttctaccccgaccatgtggaactgtcttggtgggtcaacggcaaagaggtgcacagcggcgtgtgtaccgacccccagccactgaaagaacagcccgccctgaacgacagccggtactgcctgagcagcagactgagagtgtccgccaccttctggcagaacccccggaaccacttcagatgccaggtgcagttctacggcctgagcgagaacgacgagtggacccaggacagagccaagcccgtgacccagatcgtgtctgccgaagcctggggcagagccgattgcggctttaccagcgagagctaccagcagggcgtgctgagcgccaccaacctgagcgtgatcggcttcagaatcctgctgctgaaagtggccggctttaacctgctgatgaccctgcggctgtggtccagcagggccaagcgatctggatctggagcaacaaacttctcactactcaaacaagcaggtgacgtggaggagaatcccgggcctactagtatggactggatttggcgcatccttttccttgtcggcgctgctaccggcgcgcattccttcgaacaggtgcaactgcagcagcctggcgctgaggtcgtgaagccaggcgcttccgtgaagatgtcctgcaaggccagcggctacaccttcaccagctactacatccactggatcaagcagacccctggacagggcctggaatgggtgggagtgatctaccccggcaacgacgacatcagctacaaccagaagttccagggcaaggccaccctgaccgccgacaagtctagcaccaccgcctacatgcaactgtccagcctgaccagcgaggacagcgccgtgtactactgcgccagagaagtgcggctgcggtacttcgatgtgtggggccagggaaccaccgtgaccgtgtcatctacgcgtatccagaaccctgatcctgccgtgtaccagctgcgggatagcaagagcagcgacaagagcgtgtgtctgttcaccgacttcgacagccagaccaacgtgtcccagagcaaggactccgacgtgtacatcaccgataagtgcgtgctggacatgcggagcatggacttcaagagcaactccgccgtggcctggtccaacaagtccgatttcgcctgcgccaacgccttcaacaacagcattatccccgaggacacattcttcccaagccccgagagcagctgcgacgtgaagctggtggaaaagagcttcgagacagacaccaacctgaacttccagatcctgtacgagatcctgctgggcaaggccaccctgtacgccgtgctggtgtctgccctggtgctgatggctatggtcaagcggaaggacagccgggga

SEQ ID NO: 4990 - DNA, 1887 bp, synthetic construct
  source 1..1887: mol_type = other DNA
atggccttaccagtgaccgccttgctcctgccgctggccttgctgctccacgccgccaggccggatgtgctgctgacccagagccctctgagcctgcctgtgacactgggacagcctgccagcatctcctgtcggagcagccagaccatcgtgcacagcaacggcaacacctacctggaatggttccagcagcggccaggccagagccccagactgctgatctaccaggtgtccaacagattcagcggcgtgcccgacagattctccggcagcggctctggcaccgacttcaccctgaagatcagccgggtggaagccgaggacgtgggcgtgtactactgttttcaaggcagccacgtgccccggacctttggcggaggaacaaaggtggaaatcaagagagccctcgaggacctgaagaacgtgttcccacctgaggtggccgtgttcgagcctagcgaggccgagatcagccacacccagaaagccaccctcgtgtgcctggctaccggcttctaccccgaccatgtggaactgtcttggtgggtcaacggcaaagaggtgcacagcggcgtgtgtaccgacccccagccactgaaagaacagcccgccctgaacgacagccggtactgcctgagcagcagactgagagtgtccgccaccttctggcagaacccccggaaccacttcagatgccaggtgcagttctacggcctgagcgagaacgacgagtggacccaggacagagccaagcccgtgacccagatcgtgtctgccgaagcctggggcagagccgattgcggctttaccagcgagagctaccagcagggcgtgctgagcgccaccaacctgagcgtgatcggcttcagaatcctgctgctgaaagtggccggctttaacctgctgatgaccctgcggctgtggtccagcagggccaagcgatctggatctggagcaacaaacttctcactactcaaacaagcaggtgacgtggaggagaatcccgggcctactagtatggactggatttggcgcatccttttccttgtcggcgctgctaccggcgcgcattccttcgaacagatccaactggtgcagagcggcagcgagctgaagaaacctggggccagcgtgaaggtgtcctgcaaggccagcggctacacctttaccaactacggcatgaactgggtgcgccaggcccctggacagggcctgaaatggatgggctggatcaacaccaacaccggcgagcctaagtacgccgaagagttcaagggcagattcgccctgagcctggacaccagcgtgtccacagcctacctccagatcaacagcctgaaggccgaggataccgccgtgtacttctgcgccagaggctacggcaactacgccagaggggcttggctggcctattggggccagggaacactcgtgaccgtgtcctctacgcgtatccagaaccctgatcctgccgtgtaccagctgcgggatagcaagagcagcgacaagagcgtgtgtctgttcaccgacttcgacagccagaccaacgtgtcccagagcaaggactccgacgtgtacatcaccgataagtgcgtgctggacatgcggagcatggacttcaagagcaactccgccgtggcctggtccaacaagtccgatttcgcctgcgccaacgccttcaacaacagcattatccccgaggacacattcttcccaagccccgagagcagctgcgacgtgaagctggtggaaaagagcttcgagacagacaccaacctgaacttccagatcctgtacgagatcctgctgggcaaggccaccctgtacgccgtgctggtgtctgccctggtgctgatggctatggtcaagcggaaggacagccgggga

SEQ ID NO: 4991 - DNA, 1842 bp, synthetic construct
  source 1..1842: mol_type = other DNA
atggccttaccagtgaccgccttgctcctgccgctggccttgctgctccacgccgccaggccggacgagatcgtgctgacacagagccctgccacactctctctgagccctggcgaaagagccaccctgagctgtagcgccagcagcagcatcaactacatctactggctccagcagaagcccggccaggcccccagaatcctgatctacctgaccagcaacctggcctccggcgtgccagccagattttctggcagcggctccggcaccgacttcaccctgacaatcagcagcctggaacccgaggacttcgccgtgtactactgcctccagtggtccagcaaccccctgacctttggcggaggcaccaaggtggaaatcaagctcgaggacctgaagaacgtgttcccacctgaggtggccgtgttcgagcctagcgaggccgagatcagccacacccagaaagccaccctcgtgtgcctggctaccggcttctaccccgaccatgtggaactgtcttggtgggtcaacggcaaagaggtgcacagcggcgtgtgtaccgacccccagccactgaaagaacagcccgccctgaacgacagccggtactgcctgagcagcagactgagagtgtccgccaccttctggcagaacccccggaaccacttcagatgccaggtgcagttctacggcctgagcgagaacgacgagtggacccaggacagagccaagcccgtgacccagatcgtgtctgccgaagcctggggcagagccgattgcggctttaccagcgagagctaccagcagggcgtgctgagcgccaccaacctgagcgtgatcggcttcagaatcctgctgctgaaagtggccggctttaacctgctgatgaccctgcggctgtggtccagcagggccaagcgatctggatctggagcaacaaacttctcactactcaaacaagcaggtgacgtggaggagaatcccgggcctactagtatggactggatttggcgcatccttttccttgtcggcgctgctaccggcgcgcattccttcgaagaagtgcaactggtggaaagcgggggaggacttgtgaagcctggcggctctctgagactgagctgtgccgcctctggcttcaccttcagcagctacgacatgagctgggtgcgccaggctcctggcaagggactggaatgggtgtccaccatcagcagcggcggcagctacacctactacctggacagcatcaagggccggttcaccatctccagagacaacgccaagaacagcctgtacctccagatgaactccctgcgggccgaggacacagccgtgtattattgcgccagacagggcctggattactggggcagaggcacccttgtgaccgtgtcctctacgcgtatccagaaccctgatcctgccgtgtaccagctgcgggatagcaagagcagcgacaagagcgtgtgtctgttcaccgacttcgacagccagaccaacgtgtcccagagcaaggactccgacgtgtacatcaccgataagtgcgtgctggacatgcggagcatggacttcaagagcaactccgccgtggcctggtccaacaagtccgatttcgcctgcgccaacgccttcaacaacagcattatccccgaggacacattcttcccaagccccgagagcagctgcgacgtgaagctggtggaaaagagcttcgagacagacaccaacctgaacttccagatcctgtacgagatcctgctgggcaaggccaccctgtacgccgtgctggtgtctgccctggtgctgatggctatggtcaagcggaaggacagccgggga

SEQ ID NO: 4992 - DNA, 1869 bp, synthetic construct
  source 1..1869: mol_type = other DNA
atggccttaccagtgaccgccttgctcctgccgctggccttgctgctccacgccgccaggccggacatcgtgatgacccagagccccgatagcctggccgtgtctctgggagagagagccaccatcaactgccgggccagcaagagcgtgtccaccagcggctacagcttcatgcactggtatcagcagaagcccggccagccccccaagctgctgatctacctggcctccaacctggaaagcggcgtgcccgatagattcagcggcagcggctctggcaccgacttcaccctgaccatcagttctcttcaggccgaggacgtggccgtgtactactgccagcacagcagagaggtgccctggacattcggccagggcacaaaggtggaaatcaagcggctcgaggacctgaagaacgtgttcccacctgaggtggccgtgttcgagcctagcgaggccgagatcagccacacccagaaagccaccctcgtgtgcctggctaccggcttctaccccgaccatgtggaactgtcttggtgggtcaacggcaaagaggtgcacagcggcgtgtgtaccgacccccagccactgaaagaacagcccgccctgaacgacagccggtactgcctgagcagcagactgagagtgtccgccaccttctggcagaacccccggaaccacttcagatgccaggtgcagttctacggcctgagcgagaacgacgagtggacccaggacagagccaagcccgtgacccagatcgtgtctgccgaagcctggggcagagccgattgcggctttaccagcgagagctaccagcagggcgtgctgagcgccaccaacctgagcgtgatcggcttcagaatcctgctgctgaaagtggccggctttaacctgctgatgaccctgcggctgtggtccagcagggccaagcgatctggatctggagcaacaaacttctcactactcaaacaagcaggtgacgtggaggagaatcccgggcctactagtatggactggatttggcgcatccttttccttgtcggcgctgctaccggcgcgcattccttcgaacaggtgcagctggtgcagtctggggccgaagtgaagaaacctggggccagcgtgaaggtgtcctgcaaggccagcggatacacctttaccaactacggcatgaactgggtgcgccaggcccctggacagggcctggaatggatgggctggatcaacacctacaccggcgagcccacatacgccgacgccttcaagggcagattcgccttcagcctggacaccagcacctccaccgcctacctccagatcaacagcctgcggagcgacgacaccgccgtgtattattgcgccagagattacggcgactacgggatggactattggggccagggaaccaccgtgaccgtgtcctctacgcgtatccagaaccctgatcctgccgtgtaccagctgcgggatagcaagagcagcgacaagagcgtgtgtctgttcaccgacttcgacagccagaccaacgtgtcccagagcaaggactccgacgtgtacatcaccgataagtgcgtgctggacatgcggagcatggacttcaagagcaactccgccgtggcctggtccaacaagtccgatttcgcctgcgccaacgccttcaacaacagcattatccccgaggacacattcttcccaagccccgagagcagctgcgacgtgaagctggtggaaaagagcttcgagacagacaccaacctgaacttccagatcctgtacgagatcctgctgggcaaggccaccctgtacgccgtgctggtgtctgccctggtgctgatggctatggtcaagcggaaggacagccgggga

SEQ ID NO: 4993 - DNA, 1857 bp, synthetic construct
  source 1..1857: mol_type = other DNA
atggccttaccagtgaccgccttgctcctgccgctggccttgctgctccacgccgccaggccggacatcgtgatgacccagacccccctgaccctgagcgtgacaatcggacagcctgccagcatctcctgcaagagcagccagagcctgctggacagcgacggcaagacctacctgaactggctgctgcagaggccaggccagagccccgagagactgatctacctggtgtccaagctggactccggcgtgcccgatagattcacaggcagcggctccggcaccgacttcaccctgaagatcagccgggtggaagccgaggacctgggcgtgtactgttgttggcagggcacccacttcccttacaccttcggcggagggaccaaggtggaaatcaagggcctcgaggacctgaagaacgtgttcccacctgaggtggccgtgttcgagcctagcgaggccgagatcagccacacccagaaagccaccctcgtgtgcctggctaccggcttctaccccgaccatgtggaactgtcttggtgggtcaacggcaaagaggtgcacagcggcgtgtgtaccgacccccagccactgaaagaacagcccgccctgaacgacagccggtactgcctgagcagcagactgagagtgtccgccaccttctggcagaacccccggaaccacttcagatgccaggtgcagttctacggcctgagcgagaacgacgagtggacccaggacagagccaagcccgtgacccagatcgtgtctgccgaagcctggggcagagccgattgcggctttaccagcgagagctaccagcagggcgtgctgagcgccaccaacctgagcgtgatcggcttcagaatcctgctgctgaaagtggccggctttaacctgctgatgaccctgcggctgtggtccagcagggccaagcgatctggatctggagcaacaaacttctcactactcaaacaagcaggtgacgtggaggagaatcccgggcctactagtatggactggatttggcgcatccttttccttgtcggcgctgctaccggcgcgcattccttcgaacaggtgcaactgcagcagcctggcgctgaacttgtgcggccaggcgcctctgtgaagctgagctgtaaagccagcggctacaccttcaccagctactggatgaactgggtcaagcagcgcccaggccagggcctggaatggatcggaatgatcgaccccagcgacagcgagacacactacaaccacatcttcaaggacaaggccaccctgaccgtggacaagtccagcagcacagcctacctgcaactgtccagcctgaccagcgaggacagcgccgtgtactactgcgcccggaacctgtatctgtggggccagggaacaagcgtgaccgtgtctagcacgcgtatccagaaccctgatcctgccgtgtaccagctgcgggatagcaagagcagcgacaagagcgtgtgtctgttcaccgacttcgacagccagaccaacgtgtcccagagcaaggactccgacgtgtacatcaccgataagtgcgtgctggacatgcggagcatggacttcaagagcaactccgccgtggcctggtccaacaagtccgatttcgcctgcgccaacgccttcaacaacagcattatccccgaggacacattcttcccaagccccgagagcagctgcgacgtgaagctggtggaaaagagcttcgagacagacaccaacctgaacttccagatcctgtacgagatcctgctgggcaaggccaccctgtacgccgtgctggtgtctgccctggtgctgatggctatggtcaagcggaaggacagccgggga

SEQ ID NO: 4994 - DNA, 1881 bp, synthetic construct
  source 1..1881: mol_type = other DNA
atggccttaccagtgaccgccttgctcctgccgctggccttgctgctccacgccgccaggccggacatcgtgatgacccagagccccgatagcctggccgtgtctctgggagagagagccaccatcaactgcgagagcagccagagcctgctgaacagcggcaaccagaagaactacctgacctggtatcagcagaagcccggccagccccccaagcccctgatctattgggccagcaccagagaaagcggcgtgcccgatagattcagcggcagcggaagcggcaccgacttcaccctgaccatcagttctcttcaggccgaggacgtggccgtgtactactgccagaacgactacagctacccctacaccttcggccagggcaccaagctggaaatcaagagactcgaggacctgaagaacgtgttcccacctgaggtggccgtgttcgagcctagcgaggccgagatcagccacacccagaaagccaccctcgtgtgcctggctaccggcttctaccccgaccatgtggaactgtcttggtgggtcaacggcaaagaggtgcacagcggcgtgtgtaccgacccccagccactgaaagaacagcccgccctgaacgacagccggtactgcctgagcagcagactgagagtgtccgccaccttctggcagaacccccggaaccacttcagatgccaggtgcagttctacggcctgagcgagaacgacgagtggacccaggacagagccaagcccgtgacccagatcgtgtctgccgaagcctggggcagagccgattgcggctttaccagcgagagctaccagcagggcgtgctgagcgccaccaacctgagcgtgatcggcttcagaatcctgctgctgaaagtggccggctttaacctgctgatgaccctgcggctgtggtccagcagggccaagcgatctggatctggagcaacaaacttctcactactcaaacaagcaggtgacgtggaggagaatcccgggcctactagtatggactggatttggcgcatccttttccttgtcggcgctgctaccggcgcgcattccttcgaagaagtgcagctggtgcagtctggggccgaagtgaagaagcctggcgagagcctgaagatcagctgcaagggcagcggctacagcttcaccgactactacatgaagtgggccagacagatgcccggcaagggcctggaatggatgggcgacatcatccccagcaacggggccaccttctacaaccagaaattcaagggccaagtgaccatctccgccgacaagagcatcagcaccacctacctccagtggtccagcctgaaggccagcgacaccgccatgtactattgcgccagaagccatctgctgcgggccagttggttcgcctattggggccagggaacaatggtcacagtgtccagcacgcgtatccagaaccctgatcctgccgtgtaccagctgcgggatagcaagagcagcgacaagagcgtgtgtctgttcaccgacttcgacagccagaccaacgtgtcccagagcaaggactccgacgtgtacatcaccgataagtgcgtgctggacatgcggagcatggacttcaagagcaactccgccgtggcctggtccaacaagtccgatttcgcctgcgccaacgccttcaacaacagcattatccccgaggacacattcttcccaagccccgagagcagctgcgacgtgaagctggtggaaaagagcttcgagacagacaccaacctgaacttccagatcctgtacgagatcctgctgggcaaggccaccctgtacgccgtgctggtgtctgccctggtgctgatggctatggtcaagcggaaggacagccgggga

SEQ ID NO: 4995 - DNA, 1866 bp, synthetic construct
  source 1..1866: mol_type = other DNA
atggccttaccagtgaccgccttgctcctgccgctggccttgctgctccacgccgccaggccggacatccagatgacccagtctaccagttccctgagtgcatccctcggagacagggtgacgatcagttgcagcgcaagccaagggatcaataactatctgaactggtatcagcagaaaccggacggaacagtcgaactcctgatttattacaccagcacccttcagagtggcgtcccttcccggttcagtggctccggaagcgggaccgattactccctgaccatttctaatctggagccagaggacataggaacgtattattgccagcagtatagtaaactgccacgaacttttggaggggggacgaaactggagatcaaactcgaggacctgaagaacgtgttcccacctgaggtggccgtgttcgagcctagcgaggccgagatcagccacacccagaaagccaccctcgtgtgcctggctaccggcttctaccccgaccatgtggaactgtcttggtgggtcaacggcaaagaggtgcacagcggcgtgtgtaccgacccccagccactgaaagaacagcccgccctgaacgacagccggtactgcctgagcagcagactgagagtgtccgccaccttctggcagaacccccggaaccacttcagatgccaggtgcagttctacggcctgagcgagaacgacgagtggacccaggacagagccaagcccgtgacccagatcgtgtctgccgaagcctggggcagagccgattgcggctttaccagcgagagctaccagcagggcgtgctgagcgccaccaacctgagcgtgatcggcttcagaatcctgctgctgaaagtggccggctttaacctgctgatgaccctgcggctgtggtccagcagggccaagcgatctggatctggagcaacaaacttctcactactcaaacaagcaggtgacgtggaggagaatcccgggcctactagtatggactggatttggcgcatccttttccttgtcggcgctgctaccggcgcgcattccttcgaacaggtgcaactccagcagtccggaagcgagcttatgatgccaggggcatcagtgaagatcagctgcaaggctactggctacaccttctctaattactggatagagtgggttaaacaaaggccagggcacggcctggaatggatcggcgagatcctgcctgggacaggccgaaccatttataacgagaagttcaaaggcaaggctactttcaccgcagatataagctctaatacagtgcaaatgcagctctcttccctgacaagtgaggatagtgccgtgtattattgcgcacgaagagattactatggaaatttttattacgctatggattattggggtcaaggaacaagtgtgaccgttagcagcacgcgtatccagaaccctgatcctgccgtgtaccagctgcgggatagcaagagcagcgacaagagcgtgtgtctgttcaccgacttcgacagccagaccaacgtgtcccagagcaaggactccgacgtgtacatcaccgataagtgcgtgctggacatgcggagcatggacttcaagagcaactccgccgtggcctggtccaacaagtccgatttcgcctgcgccaacgccttcaacaacagcattatccccgaggacacattcttcccaagccccgagagcagctgcgacgtgaagctggtggaaaagagcttcgagacagacaccaacctgaacttccagatcctgtacgagatcctgctgggcaaggccaccctgtacgccgtgctggtgtctgccctggtgctgatggctatggtcaagcggaaggacagccgggga

SEQ ID NO: 4996 - DNA, 1851 bp, synthetic construct
  source 1..1851: mol_type = other DNA
atggccttaccagtgaccgccttgctcctgccgctggccttgctgctccacgccgccaggccggacatccagatgacccagagccctgccagcctgtccgtgtctgtgggcgagacagtgaccatcacctgtcgggccagcgagaacatctacagcaacctggcctggtatcagcagaagcagggcaagagcccccaactgctggtgtacgccgccaccaatctggccgatggcgtgcccagcagattttccggctctggcagcggcacccagtacagcctgaagatcaacagcctccagagcgaggacttcggcagctactactgccagcacttctggggcacctggacctttggaggaggcaccaccctggaaatcaagctcgaggacctgaagaacgtgttcccacctgaggtggccgtgttcgagcctagcgaggccgagatcagccacacccagaaagccaccctcgtgtgcctggctaccggcttctaccccgaccatgtggaactgtcttggtgggtcaacggcaaagaggtgcacagcggcgtgtgtaccgacccccagccactgaaagaacagcccgccctgaacgacagccggtactgcctgagcagcagactgagagtgtccgccaccttctggcagaacccccggaaccacttcagatgccaggtgcagttctacggcctgagcgagaacgacgagtggacccaggacagagccaagcccgtgacccagatcgtgtctgccgaagcctggggcagagccgattgcggctttaccagcgagagctaccagcagggcgtgctgagcgccaccaacctgagcgtgatcggcttcagaatcctgctgctgaaagtggccggctttaacctgctgatgaccctgcggctgtggtccagcagggccaagcgatctggatctggagcaacaaacttctcactactcaaacaagcaggtgacgtggaggagaatcccgggcctactagtatggactggatttggcgcatccttttccttgtcggcgctgctaccggcgcgcattccttcgaagaagtgcaactccagcagagcggccctgagcttgtgaagcctggcgcttccgtgaagatgagctgcaaggccagcggctacaccttcaccgactactacatgaagtggatgaagcagagccacggcaagtccctggaatggatcggcgacatcaaccccaacaacggcggcaccacctacaaccagaagttcaagggcaaggccaccctgaccgtggacaagagcagcagcaccgcctacatgcaactgaacagcctgaccagcgaggacagcgccgtgtactactgcgccagagactacggctacggctatttcgactactggggccagggcacaaccctgacagtgtcctctacgcgtatccagaaccctgatcctgccgtgtaccagctgcgggatagcaagagcagcgacaagagcgtgtgtctgttcaccgacttcgacagccagaccaacgtgtcccagagcaaggactccgacgtgtacatcaccgataagtgcgtgctggacatgcggagcatggacttcaagagcaactccgccgtggcctggtccaacaagtccgatttcgcctgcgccaacgccttcaacaacagcattatccccgaggacacattcttcccaagccccgagagcagctgcgacgtgaagctggtggaaaagagcttcgagacagacaccaacctgaacttccagatcctgtacgagatcctgctgggcaaggccaccctgtacgccgtgctggtgtctgccctggtgctgatggctatggtcaagcggaaggacagccgggga

SEQ ID NO: 4997 - DNA, 1860 bp, synthetic construct
  source 1..1860: mol_type = other DNA
atggccttaccagtgaccgccttgctcctgccgctggccttgctgctccacgccgccaggccggagatcgtgctgacacagagccctggcaccctgagcctgtctccaggcgaaagagccacactgagctgtcgggcctctcagagcgtgggaggctacctggcttggtatcagcagaagccaggccaggcccccagactgctgatctacgacgccagcaatcgggccacaggcatccccgccagattttctggcagcggctccggcaccgacttcaccctgacaatcagcagcctggaacccgaggacttcgccgtgtactactgccagcagcggaacaactggccccccatgtacacattcggccagggcaccaagctggaaatcaagagactcgaggacctgaagaacgtgttcccacctgaggtggccgtgttcgagcctagcgaggccgagatcagccacacccagaaagccaccctcgtgtgcctggctaccggcttctaccccgaccatgtggaactgtcttggtgggtcaacggcaaagaggtgcacagcggcgtgtgtaccgacccccagccactgaaagaacagcccgccctgaacgacagccggtactgcctgagcagcagactgagagtgtccgccaccttctggcagaacccccggaaccacttcagatgccaggtgcagttctacggcctgagcgagaacgacgagtggacccaggacagagccaagcccgtgacccagatcgtgtctgccgaagcctggggcagagccgattgcggctttaccagcgagagctaccagcagggcgtgctgagcgccaccaacctgagcgtgatcggcttcagaatcctgctgctgaaagtggccggctttaacctgctgatgaccctgcggctgtggtccagcagggccaagcgatctggatctggagcaacaaacttctcactactcaaacaagcaggtgacgtggaggagaatcccgggcctactagtatggactggatttggcgcatccttttccttgtcggcgctgctaccggcgcgcattccttcgaacaggtgcaactggtgcagagcggagccgaagtgaagaaacccggcagcagcgtgaaggtgtcctgcaaggcttccggcggcaccttcagcagctacgccatttcttgggtgcgccaggctcctggacagggcctggaatggatgggcggcatcatccctatcctgggcaccgccaactacgcccagaaattccagggcagagtgaccatcaccgccgacgagagcaccagcaccgcctacatggaactgagcagcctgcggagcgaggacacagccgtgtattattgcgccagatggggcggaggggccttcgacatttggggccagggaacaatggtcaccgtgtccagcacgcgtatccagaaccctgatcctgccgtgtaccagctgcgggatagcaagagcagcgacaagagcgtgtgtctgttcaccgacttcgacagccagaccaacgtgtcccagagcaaggactccgacgtgtacatcaccgataagtgcgtgctggacatgcggagcatggacttcaagagcaactccgccgtggcctggtccaacaagtccgatttcgcctgcgccaacgccttcaacaacagcattatccccgaggacacattcttcccaagccccgagagcagctgcgacgtgaagctggtggaaaagagcttcgagacagacaccaacctgaacttccagatcctgtacgagatcctgctgggcaaggccaccctgtacgccgtgctggtgtctgccctggtgctgatggctatggtcaagcggaaggacagccgggga

SEQ ID NO: 4998 - DNA, 1845 bp, synthetic construct
  source 1..1845: mol_type = other DNA
atggccttaccagtgaccgccttgctcctgccgctggccttgctgctccacgccgccaggccgcagatcgtgctgacacagagccctgccctgatgagcgccagccctggcgagaaagtgaccatgacctgtagcgccagcagcagcgtgcgctacatgtactggtatcagcagaagcccagaagcagccccaagccctggattcacctgaccagcaatctggcctctggcgtgcccgctagattttccggctctggcagcggcaccagctacagcctgaccatcagcagcatggaagccgaggacgccgccacctactactgccagcagtggtccagccaccccttcacatttggctccggcaccaagctggaaatcaagctcgaggacctgaagaacgtgttcccacctgaggtggccgtgttcgagcctagcgaggccgagatcagccacacccagaaagccaccctcgtgtgcctggctaccggcttctaccccgaccatgtggaactgtcttggtgggtcaacggcaaagaggtgcacagcggcgtgtgtaccgacccccagccactgaaagaacagcccgccctgaacgacagccggtactgcctgagcagcagactgagagtgtccgccaccttctggcagaacccccggaaccacttcagatgccaggtgcagttctacggcctgagcgagaacgacgagtggacccaggacagagccaagcccgtgacccagatcgtgtctgccgaagcctggggcagagccgattgcggctttaccagcgagagctaccagcagggcgtgctgagcgccaccaacctgagcgtgatcggcttcagaatcctgctgctgaaagtggccggctttaacctgctgatgaccctgcggctgtggtccagcagggccaagcgatctggatctggagcaacaaacttctcactactcaaacaagcaggtgacgtggaggagaatcccgggcctactagtatggactggatttggcgcatccttttccttgtcggcgctgctaccggcgcgcattccttcgaagatgtgcaactccaggaaagcggccctggccttgtgaagcctagccagagcctgtccctgacctgtaccgtgaccggcttcagcatcaccagcgactactcttggaactggatcagacagttccctggcaacaaactggaatggatgggctacatcagctactccggccacacctcctacaaccccagcctggaaagccggatctccatcaccagagacaccagcaagaaccagttcttcttgcaactgaacagcgtgaccaccgaggataccgccacatattactgtaccagaggcaactgggacgtggtgtactggggccagggcacacttgtgaccgtgtctgctacgcgtatccagaaccctgatcctgccgtgtaccagctgcgggatagcaagagcagcgacaagagcgtgtgtctgttcaccgacttcgacagccagaccaacgtgtcccagagcaaggactccgacgtgtacatcaccgataagtgcgtgctggacatgcggagcatggacttcaagagcaactccgccgtggcctggtccaacaagtccgatttcgcctgcgccaacgccttcaacaacagcattatccccgaggacacattcttcccaagccccgagagcagctgcgacgtgaagctggtggaaaagagcttcgagacagacaccaacctgaacttccagatcctgtacgagatcctgctgggcaaggccaccctgtacgccgtgctggtgtctgccctggtgctgatggctatggtcaagcggaaggacagccgggga

SEQ ID NO: 4999 - DNA, 1875 bp, synthetic construct
  source 1..1875: mol_type = other DNA
atggccttaccagtgaccgccttgctcctgccgctggccttgctgctccacgccgccaggccggacgtcgtgatgacccagagccctctgagcctgcctgtgacactgggacagcctgccagcatctcctgtcggagcagccagagcatcgtgcacagcgacggcaacacctacctggaatggtatcagcagcggccaggccagagccccagacggctgatctacaaggtgtccaacagattcagcggcgtgcccgacagattctccggcagcggctctggcaccgacttcaccctgaagatcagcagagtggaagccgaggacgtgggcgtgtactactgttttcaaggcagccacgccccctggacctttggcggaggaacaaaggtggaaatcaagctcgaggacctgaagaacgtgttcccacctgaggtggccgtgttcgagcctagcgaggccgagatcagccacacccagaaagccaccctcgtgtgcctggctaccggcttctaccccgaccatgtggaactgtcttggtgggtcaacggcaaagaggtgcacagcggcgtgtgtaccgacccccagccactgaaagaacagcccgccctgaacgacagccggtactgcctgagcagcagactgagagtgtccgccaccttctggcagaacccccggaaccacttcagatgccaggtgcagttctacggcctgagcgagaacgacgagtggacccaggacagagccaagcccgtgacccagatcgtgtctgccgaagcctggggcagagccgattgcggctttaccagcgagagctaccagcagggcgtgctgagcgccaccaacctgagcgtgatcggcttcagaatcctgctgctgaaagtggccggctttaacctgctgatgaccctgcggctgtggtccagcagggccaagcgatctggatctggagcaacaaacttctcactactcaaacaagcaggtgacgtggaggagaatcccgggcctactagtatggactggatttggcgcatccttttccttgtcggcgctgctaccggcgcgcattccttcgaagaagtgcaactggtggaatcaggcggcggactggtgcagcctggcggatctctgagactgagctgtgccgccagcggcttcaccttcagcagctacggaatgcactgggtgcgccaggcccctggcaaaggactggaatgggtggcctacatcaccaccagaagcagcaccatctactacgccgacagcgtgaagggccggttcaccatctccagagacaacgccaagaacagcctgtacctccagatgaactccctgcgggccgaggacaccgccgtgtactattgcaccagagagcccctgaccggctactacgctatggactattggggccagggcaccagcgtgaccgtgtctagtacgcgtatccagaaccctgatcctgccgtgtaccagctgcgggatagcaagagcagcgacaagagcgtgtgtctgttcaccgacttcgacagccagaccaacgtgtcccagagcaaggactccgacgtgtacatcaccgataagtgcgtgctggacatgcggagcatggacttcaagagcaactccgccgtggcctggtccaacaagtccgatttcgcctgcgccaacgccttcaacaacagcattatccccgaggacacattcttcccaagccccgagagcagctgcgacgtgaagctggtggaaaagagcttcgagacagacaccaacctgaacttccagatcctgtacgagatcctgctgggcaaggccaccctgtacgccgtgctggtgtctgccctggtgctgatggctatggtcaagcggaaggacagccgggga

SEQ ID NO: 5000 - DNA, 1851 bp, synthetic construct
  source 1..1851: mol_type = other DNA
atggccttaccagtgaccgccttgctcctgccgctggccttgctgctccacgccgccaggccggacatccagatgacccagagccccagcagcctgtctgccagcgtgggcgacagagtgaccatcacctgtagagccagccagagcatcagcctgtggctgaactggtatcagcagaagcccggcaaggcccccaagctgctgatctacgccgccagcacactccagagcggcgtgccaagcagattttccggcagcggctccggcaccgacttcaccctgacaatcagctccctccagcccgaggacttcgccacctactactgccagcagtactacaccagcccctacaccttcggccagggcaccaaggtggaaatcaagagactcgaggacctgaagaacgtgttcccacctgaggtggccgtgttcgagcctagcgaggccgagatcagccacacccagaaagccaccctcgtgtgcctggctaccggcttctaccccgaccatgtggaactgtcttggtgggtcaacggcaaagaggtgcacagcggcgtgtgtaccgacccccagccactgaaagaacagcccgccctgaacgacagccggtactgcctgagcagcagactgagagtgtccgccaccttctggcagaacccccggaaccacttcagatgccaggtgcagttctacggcctgagcgagaacgacgagtggacccaggacagagccaagcccgtgacccagatcgtgtctgccgaagcctggggcagagccgattgcggctttaccagcgagagctaccagcagggcgtgctgagcgccaccaacctgagcgtgatcggcttcagaatcctgctgctgaaagtggccggctttaacctgctgatgaccctgcggctgtggtccagcagggccaagcgatctggatctggagcaacaaacttctcactactcaaacaagcaggtgacgtggaggagaatcccgggcctactagtatggactggatttggcgcatccttttccttgtcggcgctgctaccggcgcgcattccttcgaacaggtgcaactgctggaatctggcggcggactggtgcagcctggcggatctctgagactgagctgtgccgccagcggcttcaccttcagcagctacgccatgagctgggtgcgccaggcccctggaaaaggactggaatgggtgtccgtgatccggtccagcggcagcagcacctattacgccgatagcgtgaagggccggttcaccatcagccgggacaacagcaagaacaccctgtacctccagatgaacagcctgcgggccgaggacaccgccgtgtactattgtgctaggggaggcggctacttcgactactggggccagggaacactcgtgaccgtgtcctctacgcgtatccagaaccctgatcctgccgtgtaccagctgcgggatagcaagagcagcgacaagagcgtgtgtctgttcaccgacttcgacagccagaccaacgtgtcccagagcaaggactccgacgtgtacatcaccgataagtgcgtgctggacatgcggagcatggacttcaagagcaactccgccgtggcctggtccaacaagtccgatttcgcctgcgccaacgccttcaacaacagcattatccccgaggacacattcttcccaagccccgagagcagctgcgacgtgaagctggtggaaaagagcttcgagacagacaccaacctgaacttccagatcctgtacgagatcctgctgggcaaggccaccctgtacgccgtgctggtgtctgccctggtgctgatggctatggtcaagcggaaggacagccgggga

SEQ ID NO: 5001 - DNA, 1860 bp, synthetic construct
  source 1..1860: mol_type = other DNA
atggccttaccagtgaccgccttgctcctgccgctggccttgctgctccacgccgccaggccggacatccagatgacccagagccccagcagcctgtctgccagcgtgggcgacagagtgaccatcacctgtagagccagccagagcatcagcagctacctgaactggtatcagcagaagcccggcaaggcccccaaactgctgatctacgccgtgtccacactccagagcggcgtgcccagcagattttctggcagcggctccggcaccgacttcaccctgacaatcagctccctccagcccgaggacttcgccacctactactgtcagcagagcggcaccttccctcccaccacatttggacagggcaccaaggtggaaatcaagagactcgaggacctgaagaacgtgttcccacctgaggtggccgtgttcgagcctagcgaggccgagatcagccacacccagaaagccaccctcgtgtgcctggctaccggcttctaccccgaccatgtggaactgtcttggtgggtcaacggcaaagaggtgcacagcggcgtgtgtaccgacccccagccactgaaagaacagcccgccctgaacgacagccggtactgcctgagcagcagactgagagtgtccgccaccttctggcagaacccccggaaccacttcagatgccaggtgcagttctacggcctgagcgagaacgacgagtggacccaggacagagccaagcccgtgacccagatcgtgtctgccgaagcctggggcagagccgattgcggctttaccagcgagagctaccagcagggcgtgctgagcgccaccaacctgagcgtgatcggcttcagaatcctgctgctgaaagtggccggctttaacctgctgatgaccctgcggctgtggtccagcagggccaagcgatctggatctggagcaacaaacttctcactactcaaacaagcaggtgacgtggaggagaatcccgggcctactagtatggactggatttggcgcatccttttccttgtcggcgctgctaccggcgcgcattccttcgaacaggtgcaactgctggaatctggcggcggactggtgcagcctggcggatctctgagactgagctgtgccgccagcggcttcaccttcagcagccacggaatgcactgggtgcgccaggcccctggaaagggactggaatgggtgtccgtgatctccggcagcggcagcaataccggctacgccgatagcgtgaagggccggttcaccatcagccgggacaacagcaagaacaccctgtacctccagatgaacagcctgcgggccgaggacaccgccgtgtactattgtgccagacagtggggcagctacgccttcgattcttggggccagggcaccctcgtgaccgtgtcatctacgcgtatccagaaccctgatcctgccgtgtaccagctgcgggatagcaagagcagcgacaagagcgtgtgtctgttcaccgacttcgacagccagaccaacgtgtcccagagcaaggactccgacgtgtacatcaccgataagtgcgtgctggacatgcggagcatggacttcaagagcaactccgccgtggcctggtccaacaagtccgatttcgcctgcgccaacgccttcaacaacagcattatccccgaggacacattcttcccaagccccgagagcagctgcgacgtgaagctggtggaaaagagcttcgagacagacaccaacctgaacttccagatcctgtacgagatcctgctgggcaaggccaccctgtacgccgtgctggtgtctgccctggtgctgatggctatggtcaagcggaaggacagccgggga

SEQ ID NO: 5002 - DNA, 1890 bp, synthetic construct
  source 1..1890: mol_type = other DNA
atggccttaccagtgaccgccttgctcctgccgctggccttgctgctccacgccgccaggccggacatcgtgatgagccagagccctagcagcctggccgtgtccgtgggcgagaaagtgaccatgagctgcaagagcagccagtccctgctgcacagcagcaaccagaagaactacctggcctggtatcagcagaagcccggccagtcccccaaggtgctgatctactgggccagcaccagagaaagcggcgtgcccgatagattcaccggcagcggctctggcaccgacttcaccctgaccatcaccagcgtgaagtccgaggacctggctgtgtactactgccagcagtattacagctacccctggaccttcggcggaggcacccggctggaaatcaaaagactcgaggacctgaagaacgtgttcccacctgaggtggccgtgttcgagcctagcgaggccgagatcagccacacccagaaagccaccctcgtgtgcctggctaccggcttctaccccgaccatgtggaactgtcttggtgggtcaacggcaaagaggtgcacagcggcgtgtgtaccgacccccagccactgaaagaacagcccgccctgaacgacagccggtactgcctgagcagcagactgagagtgtccgccaccttctggcagaacccccggaaccacttcagatgccaggtgcagttctacggcctgagcgagaacgacgagtggacccaggacagagccaagcccgtgacccagatcgtgtctgccgaagcctggggcagagccgattgcggctttaccagcgagagctaccagcagggcgtgctgagcgccaccaacctgagcgtgatcggcttcagaatcctgctgctgaaagtggccggctttaacctgctgatgaccctgcggctgtggtccagcagggccaagcgatctggatctggagcaacaaacttctcactactcaaacaagcaggtgacgtggaggagaatcccgggcctactagtatggactggatttggcgcatccttttccttgtcggcgctgctaccggcgcgcattccttcgaagaagtgcaactccagcagagcgtggccgagcttgtgaagcctggcgcttccgtgaagatgtcctgcaaggtgtccggctacaccctgacagaccacaccatccactggatgaagcagcggcctgagcagggcctggaatggatcggctacatctaccccagggacggcatcaccggctacaacgagaagttcaagggcaaggccacactgaccgccgacaccagcagcagcacagcctacatgcaactgaacagcctgaccagcgaggacagcgccgtgtacttctgtgccagatggggctacagctacagaaactacgcctactactacgactactggggccagggcacaaccctgaccgtgtctagtacgcgtatccagaaccctgatcctgccgtgtaccagctgcgggatagcaagagcagcgacaagagcgtgtgtctgttcaccgacttcgacagccagaccaacgtgtcccagagcaaggactccgacgtgtacatcaccgataagtgcgtgctggacatgcggagcatggacttcaagagcaactccgccgtggcctggtccaacaagtccgatttcgcctgcgccaacgccttcaacaacagcattatccccgaggacacattcttcccaagccccgagagcagctgcgacgtgaagctggtggaaaagagcttcgagacagacaccaacctgaacttccagatcctgtacgagatcctgctgggcaaggccaccctgtacgccgtgctggtgtctgccctggtgctgatggctatggtcaagcggaaggacagccgggga

SEQ ID NO: 5003 - DNA, 1881 bp, synthetic construct
  source 1..1881: mol_type = other DNA
atggccttaccagtgaccgccttgctcctgccgctggccttgctgctccacgccgccaggccggagatcgtgctgacacagagccctggcaccctgagcctgtctccaggcgaaagagccacactgagctgtcgggccagccagagcgtgtccagctcttacctggcctggtatcagcagaagcccggccaggctccccggctgctgatctacggaacaagcagcagagccaccggcatccccgacagattttctggcagcggctccggcaccgacttcaccctgacaatcagcagactggaacccgaggacttcgccgtgtactactgccagcagtacggcagcagccccttcacctttggcggaggcaccaaggtggaaatcaagagactcgaggacctgaagaacgtgttcccacctgaggtggccgtgttcgagcctagcgaggccgagatcagccacacccagaaagccaccctcgtgtgcctggctaccggcttctaccccgaccatgtggaactgtcttggtgggtcaacggcaaagaggtgcacagcggcgtgtgtaccgacccccagccactgaaagaacagcccgccctgaacgacagccggtactgcctgagcagcagactgagagtgtccgccaccttctggcagaacccccggaaccacttcagatgccaggtgcagttctacggcctgagcgagaacgacgagtggacccaggacagagccaagcccgtgacccagatcgtgtctgccgaagcctggggcagagccgattgcggctttaccagcgagagctaccagcagggcgtgctgagcgccaccaacctgagcgtgatcggcttcagaatcctgctgctgaaagtggccggctttaacctgctgatgaccctgcggctgtggtccagcagggccaagcgatctggatctggagcaacaaacttctcactactcaaacaagcaggtgacgtggaggagaatcccgggcctactagtatggactggatttggcgcatccttttccttgtcggcgctgctaccggcgcgcattccttcgaacaggtgcaactccaggaatctggccccggactggctaagcccagcgagacactgagcctgacctgtaccgtgtccggcgacagcatcaccagctactactggtcctggatcagacagccccctggcaagggcctggaatggatcggctacatctactacagcggcagcaccaactacaaccccagcctgaagtccagagtgaccatcagcgtggacaccagcaagaaccagttctccctgaagctgagcagcgtgacagccgccgacaccgccgtgtattattgcgccagagatcagcggagaatcgccgctgccggcacccacttttacggcatggatgtgtggggccagggcaccaccgtgaccgtgtcatctacgcgtatccagaaccctgatcctgccgtgtaccagctgcgggatagcaagagcagcgacaagagcgtgtgtctgttcaccgacttcgacagccagaccaacgtgtcccagagcaaggactccgacgtgtacatcaccgataagtgcgtgctggacatgcggagcatggacttcaagagcaactccgccgtggcctggtccaacaagtccgatttcgcctgcgccaacgccttcaacaacagcattatccccgaggacacattcttcccaagccccgagagcagctgcgacgtgaagctggtggaaaagagcttcgagacagacaccaacctgaacttccagatcctgtacgagatcctgctgggcaaggccaccctgtacgccgtgctggtgtctgccctggtgctgatggctatggtcaagcggaaggacagccgggga

SEQ ID NO: 5004 - DNA, 1857 bp, synthetic construct
  source 1..1857: mol_type = other DNA
atggccttaccagtgaccgccttgctcctgccgctggccttgctgctccacgccgccaggccggacatcctgctgacccagagccccgtgatcctgtccgtgtctcctggcgagagagtgtccttcagctgtcgggccagccagagcatcggcaccaacatccactggtatcagcagcggaccaacggcagccccagactgctgattaagtacgccagcgagtccatcagcggcatccccagcagattttccggcagcggctccggcaccgacttcaccctgagcatcaacagcgtggaaagcgaggacattgccgactactactgccagcagaacaacaactggcccaccaccttcggagccggcaccaagctggaactgaagctcgaggacctgaagaacgtgttcccacctgaggtggccgtgttcgagcctagcgaggccgagatcagccacacccagaaagccaccctcgtgtgcctggctaccggcttctaccccgaccatgtggaactgtcttggtgggtcaacggcaaagaggtgcacagcggcgtgtgtaccgacccccagccactgaaagaacagcccgccctgaacgacagccggtactgcctgagcagcagactgagagtgtccgccaccttctggcagaacccccggaaccacttcagatgccaggtgcagttctacggcctgagcgagaacgacgagtggacccaggacagagccaagcccgtgacccagatcgtgtctgccgaagcctggggcagagccgattgcggctttaccagcgagagctaccagcagggcgtgctgagcgccaccaacctgagcgtgatcggcttcagaatcctgctgctgaaagtggccggctttaacctgctgatgaccctgcggctgtggtccagcagggccaagcgatctggatctggagcaacaaacttctcactactcaaacaagcaggtgacgtggaggagaatcccgggcctactagtatggactggatttggcgcatccttttccttgtcggcgctgctaccggcgcgcattccttcgaacaggtgcagctgaagcagagcggacctggcctggtgcagcctagccagagcctgtccatcacctgtaccgtgtccggcttcagcctgaccaactacggcgtgcactgggtgcgccagagccctggaaaaggactggaatggctgggagtgatttggagcggcggcaacaccgactacaacacccccttcaccagcagactgtctatcaacaaggacaacagcaagagccaggtgttcttcaagatgaacagcctccagagcaacgacaccgccatctactactgtgctagagccctgacctactatgactacgagttcgcctactggggccagggcacactcgtgacagtgtctgctacgcgtatccagaaccctgatcctgccgtgtaccagctgcgggatagcaagagcagcgacaagagcgtgtgtctgttcaccgacttcgacagccagaccaacgtgtcccagagcaaggactccgacgtgtacatcaccgataagtgcgtgctggacatgcggagcatggacttcaagagcaactccgccgtggcctggtccaacaagtccgatttcgcctgcgccaacgccttcaacaacagcattatccccgaggacacattcttcccaagccccgagagcagctgcgacgtgaagctggtggaaaagagcttcgagacagacaccaacctgaacttccagatcctgtacgagatcctgctgggcaaggccaccctgtacgccgtgctggtgtctgccctggtgctgatggctatggtcaagcggaaggacagccgggga

SEQ ID NO: 5005 - DNA, 1836 bp, synthetic construct
  source 1..1836: mol_type = other DNA
atggccttaccagtgaccgccttgctcctgccgctggccttgctgctccacgccgccaggccgatgacccagagccccaagttcctgctggtgtctgccggcgacagagtgaccctgacatgcaaggccagccagagcgtgaacaacgacgtgtactggtatcagcaggaacccggccagtcccccaagctgctgatctactgggccagcaccagagaaagcggcgtgcccgatagattcaccggcagcggctctggcaccgacttcaccctgacaatcagcagcgtgcaggccgaggacctggccgtgtactactgcaagcagagctacaacctgtacaccttcggcggaggcaccaagctggaaatcaagagactcgaggacctgaagaacgtgttcccacctgaggtggccgtgttcgagcctagcgaggccgagatcagccacacccagaaagccaccctcgtgtgcctggctaccggcttctaccccgaccatgtggaactgtcttggtgggtcaacggcaaagaggtgcacagcggcgtgtgtaccgacccccagccactgaaagaacagcccgccctgaacgacagccggtactgcctgagcagcagactgagagtgtccgccaccttctggcagaacccccggaaccacttcagatgccaggtgcagttctacggcctgagcgagaacgacgagtggacccaggacagagccaagcccgtgacccagatcgtgtctgccgaagcctggggcagagccgattgcggctttaccagcgagagctaccagcagggcgtgctgagcgccaccaacctgagcgtgatcggcttcagaatcctgctgctgaaagtggccggctttaacctgctgatgaccctgcggctgtggtccagcagggccaagcgatctggatctggagcaacaaacttctcactactcaaacaagcaggtgacgtggaggagaatcccgggcctactagtatggactggatttggcgcatccttttccttgtcggcgctgctaccggcgcgcattccttcgaagaatctggaagaggactggtgcagcctggcggcagcagaaagctgtcttgtgccgccagcggcttcaccttcagcaccagcggaatgcactgggtgcgccaggcccctgagaagggactggaatgggtggcctacatcagctccggcagcaccaccatctaccacgccgataccgtgaagggccggttcaccatcagccgggacaaccccaagaataccctgttcctccagatgaccagcctgcggagcgaggacaccgccatgtactattgctgcgccagaagcggccagttcggcaactacttcgactactggggccagggcaccaccctgaccgtgtcatctacgcgtatccagaaccctgatcctgccgtgtaccagctgcgggatagcaagagcagcgacaagagcgtgtgtctgttcaccgacttcgacagccagaccaacgtgtcccagagcaaggactccgacgtgtacatcaccgataagtgcgtgctggacatgcggagcatggacttcaagagcaactccgccgtggcctggtccaacaagtccgatttcgcctgcgccaacgccttcaacaacagcattatccccgaggacacattcttcccaagccccgagagcagctgcgacgtgaagctggtggaaaagagcttcgagacagacaccaacctgaacttccagatcctgtacgagatcctgctgggcaaggccaccctgtacgccgtgctggtgtctgccctggtgctgatggctatggtcaagcggaaggacagccgggga

SEQ ID NO: 5006 - DNA, 1851 bp, synthetic construct
  source 1..1851: mol_type = other DNA
atggccttaccagtgaccgccttgctcctgccgctggccttgctgctccacgccgccaggccgcagagcccatctagcctggctgtgtctgccggcgagaaagtgaccatgagctgcaagagcagccagagcctgctgaacagccggacccggaagaactacctggcctggtatcagcagaagcccggccagagccccaagctgctgatctactgggccagcaccagagaaagcggcgtgcccgatagattcaccggctctggcagcggcaccgacttcaccctgacaatcagcagcgtgcaggccgaggacctggccgtgtactactgcaagcagagcaacctgtacaccttcggcggaggcaccaagctggaaatcaagctcgaggacctgaagaacgtgttcccacctgaggtggccgtgttcgagcctagcgaggccgagatcagccacacccagaaagccaccctcgtgtgcctggctaccggcttctaccccgaccatgtggaactgtcttggtgggtcaacggcaaagaggtgcacagcggcgtgtgtaccgacccccagccactgaaagaacagcccgccctgaacgacagccggtactgcctgagcagcagactgagagtgtccgccaccttctggcagaacccccggaaccacttcagatgccaggtgcagttctacggcctgagcgagaacgacgagtggacccaggacagagccaagcccgtgacccagatcgtgtctgccgaagcctggggcagagccgattgcggctttaccagcgagagctaccagcagggcgtgctgagcgccaccaacctgagcgtgatcggcttcagaatcctgctgctgaaagtggccggctttaacctgctgatgaccctgcggctgtggtccagcagggccaagcgatctggatctggagcaacaaacttctcactactcaaacaagcaggtgacgtggaggagaatcccgggcctactagtatggactggatttggcgcatccttttccttgtcggcgctgctaccggcgcgcattccttcgaacaggtgcagctggaagagtctggacccgagcttgtgaagcctggggccagcgtgaagctgtcctgtaaagccagcggctacaccttcaccgagtacatcatccactgggtcaagcagcggagcggccagggcctggaatggatcggctggttttaccctggctccggcagcatcaagtacaacgagaagttcaaggacaaggccaccctgaccgccgacaagtccagcagcaccgtgtacatggaactgagcggcctgaccagcgaggacagcgccgtgtatttctgcgccagacacgacggctacagctacttcgactattggggccagggcaccacactgaccgtgtcctctacgcgtatccagaaccctgatcctgccgtgtaccagctgcgggatagcaagagcagcgacaagagcgtgtgtctgttcaccgacttcgacagccagaccaacgtgtcccagagcaaggactccgacgtgtacatcaccgataagtgcgtgctggacatgcggagcatggacttcaagagcaactccgccgtggcctggtccaacaagtccgatttcgcctgcgccaacgccttcaacaacagcattatccccgaggacacattcttcccaagccccgagagcagctgcgacgtgaagctggtggaaaagagcttcgagacagacaccaacctgaacttccagatcctgtacgagatcctgctgggcaaggccaccctgtacgccgtgctggtgtctgccctggtgctgatggctatggtcaagcggaaggacagccgggga

SEQ ID NO: 5007 - DNA, 1860 bp, synthetic construct
  source 1..1860: mol_type = other DNA
atggccttaccagtgaccgccttgctcctgccgctggccttgctgctccacgccgccaggccggacatccagatgacccagagccccagcagcctgtctgcctctctgggcgagagagtgtccctgacctgtcgggccacacaggaactgagcggctacctgtcttggctgcagcagaagcccgacggcaccatcaagcggctgatctacgccgccagcaccctggatagcggcgtgcccaagagattcagcggcaacagaagcggcagcgactacagcctgaccatcagctccctggaaagcgaggacttcgccgactactactgcctgcagtacgccatctacccctacaccttcggcggaggcaccaagctggaaatcaagctcgaggacctgaagaacgtgttcccacctgaggtggccgtgttcgagcctagcgaggccgagatcagccacacccagaaagccaccctcgtgtgcctggctaccggcttctaccccgaccatgtggaactgtcttggtgggtcaacggcaaagaggtgcacagcggcgtgtgtaccgacccccagccactgaaagaacagcccgccctgaacgacagccggtactgcctgagcagcagactgagagtgtccgccaccttctggcagaacccccggaaccacttcagatgccaggtgcagttctacggcctgagcgagaacgacgagtggacccaggacagagccaagcccgtgacccagatcgtgtctgccgaagcctggggcagagccgattgcggctttaccagcgagagctaccagcagggcgtgctgagcgccaccaacctgagcgtgatcggcttcagaatcctgctgctgaaagtggccggctttaacctgctgatgaccctgcggctgtggtccagcagggccaagcgatctggatctggagcaacaaacttctcactactcaaacaagcaggtgacgtggaggagaatcccgggcctactagtatggactggatttggcgcatccttttccttgtcggcgctgctaccggcgcgcattccttcgaagaggtgcaactgcagcagtctggccccgagcttgtgaagcctggcgcctccgtgaagatgagctgcaaggccagcggctacacctttaccagctacttcatccactgggtcaagcagaaacccggccagggcctggaatggatcggcttcatcaacccttacaacgacggcagcaagtacaacgagaagttcaagggcaaggccaccctgaccagcgacaagagcagcagcaccgcctacatggaactgtccagcctgacatccgaggacagcgccgtgtactactgcaccagggacgacggctactacggctacgccatggactactggggccagggaacaagcgtcaccgtgtcctctacgcgtatccagaaccctgatcctgccgtgtaccagctgcgggatagcaagagcagcgacaagagcgtgtgtctgttcaccgacttcgacagccagaccaacgtgtcccagagcaaggactccgacgtgtacatcaccgataagtgcgtgctggacatgcggagcatggacttcaagagcaactccgccgtggcctggtccaacaagtccgatttcgcctgcgccaacgccttcaacaacagcattatccccgaggacacattcttcccaagccccgagagcagctgcgacgtgaagctggtggaaaagagcttcgagacagacaccaacctgaacttccagatcctgtacgagatcctgctgggcaaggccaccctgtacgccgtgctggtgtctgccctggtgctgatggctatggtcaagcggaaggacagccgggga

SEQ ID NO: 5008 - DNA, 1875 bp, synthetic construct
  source 1..1875: mol_type = other DNA
atggccttaccagtgaccgccttgctcctgccgctggccttgctgctccacgccgccaggccggacaccatcgtgctgacacagagccctgcttccctggccgtgtccctgggacagagagccaccatctcttgcagagccagcgagagcgtggacagctacggcaacagcttcatgcactggtatcagcagaagcccggccagccccccaagctgctgatctacctggcctccaacctggaaagcggcgtgcccgccagattttctggcagcggcagcagaaccgacttcaccctgaccatcgaccccgtggaagccgatgatgccgccacctactactgccagcagaacaactacgacccctggaccttcggcggaggcaccaagctggaaatcaagctcgaggacctgaagaacgtgttcccacctgaggtggccgtgttcgagcctagcgaggccgagatcagccacacccagaaagccaccctcgtgtgcctggctaccggcttctaccccgaccatgtggaactgtcttggtgggtcaacggcaaagaggtgcacagcggcgtgtgtaccgacccccagccactgaaagaacagcccgccctgaacgacagccggtactgcctgagcagcagactgagagtgtccgccaccttctggcagaacccccggaaccacttcagatgccaggtgcagttctacggcctgagcgagaacgacgagtggacccaggacagagccaagcccgtgacccagatcgtgtctgccgaagcctggggcagagccgattgcggctttaccagcgagagctaccagcagggcgtgctgagcgccaccaacctgagcgtgatcggcttcagaatcctgctgctgaaagtggccggctttaacctgctgatgaccctgcggctgtggtccagcagggccaagcgatctggatctggagcaacaaacttctcactactcaaacaagcaggtgacgtggaggagaatcccgggcctactagtatggactggatttggcgcatccttttccttgtcggcgctgctaccggcgcgcattccttcgaagaagtgcaactccagcagagcggccctgagcttgtgaagcctggcgcttccgtgaagatgagctgcaaggccagcggctacaccttcaccagctacgtgatgcactgggtcaagcagaaacctggacagggcctggaatggatcggctacatcaacccctacaacgacggcaccaagtacaacgagaagttcaagggcaaggccaccctgacaagcgacaccagcagcagcaccgcctacatggaactgaacagcctgaccagcgaggacagcgccgtgtacttctgcgccagacccatctacttcgacaacgactacttcgattactggggccagggcaccaccctgaaggtgtcctctacgcgtatccagaaccctgatcctgccgtgtaccagctgcgggatagcaagagcagcgacaagagcgtgtgtctgttcaccgacttcgacagccagaccaacgtgtcccagagcaaggactccgacgtgtacatcaccgataagtgcgtgctggacatgcggagcatggacttcaagagcaactccgccgtggcctggtccaacaagtccgatttcgcctgcgccaacgccttcaacaacagcattatccccgaggacacattcttcccaagccccgagagcagctgcgacgtgaagctggtggaaaagagcttcgagacagacaccaacctgaacttccagatcctgtacgagatcctgctgggcaaggccaccctgtacgccgtgctggtgtctgccctggtgctgatggctatggtcaagcggaaggacagccgggga

SEQ ID NO: 5009 - DNA, 1860 bp, synthetic construct
  source 1..1860: mol_type = other DNA
atggccttaccagtgaccgccttgctcctgccgctggccttgctgctccacgccgccaggccggacatccagatgacccagagccccagcagcctgtctgccagcgtgggcgacagagtgaccatcacatgcaaggccagccaggacgtgggaatcgccgtggcctggtatcagcagaaacccggcaaggtgcccaagctgctgatctactgggccagcaccagacacaccggcgtgcccgatagattttccggcagcggctccggcaccgacttcaccctgacaatcagctccctccagcccgaggacgtggcaacctactactgccagcagtacagcagctacccctacaccttcggccagggcaccaaggtggaaatcaagagactcgaggacctgaagaacgtgttcccacctgaggtggccgtgttcgagcctagcgaggccgagatcagccacacccagaaagccaccctcgtgtgcctggctaccggcttctaccccgaccatgtggaactgtcttggtgggtcaacggcaaagaggtgcacagcggcgtgtgtaccgacccccagccactgaaagaacagcccgccctgaacgacagccggtactgcctgagcagcagactgagagtgtccgccaccttctggcagaacccccggaaccacttcagatgccaggtgcagttctacggcctgagcgagaacgacgagtggacccaggacagagccaagcccgtgacccagatcgtgtctgccgaagcctggggcagagccgattgcggctttaccagcgagagctaccagcagggcgtgctgagcgccaccaacctgagcgtgatcggcttcagaatcctgctgctgaaagtggccggctttaacctgctgatgaccctgcggctgtggtccagcagggccaagcgatctggatctggagcaacaaacttctcactactcaaacaagcaggtgacgtggaggagaatcccgggcctactagtatggactggatttggcgcatccttttccttgtcggcgctgctaccggcgcgcattccttcgaagaagtgcaactggtggaatcaggcggcggactggtgcagcctggcggatctctgagactgagctgtgccgccagcggcttcgacttcagccggtactggatgagctgggtgcgccaggcccctggcaaaggactggaatggatcggcgagatcaaccccgacagcagcaccatcaactacgcccccagcctgaaggacaagttcatcatcagccgggacaacgccaagaacagcctgtacctccagatgaactccctgcgggccgaggacaccgccgtgtactattgcgccagacccgacggcaactactggtacttcgacgtgtggggccagggaaccctcgtgaccgtgtcatctacgcgtatccagaaccctgatcctgccgtgtaccagctgcgggatagcaagagcagcgacaagagcgtgtgtctgttcaccgacttcgacagccagaccaacgtgtcccagagcaaggactccgacgtgtacatcaccgataagtgcgtgctggacatgcggagcatggacttcaagagcaactccgccgtggcctggtccaacaagtccgatttcgcctgcgccaacgccttcaacaacagcattatccccgaggacacattcttcccaagccccgagagcagctgcgacgtgaagctggtggaaaagagcttcgagacagacaccaacctgaacttccagatcctgtacgagatcctgctgggcaaggccaccctgtacgccgtgctggtgtctgccctggtgctgatggctatggtcaagcggaaggacagccgggga

SEQ ID NO: 5010 - DNA, 1860 bp, synthetic construct
  source 1..1860: mol_type = other DNA
atggccttaccagtgaccgccttgctcctgccgctggccttgctgctccacgccgccaggccggacatcgtgatgacccagagccagaagagcatgagcaccagcgtgggcgacagagtgagcatcacctgcaaggccagccaggacgtgatcaccggcgtggcctggtaccagcagaagcccggccagagccccaagctgctgatctacagcgccagctacagatacaccggcgtgcccgacagattcaccggcagcggcagcggcaccgacttcaccttcaccatcagcaacgtgcaggccgaggacctggccgtgtactactgccagcagcactacagcacccccctgaccttcggcgccggcaccaagctggagctgaagctcgaggacctgaagaacgtgttcccacctgaggtggccgtgttcgagcctagcgaggccgagatcagccacacccagaaagccaccctcgtgtgcctggctaccggcttctaccccgaccatgtggaactgtcttggtgggtcaacggcaaagaggtgcacagcggcgtgtgtaccgacccccagccactgaaagaacagcccgccctgaacgacagccggtactgcctgagcagcagactgagagtgtccgccaccttctggcagaacccccggaaccacttcagatgccaggtgcagttctacggcctgagcgagaacgacgagtggacccaggacagagccaagcccgtgacccagatcgtgtctgccgaagcctggggcagagccgattgcggctttaccagcgagagctaccagcagggcgtgctgagcgccaccaacctgagcgtgatcggcttcagaatcctgctgctgaaagtggccggctttaacctgctgatgaccctgcggctgtggtccagcagggccaagcgatctggatctggagcaacaaacttctcactactcaaacaagcaggtgacgtggaggagaatcccgggcctactagtatggactggatttggcgcatccttttccttgtcggcgctgctaccggcgcgcattccttcgaacaggtgcagctgcagcagcccggcgccgagctggtgagacccggcgccagcgtgaagctgagctgcaaggccagcggctacagcttcaccacctactggatgaactgggtgaagcagagacccggccagggcctggagtggatcggcatgatccaccccagcgacagcgagaccagactgaaccagaagttcaaggacaaggccaccctgaccgtggacaagagcagcagcaccgcctacatgcagctgagcagccccaccagcgaggacagcgccgtgtactactgcgccagaagcaccatgatcgccaccagagccatggactactggggccagggcaccagcgtgaccgtgagcagcacgcgtatccagaaccctgatcctgccgtgtaccagctgcgggatagcaagagcagcgacaagagcgtgtgtctgttcaccgacttcgacagccagaccaacgtgtcccagagcaaggactccgacgtgtacatcaccgataagtgcgtgctggacatgcggagcatggacttcaagagcaactccgccgtggcctggtccaacaagtccgatttcgcctgcgccaacgccttcaacaacagcattatccccgaggacacattcttcccaagccccgagagcagctgcgacgtgaagctggtggaaaagagcttcgagacagacaccaacctgaacttccagatcctgtacgagatcctgctgggcaaggccaccctgtacgccgtgctggtgtctgccctggtgctgatggctatggtcaagcggaaggacagccgggga

SEQ ID NO: 5011 - DNA, 1878 bp, synthetic construct
  source 1..1878: mol_type = other DNA
atggccttaccagtgaccgccttgctcctgccgctggccttgctgctccacgccgccaggccgcagagcgtgctgacacagcctccatccgtgtctggcgctccaggccagagagtgaccatctcctgtaccggcagcggcagcaacatcggagccccctacgacgtgtcctggtatcagcaactgcctggcaccgcccccaagctgctgatctaccacaacaacaagcggcccagcggcgtgcccgatagattcagcggctctaagagcggcaccagcgccagcctggctatcactggactccaggccgaggacgaggccgactactactgtgccacagtggaagccggcctgagcggctctgtgtttggcggcggaacaaagctgaccgtgctgggagctctcgaggacctgaagaacgtgttcccacctgaggtggccgtgttcgagcctagcgaggccgagatcagccacacccagaaagccaccctcgtgtgcctggctaccggcttctaccccgaccatgtggaactgtcttggtgggtcaacggcaaagaggtgcacagcggcgtgtgtaccgacccccagccactgaaagaacagcccgccctgaacgacagccggtactgcctgagcagcagactgagagtgtccgccaccttctggcagaacccccggaaccacttcagatgccaggtgcagttctacggcctgagcgagaacgacgagtggacccaggacagagccaagcccgtgacccagatcgtgtctgccgaagcctggggcagagccgattgcggctttaccagcgagagctaccagcagggcgtgctgagcgccaccaacctgagcgtgatcggcttcagaatcctgctgctgaaagtggccggctttaacctgctgatgaccctgcggctgtggtccagcagggccaagcgatctggatctggagcaacaaacttctcactactcaaacaagcaggtgacgtggaggagaatcccgggcctactagtatggactggatttggcgcatccttttccttgtcggcgctgctaccggcgcgcattccttcgaacaggtgcaactggtgcagagcggagccgaagtgaagaaacctggggccagcgtgaaggtgtcctgcaaggtgtccggctacaccctgaccgagctgagcattcactgggtgcgccaggcccctggcaagggactggaatggatgggcggcttcgaccccgaagagaacgagatcgtgtacgcccagcggttccagggcagagtgacaatgaccgaggacaccagcaccgacaccgcctacatggaactgagcagcctgcggagcgaggataccgccgtgtactactgcgccatcgtgggcagcttcagccctctgacactgggcctgtggggccagggaactatggtcaccgtgtccagcacgcgtatccagaaccctgatcctgccgtgtaccagctgcgggatagcaagagcagcgacaagagcgtgtgtctgttcaccgacttcgacagccagaccaacgtgtcccagagcaaggactccgacgtgtacatcaccgataagtgcgtgctggacatgcggagcatggacttcaagagcaactccgccgtggcctggtccaacaagtccgatttcgcctgcgccaacgccttcaacaacagcattatccccgaggacacattcttcccaagccccgagagcagctgcgacgtgaagctggtggaaaagagcttcgagacagacaccaacctgaacttccagatcctgtacgagatcctgctgggcaaggccaccctgtacgccgtgctggtgtctgccctggtgctgatggctatggtcaagcggaaggacagccgggga

SEQ ID NO: 5012 - DNA, 1878 bp, synthetic construct
  source 1..1878: mol_type = other DNA
atggccttaccagtgaccgccttgctcctgccgctggccttgctgctccacgccgccaggccgcagagcgtgctgacacagcctccatccgtgtctggcgctccaggccagagagtgaccatctcctgtaccggcagcggcagcaacatcggagccccctacgacgtgtcctggtatcagcaactgcctggcaccgcccccaagctgctgatctaccacaacaacaagcggcccagcggcgtgcccgatagattcagcggctctaagagcggcaccagcgccagcctggctatcactggactccaggccgaggacgaggccgactactactgccagagctacgacagcagcagcatcagcaccatcttcggcggaggcaccaagctgacagtgctgggagctctcgaggacctgaagaacgtgttcccacctgaggtggccgtgttcgagcctagcgaggccgagatcagccacacccagaaagccaccctcgtgtgcctggctaccggcttctaccccgaccatgtggaactgtcttggtgggtcaacggcaaagaggtgcacagcggcgtgtgtaccgacccccagccactgaaagaacagcccgccctgaacgacagccggtactgcctgagcagcagactgagagtgtccgccaccttctggcagaacccccggaaccacttcagatgccaggtgcagttctacggcctgagcgagaacgacgagtggacccaggacagagccaagcccgtgacccagatcgtgtctgccgaagcctggggcagagccgattgcggctttaccagcgagagctaccagcagggcgtgctgagcgccaccaacctgagcgtgatcggcttcagaatcctgctgctgaaagtggccggctttaacctgctgatgaccctgcggctgtggtccagcagggccaagcgatctggatctggagcaacaaacttctcactactcaaacaagcaggtgacgtggaggagaatcccgggcctactagtatggactggatttggcgcatccttttccttgtcggcgctgctaccggcgcgcattccttcgaacaggtgcaactggtgcagagcggagccgaagtgaagaaacctggggccagcgtgaaggtgtcctgcaaggtgtccggctacaccctgaccgagctgagcattcactgggtgcgccaggcccctggcaagggactggaatggatgggcggcttcgaccccgaagagaacgagatcgtgtacgcccagcggttccagggcagagtgacaatgaccgaggacaccagcaccgacaccgcctacatggaactgagcagcctgcggagcgaggataccgccgtgtactactgtgccatcgtgggcagcttcagcggaatcgcctacagaccttggggccagggcacaatggtcaccgtgtctagcacgcgtatccagaaccctgatcctgccgtgtaccagctgcgggatagcaagagcagcgacaagagcgtgtgtctgttcaccgacttcgacagccagaccaacgtgtcccagagcaaggactccgacgtgtacatcaccgataagtgcgtgctggacatgcggagcatggacttcaagagcaactccgccgtggcctggtccaacaagtccgatttcgcctgcgccaacgccttcaacaacagcattatccccgaggacacattcttcccaagccccgagagcagctgcgacgtgaagctggtggaaaagagcttcgagacagacaccaacctgaacttccagatcctgtacgagatcctgctgggcaaggccaccctgtacgccgtgctggtgtctgccctggtgctgatggctatggtcaagcggaaggacagccgggga

SEQ ID NO: 5013 - DNA, 1842 bp, synthetic construct
  source 1..1842: mol_type = other DNA
atggccttaccagtgaccgccttgctcctgccgctggccttgctgctccacgccgccaggccggacatccagatgacccagagccccagcagcctgtctgccagcgtgggcgacagagtgaccatcacctgtagagccagccagggcatcagaaacaacctggcctggtatcagcagaagcccggcaaggcccccaagcggctgatctacgccgccagcaatctccagagcggcgtgcccagcagattcacaggctctggcagcggcaccgagttcaccctgatcgtgtctagcctccagcccgaggacttcgccacctactactgcctccagcaccacagctaccccctgacatctggcggaggcaccaaggtggaactcgaggacctgaagaacgtgttcccacctgaggtggccgtgttcgagcctagcgaggccgagatcagccacacccagaaagccaccctcgtgtgcctggctaccggcttctaccccgaccatgtggaactgtcttggtgggtcaacggcaaagaggtgcacagcggcgtgtgtaccgacccccagccactgaaagaacagcccgccctgaacgacagccggtactgcctgagcagcagactgagagtgtccgccaccttctggcagaacccccggaaccacttcagatgccaggtgcagttctacggcctgagcgagaacgacgagtggacccaggacagagccaagcccgtgacccagatcgtgtctgccgaagcctggggcagagccgattgcggctttaccagcgagagctaccagcagggcgtgctgagcgccaccaacctgagcgtgatcggcttcagaatcctgctgctgaaagtggccggctttaacctgctgatgaccctgcggctgtggtccagcagggccaagcgatctggatctggagcaacaaacttctcactactcaaacaagcaggtgacgtggaggagaatcccgggcctactagtatggactggatttggcgcatccttttccttgtcggcgctgctaccggcgcgcattccttcgaagaggtgcaggtgctggaaagtggcggaggactggtgcagcctggcggctctctgagactgtcttgtgccgccagcggcttcaccttcagcagctacgccatgagctgggtgcgccaggcccctggaaaaggactggaatgggtgtccgccatcagcggctctggcgggtctaccaactacgccgatagcgtgaagggccggttcaccatcagccgggacaacagcaagaacaccctgtacctccagatgaacagcctgcgggccgaggacaccgccgtgtattattgtgccggcagcagcgggtggagcgagtattggggacagggcaccctcgtgaccgtgtcctctacgcgtatccagaaccctgatcctgccgtgtaccagctgcgggatagcaagagcagcgacaagagcgtgtgtctgttcaccgacttcgacagccagaccaacgtgtcccagagcaaggactccgacgtgtacatcaccgataagtgcgtgctggacatgcggagcatggacttcaagagcaactccgccgtggcctggtccaacaagtccgatttcgcctgcgccaacgccttcaacaacagcattatccccgaggacacattcttcccaagccccgagagcagctgcgacgtgaagctggtggaaaagagcttcgagacagacaccaacctgaacttccagatcctgtacgagatcctgctgggcaaggccaccctgtacgccgtgctggtgtctgccctggtgctgatggctatggtcaagcggaaggacagccgggga

SEQ ID NO: 5014 - DNA, 1860 bp, synthetic construct
  source 1..1860: mol_type = other DNA
atggccttaccagtgaccgccttgctcctgccgctggccttgctgctccacgccgccaggccggacgagatccagctggtgcagagcggagccgaagtgaagaagcctggcgagagcctgcggatcagctgcaagggcagcggcttcaacatcgaggactactacatccactgggtgcgccagatgcccggcaagggcctggaatggatgggcagaatcgaccccgagaacgacgagactaagtacggccccatcttccagggccacgtgaccatcagcgccgacaccagcatcaacaccgtgtacctccagtggtccagcctgaaggccagcgacaccgccatgtactactgcgcctttagaggcggcgtgtactggggccagggcaccacagtgacagtgtctagcctcgaggacctgaagaacgtgttcccacctgaggtggccgtgttcgagcctagcgaggccgagatcagccacacccagaaagccaccctcgtgtgcctggctaccggcttctaccccgaccatgtggaactgtcttggtgggtcaacggcaaagaggtgcacagcggcgtgtgtaccgacccccagccactgaaagaacagcccgccctgaacgacagccggtactgcctgagcagcagactgagagtgtccgccaccttctggcagaacccccggaaccacttcagatgccaggtgcagttctacggcctgagcgagaacgacgagtggacccaggacagagccaagcccgtgacccagatcgtgtctgccgaagcctggggcagagccgattgcggctttaccagcgagagctaccagcagggcgtgctgagcgccaccaacctgagcgtgatcggcttcagaatcctgctgctgaaagtggccggctttaacctgctgatgaccctgcggctgtggtccagcagggccaagcgatctggatctggagcaacaaacttctcactactcaaacaagcaggtgacgtggaggagaatcccgggcctactagtatggactggatttggcgcatccttttccttgtcggcgctgctaccggcgcgcattccttcgaagatgtcgtgatgacccagagccccgacagcctggctgtgtctctgggagagagagccaccatcaactgcaagtccagccagtccctgctggacagcgacggcaagacctacctgaactggctccagcagaagcccggccagccccccaagagactgatctccctggtgtccaagctggactccggcgtgcccgatagattttccggctctggcagcggcaccgacttcaccctgacaatcagctcccttcaggccgaggacgtggccgtgtactattgctggcagggcacacacttccccggcacctttggcggaggcaccaaggtggaaatcaagacgcgtatccagaaccctgatcctgccgtgtaccagctgcgggatagcaagagcagcgacaagagcgtgtgtctgttcaccgacttcgacagccagaccaacgtgtcccagagcaaggactccgacgtgtacatcaccgataagtgcgtgctggacatgcggagcatggacttcaagagcaactccgccgtggcctggtccaacaagtccgatttcgcctgcgccaacgccttcaacaacagcattatccccgaggacacattcttcccaagccccgagagcagctgcgacgtgaagctggtggaaaagagcttcgagacagacaccaacctgaacttccagatcctgtacgagatcctgctgggcaaggccaccctgtacgccgtgctggtgtctgccctggtgctgatggctatggtcaagcggaaggacagccgggga

SEQ ID NO: 5015 - DNA, 1881 bp, synthetic construct
  source 1..1881: mol_type = other DNA
atggccttaccagtgaccgccttgctcctgccgctggccttgctgctccacgccgccaggccggacgagcttgtgatgacccagagccccagcagcctgacagtgacagccggcgagaaagtgaccatgagctgcaagagcagccagagcctgctgaacagcggcaaccagaagaactacctgacctggtatcagcagaagcccggccagccccccaagctgctgatctactgggccagcaccagagaaagcggcgtgcccgatagattcaccggctctggcagcggcaccgacttcaccctgacaatcagcagcgtgcaggccgaggacctggccgtgtactactgccagaacgactacagctaccccctgaccttcggagccggcaccaagctggaaatcaagctcgaggacctgaagaacgtgttcccacctgaggtggccgtgttcgagcctagcgaggccgagatcagccacacccagaaagccaccctcgtgtgcctggctaccggcttctaccccgaccatgtggaactgtcttggtgggtcaacggcaaagaggtgcacagcggcgtgtgtaccgacccccagccactgaaagaacagcccgccctgaacgacagccggtactgcctgagcagcagactgagagtgtccgccaccttctggcagaacccccggaaccacttcagatgccaggtgcagttctacggcctgagcgagaacgacgagtggacccaggacagagccaagcccgtgacccagatcgtgtctgccgaagcctggggcagagccgattgcggctttaccagcgagagctaccagcagggcgtgctgagcgccaccaacctgagcgtgatcggcttcagaatcctgctgctgaaagtggccggctttaacctgctgatgaccctgcggctgtggtccagcagggccaagcgatctggatctggagcaacaaacttctcactactcaaacaagcaggtgacgtggaggagaatcccgggcctactagtatggactggatttggcgcatccttttccttgtcggcgctgctaccggcgcgcattccttcgaagaagtgcagctgctggaacagtctggcgccgaacttgtgcggcctggcaccagcgtgaagatcagctgtaaagccagcggctacgccttcaccaactactggctgggctgggtcaagcagaggcctggacacggcctggaatggatcggcgacatctttcccggctccggcaacatccactacaacgagaagttcaagggcaaggccaccctgaccgccgacaagtctagcagcaccgcctacatgcagctgtccagcctgacctttgaggacagcgccgtgtatttctgtgcccggctgcggaactgggacgagcccatggattattggggccagggcaccaccgtgaccgtgtctagtacgcgtatccagaaccctgatcctgccgtgtaccagctgcgggatagcaagagcagcgacaagagcgtgtgtctgttcaccgacttcgacagccagaccaacgtgtcccagagcaaggactccgacgtgtacatcaccgataagtgcgtgctggacatgcggagcatggacttcaagagcaactccgccgtggcctggtccaacaagtccgatttcgcctgcgccaacgccttcaacaacagcattatccccgaggacacattcttcccaagccccgagagcagctgcgacgtgaagctggtggaaaagagcttcgagacagacaccaacctgaacttccagatcctgtacgagatcctgctgggcaaggccaccctgtacgccgtgctggtgtctgccctggtgctgatggctatggtcaagcggaaggacagccgggga

SEQ ID NO: 5016 - DNA, 1884 bp, synthetic construct
  source 1..1884: mol_type = other DNA
atggccttaccagtgaccgccttgctcctgccgctggccttgctgctccacgccgccaggccggacgagctgcagatgacccagagccctagcagcctgtctgccagcgtgggcgacagagtgaccatcacctgtagagccagccagagcatcagcagctacctgaactggtatcagcagaagcccggccagccccccaaactgctgatctactgggccagcaccagagaaagcggcgtgcccgatagattcagcggcagcgagagcggcaccaactacaccctgaccatcagctccctgcagcccgaggacttcgccacctacttttgccagcagagcgacagcctgcccatcacctttggacagggcacccggctggacattcagctcgaggacctgaagaacgtgttcccacctgaggtggccgtgttcgagcctagcgaggccgagatcagccacacccagaaagccaccctcgtgtgcctggctaccggcttctaccccgaccatgtggaactgtcttggtgggtcaacggcaaagaggtgcacagcggcgtgtgtaccgacccccagccactgaaagaacagcccgccctgaacgacagccggtactgcctgagcagcagactgagagtgtccgccaccttctggcagaacccccggaaccacttcagatgccaggtgcagttctacggcctgagcgagaacgacgagtggacccaggacagagccaagcccgtgacccagatcgtgtctgccgaagcctggggcagagccgattgcggctttaccagcgagagctaccagcagggcgtgctgagcgccaccaacctgagcgtgatcggcttcagaatcctgctgctgaaagtggccggctttaacctgctgatgaccctgcggctgtggtccagcagggccaagcgatctggatctggagcaacaaacttctcactactcaaacaagcaggtgacgtggaggagaatcccgggcctactagtatggactggatttggcgcatccttttccttgtcggcgctgctaccggcgcgcattccttcgaagaggtgcaactgctggaatctgggggcggagtggtgcagcctggcagaagcctgagactgagctgtgccgccagcggcttcaccttcagctcctacggaatgcactgggtgcgccaggcccctggcaaaggactggaatgggtggccgtgatctcctacgacggcagcaacaagtactacgccgacagcgtgaagggccggttcaccatcagccgggacaacagcaagaacaccctgtacctgcagatgaacagcctgcgggccgaggacaccgccgtgtactactgcgccaaggatatgggctggggcagcggctggcggccttactactactacggcatggacgtgtggggccagggcaccaccgtgacagtgtcatctacgcgtatccagaaccctgatcctgccgtgtaccagctgcgggatagcaagagcagcgacaagagcgtgtgtctgttcaccgacttcgacagccagaccaacgtgtcccagagcaaggactccgacgtgtacatcaccgataagtgcgtgctggacatgcggagcatggacttcaagagcaactccgccgtggcctggtccaacaagtccgatttcgcctgcgccaacgccttcaacaacagcattatccccgaggacacattcttcccaagccccgagagcagctgcgacgtgaagctggtggaaaagagcttcgagacagacaccaacctgaacttccagatcctgtacgagatcctgctgggcaaggccaccctgtacgccgtgctggtgtctgccctggtgctgatggctatggtcaagcggaaggacagccgggga

SEQ ID NO: 5017 - DNA, 1875 bp, synthetic construct
  source 1..1875: mol_type = other DNA
atggccttaccagtgaccgccttgctcctgccgctggccttgctgctccacgccgccaggccggacgacatccaaatgacacagagtccttctagtttgagtgcgagcgtgggggacagggtgaccattacctgcagggccagccagagcataagctcataccttaattggtaccagcaaaaaccaggtaaggcccctaagctcctgatctacgcggcctcttcacttcaatctggggtcccttcccgcttcagtggctccggcagcggcaccgacttcacgctcactatatcaagtctgcagcctgaggatctcgccacctattactgtcaacaaagttattccacccctttcacctttggaccgggcacgaaagtggatattaagctcgaggacctgaagaacgtgttcccacctgaggtggccgtgttcgagcctagcgaggccgagatcagccacacccagaaagccaccctcgtgtgcctggctaccggcttctaccccgaccatgtggaactgtcttggtgggtcaacggcaaagaggtgcacagcggcgtgtgtaccgacccccagccactgaaagaacagcccgccctgaacgacagccggtactgcctgagcagcagactgagagtgtccgccaccttctggcagaacccccggaaccacttcagatgccaggtgcagttctacggcctgagcgagaacgacgagtggacccaggacagagccaagcccgtgacccagatcgtgtctgccgaagcctggggcagagccgattgcggctttaccagcgagagctaccagcagggcgtgctgagcgccaccaacctgagcgtgatcggcttcagaatcctgctgctgaaagtggccggctttaacctgctgatgaccctgcggctgtggtccagcagggccaagcgatctggatctggagcaacaaacttctcactactcaaacaagcaggtgacgtggaggagaatcccgggcctactagtatggactggatttggcgcatccttttccttgtcggcgctgctaccggcgcgcattccttcgaagtgcacgaggtccagcttgtgcagtccggggcagaggtcaagaagcctggttctagcgtaaaagtgagttgcaaagcctcaggtgggacattttcatcctacgcgatcagttgggttagacaggctcctggtcaagggctggaatggatgggcggaattattccaatcttcggaacagcgaattacgcgcagaagttccagggtagagtaaccatcactgctgacaagtccacctccaccgcatacatggaattgtctagtctccggagcgaggatacggcggtgtattattgtgctacgttcgccctgtttggcttccgcgaacaggctttcgacatctgggggcagggcacgacagtcacggttagtagtacgcgtatccagaaccctgatcctgccgtgtaccagctgcgggatagcaagagcagcgacaagagcgtgtgtctgttcaccgacttcgacagccagaccaacgtgtcccagagcaaggactccgacgtgtacatcaccgataagtgcgtgctggacatgcggagcatggacttcaagagcaactccgccgtggcctggtccaacaagtccgatttcgcctgcgccaacgccttcaacaacagcattatccccgaggacacattcttcccaagccccgagagcagctgcgacgtgaagctggtggaaaagagcttcgagacagacaccaacctgaacttccagatcctgtacgagatcctgctgggcaaggccaccctgtacgccgtgctggtgtctgccctggtgctgatggctatggtcaagcggaaggacagccgggga

SEQ ID NO: 5018 - DNA, 1869 bp, synthetic construct
  source 1..1869: mol_type = other DNA
atggccttaccagtgaccgccttgctcctgccgctggccttgctgctccacgccgccaggccggacatcgtgctgacccagagccctctgagcctggccgtgtctctgggacagcctgccatcatcagctgcaaggccagccagagcgtgtcctttgccggcacctctctgatgcactggtatcaccagaagcccggccagcagcccagactgctgatctacagagccagcaacctggaagccggcgtgcccgatagattttccggcagcggcagcaagaccgacttcaccctgaccatcagccccgtggaagccgaagatgccgccacctactactgccagcagagcagagagtacccctacaccttcggcggaggcaccaagctggaaatcaagaggctcgaggacctgaagaacgtgttcccacctgaggtggccgtgttcgagcctagcgaggccgagatcagccacacccagaaagccaccctcgtgtgcctggctaccggcttctaccccgaccatgtggaactgtcttggtgggtcaacggcaaagaggtgcacagcggcgtgtgtaccgacccccagccactgaaagaacagcccgccctgaacgacagccggtactgcctgagcagcagactgagagtgtccgccaccttctggcagaacccccggaaccacttcagatgccaggtgcagttctacggcctgagcgagaacgacgagtggacccaggacagagccaagcccgtgacccagatcgtgtctgccgaagcctggggcagagccgattgcggctttaccagcgagagctaccagcagggcgtgctgagcgccaccaacctgagcgtgatcggcttcagaatcctgctgctgaaagtggccggctttaacctgctgatgaccctgcggctgtggtccagcagggccaagcgatctggatctggagcaacaaacttctcactactcaaacaagcaggtgacgtggaggagaatcccgggcctactagtatggactggatttggcgcatccttttccttgtcggcgctgctaccggcgcgcattccttcgaacaggtccaactggtgcagagcggagccgaggtcgtgaagcctggcgcttccgtgaagattagctgcaaagccagcggctacacctttaccggctactttatgaactgggtcaagcagagccctggccagagcctggaatggatcggcagaatccacccctacgacggcgacaccttctacaaccagaagttccagggcaaggccaccctgacagtggacaagagcagcaacaccgcccacatggaactgctgagcctgaccagcgaggacttcgccgtgtactactgcaccagatacgacggcagccgggctatggactattggggccagggcaccaccgtgaccgtgtctagtacgcgtatccagaaccctgatcctgccgtgtaccagctgcgggatagcaagagcagcgacaagagcgtgtgtctgttcaccgacttcgacagccagaccaacgtgtcccagagcaaggactccgacgtgtacatcaccgataagtgcgtgctggacatgcggagcatggacttcaagagcaactccgccgtggcctggtccaacaagtccgatttcgcctgcgccaacgccttcaacaacagcattatccccgaggacacattcttcccaagccccgagagcagctgcgacgtgaagctggtggaaaagagcttcgagacagacaccaacctgaacttccagatcctgtacgagatcctgctgggcaaggccaccctgtacgccgtgctggtgtctgccctggtgctgatggctatggtcaagcggaaggacagccgggga

SEQ ID NO: 5019 - DNA, 1860 bp, synthetic construct
  source 1..1860: mol_type = other DNA
atggccttaccagtgaccgccttgctcctgccgctggccttgctgctccacgccgccaggccggacgacgttgtgatgacccagacccccctgagcctgcctgtgacacctggcgaacctgccagcatcagctgtcggagcagccagagcctggtgcacagaaacggcaacacctacctgcactggtatctccagaagcccggccagagccccaagctgctgatccacaaggtgtccaacagattcagcggcgtgcccgacagattctccggcagcggctctggcaccgacttcaccctgaagatcagccgggtggaagccgaggacctgggcgtgtacttctgtagccagagcacccatgtgccccccctgacatttggagccggcaccaagctggaactgaagctcgaggacctgaagaacgtgttcccacctgaggtggccgtgttcgagcctagcgaggccgagatcagccacacccagaaagccaccctcgtgtgcctggctaccggcttctaccccgaccatgtggaactgtcttggtgggtcaacggcaaagaggtgcacagcggcgtgtgtaccgacccccagccactgaaagaacagcccgccctgaacgacagccggtactgcctgagcagcagactgagagtgtccgccaccttctggcagaacccccggaaccacttcagatgccaggtgcagttctacggcctgagcgagaacgacgagtggacccaggacagagccaagcccgtgacccagatcgtgtctgccgaagcctggggcagagccgattgcggctttaccagcgagagctaccagcagggcgtgctgagcgccaccaacctgagcgtgatcggcttcagaatcctgctgctgaaagtggccggctttaacctgctgatgaccctgcggctgtggtccagcagggccaagcgatctggatctggagcaacaaacttctcactactcaaacaagcaggtgacgtggaggagaatcccgggcctactagtatggactggatttggcgcatccttttccttgtcggcgctgctaccggcgcgcattccttcgaagaagtgcagctggtgcagtctggcgctgaggtggaaaagcctggggccagcgtgaagattagctgcaaggccagcggcagcagcttcaccggctacaacatgaactgggtgcgccagaacatcggcaagagcctggaatggatcggagccatcgacccctactacggcggcaccagctacaaccagaagttcaagggcagagccaccctgaccgtggacaagagcaccagcaccgcctacatgcacctgaagtccctgcggagcgaggacaccgccgtgtactactgtgtgtccggcatggaatattggggccagggcaccagcgtgaccgtgtctagtacgcgtatccagaaccctgatcctgccgtgtaccagctgcgggatagcaagagcagcgacaagagcgtgtgtctgttcaccgacttcgacagccagaccaacgtgtcccagagcaaggactccgacgtgtacatcaccgataagtgcgtgctggacatgcggagcatggacttcaagagcaactccgccgtggcctggtccaacaagtccgatttcgcctgcgccaacgccttcaacaacagcattatccccgaggacacattcttcccaagccccgagagcagctgcgacgtgaagctggtggaaaagagcttcgagacagacaccaacctgaacttccagatcctgtacgagatcctgctgggcaaggccaccctgtacgccgtgctggtgtctgccctggtgctgatggctatggtcaagcggaaggacagccgggga

SEQ ID NO: 5020 - DNA, 1854 bp, synthetic construct
  source 1..1854: mol_type = other DNA
atggccttaccagtgaccgccttgctcctgccgctggccttgctgctccacgccgccaggccggacgagatcgtgatgacccagacccctgccaccctgtctgtgtctgccggcgagagagtgaccattacctgcaaggccagccagagcgtgtccaacgacgtgacctggtatcagcagaagcccggccaggcccccagactgctgatctacagcgccagcaacagatacagcggcgtgcccgccagattttccggcagcggctacggcaccgagttcaccttcaccatcagcagcgtgcagagcgaggacttcgccgtgtacttctgtcagcaagactacagcagcttcggccagggcaccaagctggaaatcaagaggctcgaggacctgaagaacgtgttcccacctgaggtggccgtgttcgagcctagcgaggccgagatcagccacacccagaaagccaccctcgtgtgcctggctaccggcttctaccccgaccatgtggaactgtcttggtgggtcaacggcaaagaggtgcacagcggcgtgtgtaccgacccccagccactgaaagaacagcccgccctgaacgacagccggtactgcctgagcagcagactgagagtgtccgccaccttctggcagaacccccggaaccacttcagatgccaggtgcagttctacggcctgagcgagaacgacgagtggacccaggacagagccaagcccgtgacccagatcgtgtctgccgaagcctggggcagagccgattgcggctttaccagcgagagctaccagcagggcgtgctgagcgccaccaacctgagcgtgatcggcttcagaatcctgctgctgaaagtggccggctttaacctgctgatgaccctgcggctgtggtccagcagggccaagcgatctggatctggagcaacaaacttctcactactcaaacaagcaggtgacgtggaggagaatcccgggcctactagtatggactggatttggcgcatccttttccttgtcggcgctgctaccggcgcgcattccttcgaacaggtgcagctggtggaatctggacctggcgtggtgcagcctggcagaagcctgagaatcagctgtgccgtgtccggcttcagcgtgaccaactacggcgtgcactgggtgcgccagccacctggaaaaggactggaatggctgggcgtgatctgggctggcggcatcaccaactacaacagcgccttcatgtcccggctgaccatctccaaggacaacagcaagaacaccgtgtacctccagatgaacagcctgcgggccgaggacaccgccatgtactactgtgcttccagaggcggccactacggctacgccctggattattggggccagggaaccctcgtgaccgtgtcctctacgcgtatccagaaccctgatcctgccgtgtaccagctgcgggatagcaagagcagcgacaagagcgtgtgtctgttcaccgacttcgacagccagaccaacgtgtcccagagcaaggactccgacgtgtacatcaccgataagtgcgtgctggacatgcggagcatggacttcaagagcaactccgccgtggcctggtccaacaagtccgatttcgcctgcgccaacgccttcaacaacagcattatccccgaggacacattcttcccaagccccgagagcagctgcgacgtgaagctggtggaaaagagcttcgagacagacaccaacctgaacttccagatcctgtacgagatcctgctgggcaaggccaccctgtacgccgtgctggtgtctgccctggtgctgatggctatggtcaagcggaaggacagccgggga

SEQ ID NO: 5021 - DNA, 1860 bp, synthetic construct
  source 1..1860: mol_type = other DNA
atggccttaccagtgaccgccttgctcctgccgctggccttgctgctccacgccgccaggccggacatccagatgacccagaccgccagcagcctgcctgcctctctgggcgacagagtgaccatctcctgtagcgccagccaggacatcagcaactacctgaactggtatcagcagaaacccgacggcaccgtgaagctgctgatcttctacagcagcaacctgcacagcggcgtgcccagcagattttctggcggcggaagcggcaccgactacagcctgaccatcagcaatctggaacccgaggacattgccacctacttttgccaccagtacagcaagctgccctggacctttggcggaggcaccaagctggaaatcaagagactcgaggacctgaagaacgtgttcccacctgaggtggccgtgttcgagcctagcgaggccgagatcagccacacccagaaagccaccctcgtgtgcctggctaccggcttctaccccgaccatgtggaactgtcttggtgggtcaacggcaaagaggtgcacagcggcgtgtgtaccgacccccagccactgaaagaacagcccgccctgaacgacagccggtactgcctgagcagcagactgagagtgtccgccaccttctggcagaacccccggaaccacttcagatgccaggtgcagttctacggcctgagcgagaacgacgagtggacccaggacagagccaagcccgtgacccagatcgtgtctgccgaagcctggggcagagccgattgcggctttaccagcgagagctaccagcagggcgtgctgagcgccaccaacctgagcgtgatcggcttcagaatcctgctgctgaaagtggccggctttaacctgctgatgaccctgcggctgtggtccagcagggccaagcgatctggatctggagcaacaaacttctcactactcaaacaagcaggtgacgtggaggagaatcccgggcctactagtatggactggatttggcgcatccttttccttgtcggcgctgctaccggcgcgcattccttcgaagaagtgaccctggtggaaagcggcggagacttcgtgaagcctggcggctctctgaaggtgtcctgtgccgccagcggcttcgcctttagccactacgccatgagctgggtgcgccagacccctgccaagagactggaatgggtggcctacatcagcagcggcggctccggcacctactactccgatagcgtgaagggccggttcaccatcagccgggacaacgccaagaacaccctgtacctccagatgcggagcctgcggagcgaggacagcgccatgtatttctgcaccagagtgaagctgggcacctattacttcgactcttggggccagggcaccaccctgaccgtgtcatctacgcgtatccagaaccctgatcctgccgtgtaccagctgcgggatagcaagagcagcgacaagagcgtgtgtctgttcaccgacttcgacagccagaccaacgtgtcccagagcaaggactccgacgtgtacatcaccgataagtgcgtgctggacatgcggagcatggacttcaagagcaactccgccgtggcctggtccaacaagtccgatttcgcctgcgccaacgccttcaacaacagcattatccccgaggacacattcttcccaagccccgagagcagctgcgacgtgaagctggtggaaaagagcttcgagacagacaccaacctgaacttccagatcctgtacgagatcctgctgggcaaggccaccctgtacgccgtgctggtgtctgccctggtgctgatggctatggtcaagcggaaggacagccgggga

SEQ ID NO: 5022 - DNA, 1866 bp, synthetic construct
  source 1..1866: mol_type = other DNA
atggccttaccagtgaccgccttgctcctgccgctggccttgctgctccacgccgccaggccgcagttcgtgctgacccagagcccttctgcctctgctgccctgggagcctctgccaagctgacctgtacactgagcagcgcccacaagacctacaccatcgactggtatcagcagcagaagggaaaggcccccagatacctgatccaagtgaagtccgacggcacctacacaaaggccaccggcgtgcccgatagattcagcggcagtagcagcggagccgatagatacctgattatccccagcgtgcaggccgacgacgaggccgattactactgcggcaccgattacaccggcggctacgtgttcggcggaggcacacaactgaccgtgacactcgaggacctgaagaacgtgttcccacctgaggtggccgtgttcgagcctagcgaggccgagatcagccacacccagaaagccaccctcgtgtgcctggctaccggcttctaccccgaccatgtggaactgtcttggtgggtcaacggcaaagaggtgcacagcggcgtgtgtaccgacccccagccactgaaagaacagcccgccctgaacgacagccggtactgcctgagcagcagactgagagtgtccgccaccttctggcagaacccccggaaccacttcagatgccaggtgcagttctacggcctgagcgagaacgacgagtggacccaggacagagccaagcccgtgacccagatcgtgtctgccgaagcctggggcagagccgattgcggctttaccagcgagagctaccagcagggcgtgctgagcgccaccaacctgagcgtgatcggcttcagaatcctgctgctgaaagtggccggctttaacctgctgatgaccctgcggctgtggtccagcagggccaagcgatctggatctggagcaacaaacttctcactactcaaacaagcaggtgacgtggaggagaatcccgggcctactagtatggactggatttggcgcatccttttccttgtcggcgctgctaccggcgcgcattccttcgaagagcaactgaaagagtctggcggcggactgttcaagcccaccgataccctgaccctgacctgcaccgtgtccggcttcagcctgagctactacggcgtgaactgggtgcgccaggcccctggcaatggcctggaatggatcggcacaatcggcggcagcggcgacacctactatgcctcttgggccaagtccagaagcaccatcatcagaaacaccaacgagaacaccgtgaccctgaagatgaccagcctgacagccgccgacaccgccacctacttttgcgtcagatacgccaacatcggctacgagtatttcaacgtgtggggacccggcaccctcgtgaccgtgtcatctacgcgtatccagaaccctgatcctgccgtgtaccagctgcgggatagcaagagcagcgacaagagcgtgtgtctgttcaccgacttcgacagccagaccaacgtgtcccagagcaaggactccgacgtgtacatcaccgataagtgcgtgctggacatgcggagcatggacttcaagagcaactccgccgtggcctggtccaacaagtccgatttcgcctgcgccaacgccttcaacaacagcattatccccgaggacacattcttcccaagccccgagagcagctgcgacgtgaagctggtggaaaagagcttcgagacagacaccaacctgaacttccagatcctgtacgagatcctgctgggcaaggccaccctgtacgccgtgctggtgtctgccctggtgctgatggctatggtcaagcggaaggacagccgggga

SEQ ID NO: 5023 - DNA, 1881 bp, synthetic construct
  source 1..1881: mol_type = other DNA
atggccttaccagtgaccgccttgctcctgccgctggccttgctgctccacgccgccaggccgcagttcgtgctgacccagagcccttctgtgtctgccgccctgggagcctctgccaagctgacctgtacactgagcagcgcccacaagacctacaccatcgactggtatcagcagcagcagggcgaggcccccagatacctgatgcaagtgaagtccgacggcagctacaccaagggcaccggcgtgcccgatagattcagcggcagtagcagcggagccgatagatacctgattatccccagcgtgcaggccgacgacgaggccggatatgtgtgcggcgctgacgacaatggcggctacgtgttcggcggaggcacccaactgacagtgacactcgaggacctgaagaacgtgttcccacctgaggtggccgtgttcgagcctagcgaggccgagatcagccacacccagaaagccaccctcgtgtgcctggctaccggcttctaccccgaccatgtggaactgtcttggtgggtcaacggcaaagaggtgcacagcggcgtgtgtaccgacccccagccactgaaagaacagcccgccctgaacgacagccggtactgcctgagcagcagactgagagtgtccgccaccttctggcagaacccccggaaccacttcagatgccaggtgcagttctacggcctgagcgagaacgacgagtggacccaggacagagccaagcccgtgacccagatcgtgtctgccgaagcctggggcagagccgattgcggctttaccagcgagagctaccagcagggcgtgctgagcgccaccaacctgagcgtgatcggcttcagaatcctgctgctgaaagtggccggctttaacctgctgatgaccctgcggctgtggtccagcagggccaagcgatctggatctggagcaacaaacttctcactactcaaacaagcaggtgacgtggaggagaatcccgggcctactagtatggactggatttggcgcatccttttccttgtcggcgctgctaccggcgcgcattccttcgaacagagcgtgaaagagtctgagggcggcctgttcaagcccaccgataccctgaccctgacctgcaccgtgtccggcttcagcctgagcagacacgccctgacatgggtgcgccaggcccctggaaatggcctggaatggatcggagccatcgacaacgccggcaccacctactatgcctcttgggccaagtccagaagcaccatcacccggaacaccgacctgcacaccgtgaccctgaagatgaccagcctgaccgccagcgacaccgccacctacttttgcgccagagtgttctacgacatcaacagcggctactacctggacggcatggacctgtggggacctggcacacttgtgaccgtgtccagcacgcgtatccagaaccctgatcctgccgtgtaccagctgcgggatagcaagagcagcgacaagagcgtgtgtctgttcaccgacttcgacagccagaccaacgtgtcccagagcaaggactccgacgtgtacatcaccgataagtgcgtgctggacatgcggagcatggacttcaagagcaactccgccgtggcctggtccaacaagtccgatttcgcctgcgccaacgccttcaacaacagcattatccccgaggacacattcttcccaagccccgagagcagctgcgacgtgaagctggtggaaaagagcttcgagacagacaccaacctgaacttccagatcctgtacgagatcctgctgggcaaggccaccctgtacgccgtgctggtgtctgccctggtgctgatggctatggtcaagcggaaggacagccgggga

SEQ ID NO: 5024 - DNA, 1863 bp, synthetic construct
  source 1..1863: mol_type = other DNA
atggccttaccagtgaccgccttgctcctgccgctggccttgctgctccacgccgccaggccggacatccagatgacccagagccccagcagcctgtctgccagcgtgggcgacagagtgaccatcacctgtagagccagccagggcatcagctcttggctggcctggtatcagcagaagcccgagaaggcccccaagagcctgatctacgccgcctctagtctccagagcggcgtgcccagcagattttctggcagcggctccggcaccgacttcaccctgacaatcagctccctccagcccgaggacttcgccacctactactgccagcagtacaacagctacccccccacctttggcggaggcaccaaggtggaaatcaagctcgaggacctgaagaacgtgttcccacctgaggtggccgtgttcgagcctagcgaggccgagatcagccacacccagaaagccaccctcgtgtgcctggctaccggcttctaccccgaccatgtggaactgtcttggtgggtcaacggcaaagaggtgcacagcggcgtgtgtaccgacccccagccactgaaagaacagcccgccctgaacgacagccggtactgcctgagcagcagactgagagtgtccgccaccttctggcagaacccccggaaccacttcagatgccaggtgcagttctacggcctgagcgagaacgacgagtggacccaggacagagccaagcccgtgacccagatcgtgtctgccgaagcctggggcagagccgattgcggctttaccagcgagagctaccagcagggcgtgctgagcgccaccaacctgagcgtgatcggcttcagaatcctgctgctgaaagtggccggctttaacctgctgatgaccctgcggctgtggtccagcagggccaagcgatctggatctggagcaacaaacttctcactactcaaacaagcaggtgacgtggaggagaatcccgggcctactagtatggactggatttggcgcatccttttccttgtcggcgctgctaccggcgcgcattccttcgaagaagtgcaactggtggaatcaggcggcggactggtgcagcctggcgagtctctgagactgagctgtgtggcctccggcttcaccttcagccggtacaagatgaactgggtgcgccaggcccctggcaagggactggaatgggtgtcctacatcagccgcagcggcagagacatctactacgccgacagcgtgaagggccggttcaccatcagcagagacaacgccaagaacagcctgtacctccagatgaactccctgcgggacgaggacaccgccgtgtactactgtgccggaaccgtgaccacctattactacttcggcatggacgtgtggggccacggcaccaccgtgacagtgtcatctacgcgtatccagaaccctgatcctgccgtgtaccagctgcgggatagcaagagcagcgacaagagcgtgtgtctgttcaccgacttcgacagccagaccaacgtgtcccagagcaaggactccgacgtgtacatcaccgataagtgcgtgctggacatgcggagcatggacttcaagagcaactccgccgtggcctggtccaacaagtccgatttcgcctgcgccaacgccttcaacaacagcattatccccgaggacacattcttcccaagccccgagagcagctgcgacgtgaagctggtggaaaagagcttcgagacagacaccaacctgaacttccagatcctgtacgagatcctgctgggcaaggccaccctgtacgccgtgctggtgtctgccctggtgctgatggctatggtcaagcggaaggacagccgggga

SEQ ID NO: 5025 - DNA, 1866 bp, synthetic construct
  source 1..1866: mol_type = other DNA
atggccttaccagtgaccgccttgctcctgccgctggccttgctgctccacgccgccaggccggacatccagatgacccagagccccagcagcctgtctgccagcgtgggcgacagagtgaccatcacctgtagagccagccagggcatcagctcttggctggcctggtatcagcagaagcccgagaaggcccccaagagcctgatctacgccgcctctagtctccagagcggcgtgcccagcagattttctggcagcggctccggcaccgacttcaccctgacaatcagctccctccagcccgaggacttcgccacctactactgccagcagtacaacagctaccctcccacctttggcggaggcaccaaggtggaaatcaagctcgaggacctgaagaacgtgttcccacctgaggtggccgtgttcgagcctagcgaggccgagatcagccacacccagaaagccaccctcgtgtgcctggctaccggcttctaccccgaccatgtggaactgtcttggtgggtcaacggcaaagaggtgcacagcggcgtgtgtaccgacccccagccactgaaagaacagcccgccctgaacgacagccggtactgcctgagcagcagactgagagtgtccgccaccttctggcagaacccccggaaccacttcagatgccaggtgcagttctacggcctgagcgagaacgacgagtggacccaggacagagccaagcccgtgacccagatcgtgtctgccgaagcctggggcagagccgattgcggctttaccagcgagagctaccagcagggcgtgctgagcgccaccaacctgagcgtgatcggcttcagaatcctgctgctgaaagtggccggctttaacctgctgatgaccctgcggctgtggtccagcagggccaagcgatctggatctggagcaacaaacttctcactactcaaacaagcaggtgacgtggaggagaatcccgggcctactagtatggactggatttggcgcatccttttccttgtcggcgctgctaccggcgcgcattccttcgaagaagtgcaactggtggaatccgggggaggctctgtgcagcctggcgagtctctgagactgagctgtgtggcctccggcttcaccttcagccggtacaagatgaactgggtgcgccaggcccctggcaagggactggaatgggtgtcctacatcagccgcagcggcagagacatctactacgccgacagcgtgaagggccggttcaccatcagcagagacaacgccaagaacagcctgtacctccagatgaactccctgcgggacgaggacaccgccgtgtactactgtgccggaaccgtgaccacctattactacgacttcggcatggacgtgtggggccagggcacaaccgtgacagtgtctagcacgcgtatccagaaccctgatcctgccgtgtaccagctgcgggatagcaagagcagcgacaagagcgtgtgtctgttcaccgacttcgacagccagaccaacgtgtcccagagcaaggactccgacgtgtacatcaccgataagtgcgtgctggacatgcggagcatggacttcaagagcaactccgccgtggcctggtccaacaagtccgatttcgcctgcgccaacgccttcaacaacagcattatccccgaggacacattcttcccaagccccgagagcagctgcgacgtgaagctggtggaaaagagcttcgagacagacaccaacctgaacttccagatcctgtacgagatcctgctgggcaaggccaccctgtacgccgtgctggtgtctgccctggtgctgatggctatggtcaagcggaaggacagccgggga

SEQ ID NO: 5026 - DNA, 1860 bp, synthetic construct
  source 1..1860: mol_type = other DNA
atggccttaccagtgaccgccttgctcctgccgctggccttgctgctccacgccgccaggccgcagtctgtgctgacacagcctccatctgcctctggcacacctggacagagagtgaccatcagctgtagcggcagcagaagcaacgtcggcggcaactacgtgttctggtatcagcaggtcccaggcgctacccctaagctgctgatctacagaagcaatcagcggcctagcggcgtgcccgatagatttgccggaagcaagagcggcagctctgccagccttgccatctctggactgagaagcgaggacgaggccgactactactgtgccacctgggatgatagcctgagcggcttcgtgtttggcaccggcaccaaagtgacagtgcttggtctcgaggacctgaagaacgtgttcccacctgaggtggccgtgttcgagcctagcgaggccgagatcagccacacccagaaagccaccctcgtgtgcctggctaccggcttctaccccgaccatgtggaactgtcttggtgggtcaacggcaaagaggtgcacagcggcgtgtgtaccgacccccagccactgaaagaacagcccgccctgaacgacagccggtactgcctgagcagcagactgagagtgtccgccaccttctggcagaacccccggaaccacttcagatgccaggtgcagttctacggcctgagcgagaacgacgagtggacccaggacagagccaagcccgtgacccagatcgtgtctgccgaagcctggggcagagccgattgcggctttaccagcgagagctaccagcagggcgtgctgagcgccaccaacctgagcgtgatcggcttcagaatcctgctgctgaaagtggccggctttaacctgctgatgaccctgcggctgtggtccagcagggccaagcgatctggatctggagcaacaaacttctcactactcaaacaagcaggtgacgtggaggagaatcccgggcctactagtatggactggatttggcgcatccttttccttgtcggcgctgctaccggcgcgcattccttcgaagttcagctggttgaatctggcggcggactggttaagcctggcggatctctgagactgtcttgtgccgccagcggcttcaccttcagcgattactacatgagctggatcagacaggcccctggcaaaggactggaatgggtgtcctacatcagcagcagcggctccaccatctactacgccgatagcgtgaagggcagattcaccatcagccgggacaacgccaagaacagcctgtacctccagatgaactccctgagagccgaggacaccgccgtgtactattgcgccagaggctacggcaaagcctacgatcaatggggccagggcacactggtcaccgtttcttctacgcgtatccagaaccctgatcctgccgtgtaccagctgcgggatagcaagagcagcgacaagagcgtgtgtctgttcaccgacttcgacagccagaccaacgtgtcccagagcaaggactccgacgtgtacatcaccgataagtgcgtgctggacatgcggagcatggacttcaagagcaactccgccgtggcctggtccaacaagtccgatttcgcctgcgccaacgccttcaacaacagcattatccccgaggacacattcttcccaagccccgagagcagctgcgacgtgaagctggtggaaaagagcttcgagacagacaccaacctgaacttccagatcctgtacgagatcctgctgggcaaggccaccctgtacgccgtgctggtgtctgccctggtgctgatggctatggtcaagcggaaggacagccgggga

SEQ ID NO: 5027 - DNA, 1857 bp, synthetic construct
  source 1..1857: mol_type = other DNA
atggccttaccagtgaccgccttgctcctgccgctggccttgctgctccacgccgccaggccgcagtctgtggtcacacagccacctagcatgtctgccgctccaggccagcaagtgaccatctcttgtagcggcggcaacagcaacatcgagcggaactacgtgtcctggtatctgcaactgcctggcacagcccctaagctggtcatcttcgacaacgacagacggcccagcggcatccccgatagattttctggcagcaagagcggcaccagcgccacactgggaattaccggacttcagacaggcgacgaggccgactactactgtggcacatgggactctagcctgagaggctgggttttcggcggaggcacaaagctgacagtgcttggtctcgaggacctgaagaacgtgttcccacctgaggtggccgtgttcgagcctagcgaggccgagatcagccacacccagaaagccaccctcgtgtgcctggctaccggcttctaccccgaccatgtggaactgtcttggtgggtcaacggcaaagaggtgcacagcggcgtgtgtaccgacccccagccactgaaagaacagcccgccctgaacgacagccggtactgcctgagcagcagactgagagtgtccgccaccttctggcagaacccccggaaccacttcagatgccaggtgcagttctacggcctgagcgagaacgacgagtggacccaggacagagccaagcccgtgacccagatcgtgtctgccgaagcctggggcagagccgattgcggctttaccagcgagagctaccagcagggcgtgctgagcgccaccaacctgagcgtgatcggcttcagaatcctgctgctgaaagtggccggctttaacctgctgatgaccctgcggctgtggtccagcagggccaagcgatctggatctggagcaacaaacttctcactactcaaacaagcaggtgacgtggaggagaatcccgggcctactagtatggactggatttggcgcatccttttccttgtcggcgctgctaccggcgcgcattccttcgaagtgcagctcgttgagtctggcggcggactgattcaacctggcggaagcctgagactgagctgtgccgcttccggcttcaccttcagcaactacgccatgaactgggttcgacaggcccctggcaaaggactggaatgggtgtccaccatcaacggcagaggcagcagcaccatctacgccgattctgtgaagggcagattcaccatcagccgggacaacagcaagaacaccctgtacctccagatgaactccctgagagccgaggacaccgccacctattactgtgcccggtacatcagcagaggactgggcgattcttggggccagggcacactggttacagtgacgcgtatccagaaccctgatcctgccgtgtaccagctgcgggatagcaagagcagcgacaagagcgtgtgtctgttcaccgacttcgacagccagaccaacgtgtcccagagcaaggactccgacgtgtacatcaccgataagtgcgtgctggacatgcggagcatggacttcaagagcaactccgccgtggcctggtccaacaagtccgatttcgcctgcgccaacgccttcaacaacagcattatccccgaggacacattcttcccaagccccgagagcagctgcgacgtgaagctggtggaaaagagcttcgagacagacaccaacctgaacttccagatcctgtacgagatcctgctgggcaaggccaccctgtacgccgtgctggtgtctgccctggtgctgatggctatggtcaagcggaaggacagccgggga

SEQ ID NO: 5028 - DNA, 1860 bp, synthetic construct
  source 1..1860: mol_type = other DNA
atggccttaccagtgaccgccttgctcctgccgctggccttgctgctccacgccgccaggccggacgtcgtgatgacccagacccctctgagcctgcctgtgtccctgggcgatcaggccagcatcagctgtagaagcagccagagcctggtgcacagcaacggcaacacctacctgcactggtatctccagaagcccggccagagccccaagctgctgatctacaaggtgtccaacagattcagcggcgtgcccgacagattctccggcagcggctctggcaccgacttcaccctgaagatcagccgggtggaagccgaggacctgggcgtgtacttctgtagccagaacacccccgtgccccccaagtttggcagcggcaccaagctggaaatcaagctcgaggacctgaagaacgtgttcccacctgaggtggccgtgttcgagcctagcgaggccgagatcagccacacccagaaagccaccctcgtgtgcctggctaccggcttctaccccgaccatgtggaactgtcttggtgggtcaacggcaaagaggtgcacagcggcgtgtgtaccgacccccagccactgaaagaacagcccgccctgaacgacagccggtactgcctgagcagcagactgagagtgtccgccaccttctggcagaacccccggaaccacttcagatgccaggtgcagttctacggcctgagcgagaacgacgagtggacccaggacagagccaagcccgtgacccagatcgtgtctgccgaagcctggggcagagccgattgcggctttaccagcgagagctaccagcagggcgtgctgagcgccaccaacctgagcgtgatcggcttcagaatcctgctgctgaaagtggccggctttaacctgctgatgaccctgcggctgtggtccagcagggccaagcgatctggatctggagcaacaaacttctcactactcaaacaagcaggtgacgtggaggagaatcccgggcctactagtatggactggatttggcgcatccttttccttgtcggcgctgctaccggcgcgcattccttcgaacaggtgcagctccagcagtctggcgctgaactcgtgcggcctggcgcttctgtgaagctgtcttgcaaggccagcggctacaccttcaacgactacgagatgcactgggtcaagcagacccctgtgcacggcctgaagtggatcggagccctggaacccaagaccggcgataccgcctacagccagaagttcaagggcaaggccaccctgaccgccgacaagagcagcagcacagcctacatggaactgcggagcctgaccagcgaggacagcgccgtgtactactgcaccagctgctactactacacctacagcggccagggcaccctcgtgacagtgtctgctacgcgtatccagaaccctgatcctgccgtgtaccagctgcgggatagcaagagcagcgacaagagcgtgtgtctgttcaccgacttcgacagccagaccaacgtgtcccagagcaaggactccgacgtgtacatcaccgataagtgcgtgctggacatgcggagcatggacttcaagagcaactccgccgtggcctggtccaacaagtccgatttcgcctgcgccaacgccttcaacaacagcattatccccgaggacacattcttcccaagccccgagagcagctgcgacgtgaagctggtggaaaagagcttcgagacagacaccaacctgaacttccagatcctgtacgagatcctgctgggcaaggccaccctgtacgccgtgctggtgtctgccctggtgctgatggctatggtcaagcggaaggacagccgggga

SEQ ID NO: 5029 - DNA, 1857 bp, synthetic construct
  source 1..1857: mol_type = other DNA
atggccttaccagtgaccgccttgctcctgccgctggccttgctgctccacgccgccaggccggacatccaactgacccagagccccagcagcctgtctgcctctgtgggcgacagagtgaccatcacctgtagagccagccagggcatcagaaacgacctgggctggtatcagcagaagcccggcaaggcccccaagcggctgatctatgctgccagctccctccagaatggcgtgcccagcagattttccggcagcggctctggcaccgagttcaccctgaccatcagctccctccagcccgaggacttcgccacctactactgcctccagcacaacacctaccccgccttcggccagggcaccaaggtggaaatcaagagactcgaggacctgaagaacgtgttcccacctgaggtggccgtgttcgagcctagcgaggccgagatcagccacacccagaaagccaccctcgtgtgcctggctaccggcttctaccccgaccatgtggaactgtcttggtgggtcaacggcaaagaggtgcacagcggcgtgtgtaccgacccccagccactgaaagaacagcccgccctgaacgacagccggtactgcctgagcagcagactgagagtgtccgccaccttctggcagaacccccggaaccacttcagatgccaggtgcagttctacggcctgagcgagaacgacgagtggacccaggacagagccaagcccgtgacccagatcgtgtctgccgaagcctggggcagagccgattgcggctttaccagcgagagctaccagcagggcgtgctgagcgccaccaacctgagcgtgatcggcttcagaatcctgctgctgaaagtggccggctttaacctgctgatgaccctgcggctgtggtccagcagggccaagcgatctggatctggagcaacaaacttctcactactcaaacaagcaggtgacgtggaggagaatcccgggcctactagtatggactggatttggcgcatccttttccttgtcggcgctgctaccggcgcgcattccttcgaacaggtgcaactccaggaatctggccctggcctcgtgaagcctagccagaccctgagcctgacctgtaccgtgtctggcggcagcatcagcagcttcaactactactggtcctggatcagacaccaccctggcaagggcctggaatggatcggctacatctactacagcggcagcacctacagcaaccccagcctgaagtcccgcgtgaccatctccgtggacaccagcaagaaccagtttagcctgaccctgtccagcgtgacagccgccgataccgccgtgtactactgcgccagaggctacaactggaactacttcgactactggggccagggaaccctcgtgaccgtgtctagtacgcgtatccagaaccctgatcctgccgtgtaccagctgcgggatagcaagagcagcgacaagagcgtgtgtctgttcaccgacttcgacagccagaccaacgtgtcccagagcaaggactccgacgtgtacatcaccgataagtgcgtgctggacatgcggagcatggacttcaagagcaactccgccgtggcctggtccaacaagtccgatttcgcctgcgccaacgccttcaacaacagcattatccccgaggacacattcttcccaagccccgagagcagctgcgacgtgaagctggtggaaaagagcttcgagacagacaccaacctgaacttccagatcctgtacgagatcctgctgggcaaggccaccctgtacgccgtgctggtgtctgccctggtgctgatggctatggtcaagcggaaggacagccgggga

SEQ ID NO: 5030 - DNA, 1863 bp, synthetic construct
  source 1..1863: mol_type = other DNA
atggccttaccagtgaccgccttgctcctgccgctggccttgctgctccacgccgccaggccggacgacatcgtgctgacccagagccccgccagcctggccgtgagcctgggccagagcgtgaccatcagctgcagagccagcgagagcgtggagtactacggcaccagcctgatgcagtggtaccagcagaagcccggccagccccccaagctgctgatctacgccaccagcaacgtggagagcggcgtgcccgccagattcagcggcagcggcagcggcaccgacttcagcctgaacatccaccccgtggaggaggacgacatcgccatgtacttctgccagcagagcagaaagctgcccagcaccttcggcggcggcaccaagctggagatcaagctcgaggacctgaagaacgtgttcccacctgaggtggccgtgttcgagcctagcgaggccgagatcagccacacccagaaagccaccctcgtgtgcctggctaccggcttctaccccgaccatgtggaactgtcttggtgggtcaacggcaaagaggtgcacagcggcgtgtgtaccgacccccagccactgaaagaacagcccgccctgaacgacagccggtactgcctgagcagcagactgagagtgtccgccaccttctggcagaacccccggaaccacttcagatgccaggtgcagttctacggcctgagcgagaacgacgagtggacccaggacagagccaagcccgtgacccagatcgtgtctgccgaagcctggggcagagccgattgcggctttaccagcgagagctaccagcagggcgtgctgagcgccaccaacctgagcgtgatcggcttcagaatcctgctgctgaaagtggccggctttaacctgctgatgaccctgcggctgtggtccagcagggccaagcgatctggatctggagcaacaaacttctcactactcaaacaagcaggtgacgtggaggagaatcccgggcctactagtatggactggatttggcgcatccttttccttgtcggcgctgctaccggcgcgcattccttcgaagacgtgagactgcaggagagcggccccggccaggtgaagcccagccagaccgtgagcctgacctgcagcgtgaccggctacagcatcaccaacggcaaccactggtggaactggatcagacaggtgagcggcagcaagctggagtggatcggctacatcagcagcagcggcagcaccgacagcaaccccagcctgaagagcagaatcagcatcaccagagacaccagcaagaaccagctgttcctgcagctgaacagcgtgaccaccgaggacatcgccacctactactgcgccagaggctactacttcgactactggggccagggcaccaccctgaccgtgagcagcacgcgtatccagaaccctgatcctgccgtgtaccagctgcgggatagcaagagcagcgacaagagcgtgtgtctgttcaccgacttcgacagccagaccaacgtgtcccagagcaaggactccgacgtgtacatcaccgataagtgcgtgctggacatgcggagcatggacttcaagagcaactccgccgtggcctggtccaacaagtccgatttcgcctgcgccaacgccttcaacaacagcattatccccgaggacacattcttcccaagccccgagagcagctgcgacgtgaagctggtggaaaagagcttcgagacagacaccaacctgaacttccagatcctgtacgagatcctgctgggcaaggccaccctgtacgccgtgctggtgtctgccctggtgctgatggctatggtcaagcggaaggacagccgggga

SEQ ID NO: 5031 - DNA, 1860 bp, synthetic construct
  source 1..1860: mol_type = other DNA
atggccttaccagtgaccgccttgctcctgccgctggccttgctgctccacgccgccaggccggacatccagatgacccagagccccagcagcctgtctgccagcgtgggcgacagagtgaccatcacctgtagagccagccaggacgtgaacaccgccgtggcctggtatcagcagaagcctggcaaggcccccaagctgctgatctacagcgccagcttcctggaaagcggcgtgcccagcagattcagcggaagcagaagcggcaccgacttcaccctgaccatcagctccctccagcccgaggacttcgccacctactactgccagcagcactacaccacccctcccaccttcggccagaccaaggtggaaatcaagagactcgaggacctgaagaacgtgttcccacctgaggtggccgtgttcgagcctagcgaggccgagatcagccacacccagaaagccaccctcgtgtgcctggctaccggcttctaccccgaccatgtggaactgtcttggtgggtcaacggcaaagaggtgcacagcggcgtgtgtaccgacccccagccactgaaagaacagcccgccctgaacgacagccggtactgcctgagcagcagactgagagtgtccgccaccttctggcagaacccccggaaccacttcagatgccaggtgcagttctacggcctgagcgagaacgacgagtggacccaggacagagccaagcccgtgacccagatcgtgtctgccgaagcctggggcagagccgattgcggctttaccagcgagagctaccagcagggcgtgctgagcgccaccaacctgagcgtgatcggcttcagaatcctgctgctgaaagtggccggctttaacctgctgatgaccctgcggctgtggtccagcagggccaagcgatctggatctggagcaacaaacttctcactactcaaacaagcaggtgacgtggaggagaatcccgggcctactagtatggactggatttggcgcatccttttccttgtcggcgctgctaccggcgcgcattccttcgaagaagtgcaactggtggaatctggcggcggactggtgcagcctggcggatctctgagactgagctgtgccgccagcggcttcaacatcaaggacacctacatccactgggtgcgccaggcccctggaaagggactggaatgggtggcccggatctaccccaccaacggctacaccagatacgccgacagcgtgaagggccggttcaccatcagcgccgacaccagcaagaataccgcctacctccagatgaacagcctgcgggccgaggataccgccgtgtactactgctcaagatggggaggcgacggcttctacgctatggacgtgtggggccagggcacccttgtgaccgtgtcatctacgcgtatccagaaccctgatcctgccgtgtaccagctgcgggatagcaagagcagcgacaagagcgtgtgtctgttcaccgacttcgacagccagaccaacgtgtcccagagcaaggactccgacgtgtacatcaccgataagtgcgtgctggacatgcggagcatggacttcaagagcaactccgccgtggcctggtccaacaagtccgatttcgcctgcgccaacgccttcaacaacagcattatccccgaggacacattcttcccaagccccgagagcagctgcgacgtgaagctggtggaaaagagcttcgagacagacaccaacctgaacttccagatcctgtacgagatcctgctgggcaaggccaccctgtacgccgtgctggtgtctgccctggtgctgatggctatggtcaagcggaaggacagccgggga

SEQ ID NO: 5032 - DNA, 1857 bp, synthetic construct
  source 1..1857: mol_type = other DNA
atggccttaccagtgaccgccttgctcctgccgctggccttgctgctccacgccgccaggccggaccagagcgtgctgacacagcctcctagcgtgtcagtggcccctggcaagaccgccagaatcccctgcgagggcaactacatcggcagcagcaacgtgcactggtatcagcagaagcccggccaggctcccgtgctcgtgatccacttcgacagcgacagacccagcggcatccccgacagattcagcggcagcaacagcggcaacatggctaccctgaccatcagcagagtggaagccggggacgaggccgactactactgtcaagtgtgggagaaccacggctgggtgttcggcggaggcaccaagctgacagtgctgtctctcgaggacctgaagaacgtgttcccacctgaggtggccgtgttcgagcctagcgaggccgagatcagccacacccagaaagccaccctcgtgtgcctggctaccggcttctaccccgaccatgtggaactgtcttggtgggtcaacggcaaagaggtgcacagcggcgtgtgtaccgacccccagccactgaaagaacagcccgccctgaacgacagccggtactgcctgagcagcagactgagagtgtccgccaccttctggcagaacccccggaaccacttcagatgccaggtgcagttctacggcctgagcgagaacgacgagtggacccaggacagagccaagcccgtgacccagatcgtgtctgccgaagcctggggcagagccgattgcggctttaccagcgagagctaccagcagggcgtgctgagcgccaccaacctgagcgtgatcggcttcagaatcctgctgctgaaagtggccggctttaacctgctgatgaccctgcggctgtggtccagcagggccaagcgatctggatctggagcaacaaacttctcactactcaaacaagcaggtgacgtggaggagaatcccgggcctactagtatggactggatttggcgcatccttttccttgtcggcgctgctaccggcgcgcattccttcgaagaggtgcaactggtggaaacaggcggcggactggtgcagcctggcgagtctctgagactgagctgtgccgccagcggcttcaccttcagcgactacgagatgaactgggtgcgccaggcccctggaaagggcctggaatgggtgtcctacatcagcagctccggcagcaccatctactacgccgacagcgtgaagggccggtttaccatctaccgggacaacgccaagaacagcctgtacctccagatgaactccctgcgggccgaggacaccgccctgtactattgtgccagagcctggggcgtgggaccccctgattattggggacagggcaccctcgtgaccgtgtcctctacgcgtatccagaaccctgatcctgccgtgtaccagctgcgggatagcaagagcagcgacaagagcgtgtgtctgttcaccgacttcgacagccagaccaacgtgtcccagagcaaggactccgacgtgtacatcaccgataagtgcgtgctggacatgcggagcatggacttcaagagcaactccgccgtggcctggtccaacaagtccgatttcgcctgcgccaacgccttcaacaacagcattatccccgaggacacattcttcccaagccccgagagcagctgcgacgtgaagctggtggaaaagagcttcgagacagacaccaacctgaacttccagatcctgtacgagatcctgctgggcaaggccaccctgtacgccgtgctggtgtctgccctggtgctgatggctatggtcaagcggaaggacagccgggga

SEQ ID NO: 5033 - DNA, 1881 bp, synthetic construct
  source 1..1881: mol_type = other DNA
atggccttaccagtgaccgccttgctcctgccgctggccttgctgctccacgccgccaggccggacatccagatgacccagagccccagcagcctgtctgccagcgtgggcgataccgtgaccatcacctgtcaggccaacggctacctgaactggtatcagcagcggagaggcaaggcccccaagctgctgatctacgacggcagcaagctggaaagaggcgtgcccagcagattcagcggcagaagatggggccaggagtacaacctgaccatcaacaacctccagcccgaggatattgccacatacttttgccaggtgtacgagttcgtggtgcccggcacacggctggacctgaagagaacagtggctgctcctctcgaggacctgaagaacgtgttcccacctgaggtggccgtgttcgagcctagcgaggccgagatcagccacacccagaaagccaccctcgtgtgcctggctaccggcttctaccccgaccatgtggaactgtcttggtgggtcaacggcaaagaggtgcacagcggcgtgtgtaccgacccccagccactgaaagaacagcccgccctgaacgacagccggtactgcctgagcagcagactgagagtgtccgccaccttctggcagaacccccggaaccacttcagatgccaggtgcagttctacggcctgagcgagaacgacgagtggacccaggacagagccaagcccgtgacccagatcgtgtctgccgaagcctggggcagagccgattgcggctttaccagcgagagctaccagcagggcgtgctgagcgccaccaacctgagcgtgatcggcttcagaatcctgctgctgaaagtggccggctttaacctgctgatgaccctgcggctgtggtccagcagggccaagcgatctggatctggagcaacaaacttctcactactcaaacaagcaggtgacgtggaggagaatcccgggcctactagtatggactggatttggcgcatccttttccttgtcggcgctgctaccggcgcgcattccttcgaacaggtgcagctgctccagtctggcgctgccgtgacaaagcctggcgcttctgtgcgggtgtcctgtgaagccagcggctacaacatccgggactacttcatccactggtggcggcaggctccaggccagggactccagtgggtgggatggatcaaccccaagaccggccagcccaacaaccccagacagttccagggcagagtgtccctgaccagacacgccagctgggacttcgacaccttcagcttctacatggatctgaaggccctgcggagcgacgataccgccgtgtacttctgcgccagacagagaagcgactactgggatttcgacgtgtggggcagcggcacccaagtgacagtgtctagcgccagcaccaagggacccacgcgtatccagaaccctgatcctgccgtgtaccagctgcgggatagcaagagcagcgacaagagcgtgtgtctgttcaccgacttcgacagccagaccaacgtgtcccagagcaaggactccgacgtgtacatcaccgataagtgcgtgctggacatgcggagcatggacttcaagagcaactccgccgtggcctggtccaacaagtccgatttcgcctgcgccaacgccttcaacaacagcattatccccgaggacacattcttcccaagccccgagagcagctgcgacgtgaagctggtggaaaagagcttcgagacagacaccaacctgaacttccagatcctgtacgagatcctgctgggcaaggccaccctgtacgccgtgctggtgtctgccctggtgctgatggctatggtcaagcggaaggacagccgggga

SEQ ID NO: 5034 - DNA, 1899 bp, synthetic construct
  source 1..1899: mol_type = other DNA
atggccttaccagtgaccgccttgctcctgccgctggccttgctgctccacgccgccaggccgcagtctgccctgacacagcctcctagcgcctctggctctcccggccagagcatcaccatcagctgtaccggcaccagcaacaacttcgtgtcctggtatcagcagcacgccggcaaggcccccaagctcgtgatctacgacgtgaacaagcggcccagcggcgtgcccgatagattcagcggcagcaagagcggcaacaccgccagcctgacagtgtctggcctccagaccgatgacgaggccgtgtactactgcggcagcctcgtgggcaactgggacgtgatctttggcggaggcaccaagctgaccgtgctgctcgaggacctgaagaacgtgttcccacctgaggtggccgtgttcgagcctagcgaggccgagatcagccacacccagaaagccaccctcgtgtgcctggctaccggcttctaccccgaccatgtggaactgtcttggtgggtcaacggcaaagaggtgcacagcggcgtgtgtaccgacccccagccactgaaagaacagcccgccctgaacgacagccggtactgcctgagcagcagactgagagtgtccgccaccttctggcagaacccccggaaccacttcagatgccaggtgcagttctacggcctgagcgagaacgacgagtggacccaggacagagccaagcccgtgacccagatcgtgtctgccgaagcctggggcagagccgattgcggctttaccagcgagagctaccagcagggcgtgctgagcgccaccaacctgagcgtgatcggcttcagaatcctgctgctgaaagtggccggctttaacctgctgatgaccctgcggctgtggtccagcagggccaagcgatctggatctggagcaacaaacttctcactactcaaacaagcaggtgacgtggaggagaatcccgggcctactagtatggactggatttggcgcatccttttccttgtcggcgctgctaccggcgcgcattccttcgaacagccccagctccaggaatctggccccacactggtggaagccagcgagacactgagcctgacctgtgccgtgtccggcgattctaccgccgcctgcaatagcttctggggctgggtgcgccagcctcctggaaagggactggaatgggtgggaagcctgagccactgcgccagctattggaaccggggctggacctaccacaaccccagcctgaagtccagactgaccctggccctggacacccccaagaacctggtgttcctgaagctgaacagcgtgacagccgccgacaccgccacctactactgtgccagatttggcggcgaggtgctgcggtacaccgactggcctaaacctgcctgggtggacctgtggggcagaggaacactcgtgaccgtgtccagcacgcgtatccagaaccctgatcctgccgtgtaccagctgcgggatagcaagagcagcgacaagagcgtgtgtctgttcaccgacttcgacagccagaccaacgtgtcccagagcaaggactccgacgtgtacatcaccgataagtgcgtgctggacatgcggagcatggacttcaagagcaactccgccgtggcctggtccaacaagtccgatttcgcctgcgccaacgccttcaacaacagcattatccccgaggacacattcttcccaagccccgagagcagctgcgacgtgaagctggtggaaaagagcttcgagacagacaccaacctgaacttccagatcctgtacgagatcctgctgggcaaggccaccctgtacgccgtgctggtgtctgccctggtgctgatggctatggtcaagcggaaggacagccgggga

SEQ ID NO: 5035 - DNA, 1854 bp, synthetic construct
  source 1..1854: mol_type = other DNA
atggccttaccagtgaccgccttgctcctgccgctggccttgctgctccacgccgccaggccggagatcgtgctgacacagagccctggcaccctgagcctgtctccaggcgagacagccatcatcagctgccggacaagccagtacggcagcctggcctggtatcagcagaggccaggacaggcccccagactcgtgatctacagcggcagcacaagagccgccggaatccccgatagattcagcggctccagatggggacccgactacaacctgaccatcagcaacctggaaagcggcgacttcggcgtgtactactgccagcagtacgagttcttcggccagggcaccaaggtgcaggtggacatcaaaagactcgaggacctgaagaacgtgttcccacctgaggtggccgtgttcgagcctagcgaggccgagatcagccacacccagaaagccaccctcgtgtgcctggctaccggcttctaccccgaccatgtggaactgtcttggtgggtcaacggcaaagaggtgcacagcggcgtgtgtaccgacccccagccactgaaagaacagcccgccctgaacgacagccggtactgcctgagcagcagactgagagtgtccgccaccttctggcagaacccccggaaccacttcagatgccaggtgcagttctacggcctgagcgagaacgacgagtggacccaggacagagccaagcccgtgacccagatcgtgtctgccgaagcctggggcagagccgattgcggctttaccagcgagagctaccagcagggcgtgctgagcgccaccaacctgagcgtgatcggcttcagaatcctgctgctgaaagtggccggctttaacctgctgatgaccctgcggctgtggtccagcagggccaagcgatctggatctggagcaacaaacttctcactactcaaacaagcaggtgacgtggaggagaatcccgggcctactagtatggactggatttggcgcatccttttccttgtcggcgctgctaccggcgcgcattccttcgaacaggtgcagctggtgcagtctggcggccagatgaagaaacccggcgagagcatgagaatcagctgtcgggcctccggctacgagttcatcgactgcaccctgaactggatcagactggcccctggcaagcggcctgagtggatgggatggctgaagcctagaggcggagccgtgaactacgccagacctctccagggcagagtgaccatgaccagggacgtgtacagcgataccgccttcctggaactgcggagcctgaccgtggatgataccgccgtgtacttctgcaccagaggcaagaactgcgattacaactgggacttcgagcactggggcagaggcacccctgtgatcgtgtctagcacgcgtatccagaaccctgatcctgccgtgtaccagctgcgggatagcaagagcagcgacaagagcgtgtgtctgttcaccgacttcgacagccagaccaacgtgtcccagagcaaggactccgacgtgtacatcaccgataagtgcgtgctggacatgcggagcatggacttcaagagcaactccgccgtggcctggtccaacaagtccgatttcgcctgcgccaacgccttcaacaacagcattatccccgaggacacattcttcccaagccccgagagcagctgcgacgtgaagctggtggaaaagagcttcgagacagacaccaacctgaacttccagatcctgtacgagatcctgctgggcaaggccaccctgtacgccgtgctggtgtctgccctggtgctgatggctatggtcaagcggaaggacagccgggga

SEQ ID NO: 5036 - DNA, 1884 bp, synthetic construct
  source 1..1884: mol_type = other DNA
atggccttaccagtgaccgccttgctcctgccgctggccttgctgctccacgccgccaggccggagctggtgctgacacagagccctggcaccctgtctctgtctgccggcgaaagagccaccctgagctgtagagccagccagagcgtgtcctctggcagcctggcttggtatcagcagaagccaggccaggcccccagactgctgatctacggcgcttctaccagagccaccggcatccccgatagattcagcggctctggctccggcaccgacttcaccctgacaatcggcagactggaacccgaggacctggccgtgtactactgccagcagtacggcaccagcccctacacattcggccagggcaccaagctggaaatcctcgaggacctgaagaacgtgttcccacctgaggtggccgtgttcgagcctagcgaggccgagatcagccacacccagaaagccaccctcgtgtgcctggctaccggcttctaccccgaccatgtggaactgtcttggtgggtcaacggcaaagaggtgcacagcggcgtgtgtaccgacccccagccactgaaagaacagcccgccctgaacgacagccggtactgcctgagcagcagactgagagtgtccgccaccttctggcagaacccccggaaccacttcagatgccaggtgcagttctacggcctgagcgagaacgacgagtggacccaggacagagccaagcccgtgacccagatcgtgtctgccgaagcctggggcagagccgattgcggctttaccagcgagagctaccagcagggcgtgctgagcgccaccaacctgagcgtgatcggcttcagaatcctgctgctgaaagtggccggctttaacctgctgatgaccctgcggctgtggtccagcagggccaagcgatctggatctggagcaacaaacttctcactactcaaacaagcaggtgacgtggaggagaatcccgggcctactagtatggactggatttggcgcatccttttccttgtcggcgctgctaccggcgcgcattccttcgaactggaacagagcggagccgaagtgaagaaacccggcagcagcgtgcaggtgtcctgcaaagcaagcggcggcaccttctctatgtacggcttcaactgggtgcgccaggctcctggacacggcctggaatggatgggcggcatcatccccatcttcggcacctccaactacgcccagaaattccggggcagagtgaccttcaccgccgaccaggccacaagcaccgcctacatggaactgaccaacctgcggagcgacgacaccgccgtgtattattgcgccagagacttcggccccgactgggaggatggcgacagctacgatggcagcggcagaggcttcttcgacttctggggccagggaacccttgtgaccgtgtcctcaacgcgtatccagaaccctgatcctgccgtgtaccagctgcgggatagcaagagcagcgacaagagcgtgtgtctgttcaccgacttcgacagccagaccaacgtgtcccagagcaaggactccgacgtgtacatcaccgataagtgcgtgctggacatgcggagcatggacttcaagagcaactccgccgtggcctggtccaacaagtccgatttcgcctgcgccaacgccttcaacaacagcattatccccgaggacacattcttcccaagccccgagagcagctgcgacgtgaagctggtggaaaagagcttcgagacagacaccaacctgaacttccagatcctgtacgagatcctgctgggcaaggccaccctgtacgccgtgctggtgtctgccctggtgctgatggctatggtcaagcggaaggacagccgggga

SEQ ID NO: 5037 - DNA, 1824 bp, synthetic construct
  source 1..1824: mol_type = other DNA
atggccttaccagtgaccgccttgctcctgccgctggccttgctgctccacgccgccaggccggacatccagatgacccagagccccagcagcctgtctgccagcgtgggcgacagagtgaccatcacctgtcaggccagccaggacatcaacaactacctgaactggtatcagcagaagcccggcaaggcccccaagctgctgatctacgacgccagcaatctgcagaccggcgtgcccagcagattttccggctctggcagcggcaccgacttcaccttcaccatcgaggacattgccacctactactgccagcagtacaccttcggccctggcaccaaggtggacatcaaactcgaggacctgaagaacgtgttcccacctgaggtggccgtgttcgagcctagcgaggccgagatcagccacacccagaaagccaccctcgtgtgcctggctaccggcttctaccccgaccatgtggaactgtcttggtgggtcaacggcaaagaggtgcacagcggcgtgtgtaccgacccccagccactgaaagaacagcccgccctgaacgacagccggtactgcctgagcagcagactgagagtgtccgccaccttctggcagaacccccggaaccacttcagatgccaggtgcagttctacggcctgagcgagaacgacgagtggacccaggacagagccaagcccgtgacccagatcgtgtctgccgaagcctggggcagagccgattgcggctttaccagcgagagctaccagcagggcgtgctgagcgccaccaacctgagcgtgatcggcttcagaatcctgctgctgaaagtggccggctttaacctgctgatgaccctgcggctgtggtccagcagggccaagcgatctggatctggagcaacaaacttctcactactcaaacaagcaggtgacgtggaggagaatcccgggcctactagtatggactggatttggcgcatccttttccttgtcggcgctgctaccggcgcgcattccttcgaagaagtgcaactgctggaatctggcggcggactggtgcagcctggcggatctctgagactgagctgtgccgccagcggcttcacctttagctggtacagcatgacctgggtgcgccaggcccctggcaaaggactggaatgggtgtccagcatcgtgccctggggcgatttcacccagtacgccgatagcgtgaagggccggttcaccatcagccgggacaacagcaagaacaccctgtacctgcagatgaacagcctgcgggccgaggacaccgccgtgtactattgtgccaagggacctggctggggcagcttcgatctgtggggcagaggaacccttgtgaccgtgtccagcacgcgtatccagaaccctgatcctgccgtgtaccagctgcgggatagcaagagcagcgacaagagcgtgtgtctgttcaccgacttcgacagccagaccaacgtgtcccagagcaaggactccgacgtgtacatcaccgataagtgcgtgctggacatgcggagcatggacttcaagagcaactccgccgtggcctggtccaacaagtccgatttcgcctgcgccaacgccttcaacaacagcattatccccgaggacacattcttcccaagccccgagagcagctgcgacgtgaagctggtggaaaagagcttcgagacagacaccaacctgaacttccagatcctgtacgagatcctgctgggcaaggccaccctgtacgccgtgctggtgtctgccctggtgctgatggctatggtcaagcggaaggacagccgggga

SEQ ID NO: 5038 - DNA, 1854 bp, synthetic construct
  source 1..1854: mol_type = other DNA
atggccttaccagtgaccgccttgctcctgccgctggccttgctgctccacgccgccaggccggacatccagatgacccagagccccagcagcctgtctgccagcgtgggcgacagagtgaccatcacctgtaccgccagcctgagcgtgtccagcacctacctgcactggtatcagcagaagcccggcagcagccccaagctgtggatctacagcaccagcaacctggcctccggcgtgcccagcagattttctggcagcggctctggcaccagctacaccctgaccatcagctccctccagcccgaggacttcgccacctactactgccaccagtaccacagaagccccctgacctttggcggaggcaccaaggtggaaatcaagagactcgaggacctgaagaacgtgttcccacctgaggtggccgtgttcgagcctagcgaggccgagatcagccacacccagaaagccaccctcgtgtgcctggctaccggcttctaccccgaccatgtggaactgtcttggtgggtcaacggcaaagaggtgcacagcggcgtgtgtaccgacccccagccactgaaagaacagcccgccctgaacgacagccggtactgcctgagcagcagactgagagtgtccgccaccttctggcagaacccccggaaccacttcagatgccaggtgcagttctacggcctgagcgagaacgacgagtggacccaggacagagccaagcccgtgacccagatcgtgtctgccgaagcctggggcagagccgattgcggctttaccagcgagagctaccagcagggcgtgctgagcgccaccaacctgagcgtgatcggcttcagaatcctgctgctgaaagtggccggctttaacctgctgatgaccctgcggctgtggtccagcagggccaagcgatctggatctggagcaacaaacttctcactactcaaacaagcaggtgacgtggaggagaatcccgggcctactagtatggactggatttggcgcatccttttccttgtcggcgctgctaccggcgcgcattccttcgaagaagtgcaactggtggaatctggcggcggactggtgcagcctggcggatctctgagactgagctgtgccgccagcggcttcagcctgaccaaatacggcgtgcactgggtgcgccaggcccctggaaaaggactggaatgggtgggagtgaagtgggctggcggctccaccgactacaacagcgccctgatgagccggttcaccatcagcaaggacaacgccaagaacagcctgtacctccagatgaactccctgcgggccgaggacaccgccgtgtactactgtgccagagatcaccgggacgctatggactactggggccagggaacactcgtgaccgtgtcctctacgcgtatccagaaccctgatcctgccgtgtaccagctgcgggatagcaagagcagcgacaagagcgtgtgtctgttcaccgacttcgacagccagaccaacgtgtcccagagcaaggactccgacgtgtacatcaccgataagtgcgtgctggacatgcggagcatggacttcaagagcaactccgccgtggcctggtccaacaagtccgatttcgcctgcgccaacgccttcaacaacagcattatccccgaggacacattcttcccaagccccgagagcagctgcgacgtgaagctggtggaaaagagcttcgagacagacaccaacctgaacttccagatcctgtacgagatcctgctgggcaaggccaccctgtacgccgtgctggtgtctgccctggtgctgatggctatggtcaagcggaaggacagccgggga

SEQ ID NO: 5039 - DNA, 1866 bp, synthetic construct
  source 1..1866: mol_type = other DNA
atggccttaccagtgaccgccttgctcctgccgctggccttgctgctccacgccgccaggccggacatccagatgacccagagccccagcagcctgtctgccagcgtgggcgacagagtgaccatcacatgcaaggccagccaggacgtgggaacagccgtggcctggtatcagcagaagcctggcaaggcccccaagctgctgatctacagcgccagctacagatccaccggcgtgcccagcagattttccggctctggcagcggcaccgacttcaccctgaccatctctagcctccagcccgaggacttcgccacctactactgccagcaccactactccgccccctggacatttggcggaggcaccaaggtggaaatcaagctcgaggacctgaagaacgtgttcccacctgaggtggccgtgttcgagcctagcgaggccgagatcagccacacccagaaagccaccctcgtgtgcctggctaccggcttctaccccgaccatgtggaactgtcttggtgggtcaacggcaaagaggtgcacagcggcgtgtgtaccgacccccagccactgaaagaacagcccgccctgaacgacagccggtactgcctgagcagcagactgagagtgtccgccaccttctggcagaacccccggaaccacttcagatgccaggtgcagttctacggcctgagcgagaacgacgagtggacccaggacagagccaagcccgtgacccagatcgtgtctgccgaagcctggggcagagccgattgcggctttaccagcgagagctaccagcagggcgtgctgagcgccaccaacctgagcgtgatcggcttcagaatcctgctgctgaaagtggccggctttaacctgctgatgaccctgcggctgtggtccagcagggccaagcgatctggatctggagcaacaaacttctcactactcaaacaagcaggtgacgtggaggagaatcccgggcctactagtatggactggatttggcgcatccttttccttgtcggcgctgctaccggcgcgcattccttcgaagaagtgcaactggtggaatcaggcggcggactggtgcagcctggcggatctctgagactgagctgtgccgccagcggcttcaccttcagcagaaacggcatgagctgggtgcgccaggcccctggaaaaggactggaatgggtggcaaccgtgtccagcggcggcagctacatctactacgccgacagcgtgaagggccggttcaccatctccagagacaacgccaagaacagcctgtacctccagatgaactccctgcgggccgaggacaccgccgtgtactattgtgccagacagggcaccaccgccctggctaccagattcttcgatgtgtggggccagggcaccctcgtgaccgtgtcatctacgcgtatccagaaccctgatcctgccgtgtaccagctgcgggatagcaagagcagcgacaagagcgtgtgtctgttcaccgacttcgacagccagaccaacgtgtcccagagcaaggactccgacgtgtacatcaccgataagtgcgtgctggacatgcggagcatggacttcaagagcaactccgccgtggcctggtccaacaagtccgatttcgcctgcgccaacgccttcaacaacagcattatccccgaggacacattcttcccaagccccgagagcagctgcgacgtgaagctggtggaaaagagcttcgagacagacaccaacctgaacttccagatcctgtacgagatcctgctgggcaaggccaccctgtacgccgtgctggtgtctgccctggtgctgatggctatggtcaagcggaaggacagccgggga

SEQ ID NO: 5040 - DNA, 1854 bp, synthetic construct
  source 1..1854: mol_type = other DNA
atggccttaccagtgaccgccttgctcctgccgctggccttgctgctccacgccgccaggccggacatccagatgacccagagcccccctagcctgtctgcctctgtgggcggcaaagtgaccatcacatgcaaggccagccaggacatcgaccgctacatggcctggtatcaggacaagcccggcaagggacccaagctgctgatccacgataccagcaccctccagcccggcatccccagcagattttctggcagcggctccggcagagactacagcttcagcatcagcaacctggaacccgaggacattgccacctactactgcctccagtacgacaacctgtggaccttcggcggaggcaccaagctggaaatcaagagactcgaggacctgaagaacgtgttcccacctgaggtggccgtgttcgagcctagcgaggccgagatcagccacacccagaaagccaccctcgtgtgcctggctaccggcttctaccccgaccatgtggaactgtcttggtgggtcaacggcaaagaggtgcacagcggcgtgtgtaccgacccccagccactgaaagaacagcccgccctgaacgacagccggtactgcctgagcagcagactgagagtgtccgccaccttctggcagaacccccggaaccacttcagatgccaggtgcagttctacggcctgagcgagaacgacgagtggacccaggacagagccaagcccgtgacccagatcgtgtctgccgaagcctggggcagagccgattgcggctttaccagcgagagctaccagcagggcgtgctgagcgccaccaacctgagcgtgatcggcttcagaatcctgctgctgaaagtggccggctttaacctgctgatgaccctgcggctgtggtccagcagggccaagcgatctggatctggagcaacaaacttctcactactcaaacaagcaggtgacgtggaggagaatcccgggcctactagtatggactggatttggcgcatccttttccttgtcggcgctgctaccggcgcgcattccttcgaacaggtgcaactggtgcagagcggagccgagcttgtgaagcctggcgcttccgtgaagatgagctgcaaagccagcggctacatcttcaccaactacaacatccactgggtcaagaagtccccaggccagggcctggaatggatcggagccatctaccccggaaacggcgacgccccttacagccagaagttccaggacagagccaccctgaccgccgacaccagcagcagcaccacctacatggaactgagcagcctgaccagcgaggacagcgccgtgtactattgcgtgcgggccaactgggatgtggccttcgcctattggggccagggcacactggtgtccgtgtcctctacgcgtatccagaaccctgatcctgccgtgtaccagctgcgggatagcaagagcagcgacaagagcgtgtgtctgttcaccgacttcgacagccagaccaacgtgtcccagagcaaggactccgacgtgtacatcaccgataagtgcgtgctggacatgcggagcatggacttcaagagcaactccgccgtggcctggtccaacaagtccgatttcgcctgcgccaacgccttcaacaacagcattatccccgaggacacattcttcccaagccccgagagcagctgcgacgtgaagctggtggaaaagagcttcgagacagacaccaacctgaacttccagatcctgtacgagatcctgctgggcaaggccaccctgtacgccgtgctggtgtctgccctggtgctgatggctatggtcaagcggaaggacagccgggga

SEQ ID NO: 5041 - DNA, 1857 bp, synthetic construct
  source 1..1857: mol_type = other DNA
atggccttaccagtgaccgccttgctcctgccgctggccttgctgctccacgccgccaggccggacatccagatgacccagagccctgccagcctgtctgcctctgtgggcgagacagtgaccatcacctgtcgggtgtccggcaacatccacaactacctggcctggtatcagcagaagcagggcaagagcccccaactgctggtgtacaacgccaagaccctggccgatggcgtgcccagcagattttctggctctggcagcggcacccagtacagcctgaagatcaacagcctccagcccgaggacttcggcagctactactgccagcacttctggtccaacccctacaccttcggcggaggcaccaagctggaaatcaagctcgaggacctgaagaacgtgttcccacctgaggtggccgtgttcgagcctagcgaggccgagatcagccacacccagaaagccaccctcgtgtgcctggctaccggcttctaccccgaccatgtggaactgtcttggtgggtcaacggcaaagaggtgcacagcggcgtgtgtaccgacccccagccactgaaagaacagcccgccctgaacgacagccggtactgcctgagcagcagactgagagtgtccgccaccttctggcagaacccccggaaccacttcagatgccaggtgcagttctacggcctgagcgagaacgacgagtggacccaggacagagccaagcccgtgacccagatcgtgtctgccgaagcctggggcagagccgattgcggctttaccagcgagagctaccagcagggcgtgctgagcgccaccaacctgagcgtgatcggcttcagaatcctgctgctgaaagtggccggctttaacctgctgatgaccctgcggctgtggtccagcagggccaagcgatctggatctggagcaacaaacttctcactactcaaacaagcaggtgacgtggaggagaatcccgggcctactagtatggactggatttggcgcatccttttccttgtcggcgctgctaccggcgcgcattccttcgaacaggtgcaactccagcagtctggcgcttccgtgaaggtgtcctgcaaggccagcgaactcgtgcggcctggcacaggctacgccttcaccaattacctgatcgagtgggtcaagcagaggcccggacagggcctggaatggatcggagtgattaacccaggcagcggcggcaccaactacaacgagaagttcaagggcaaggccaccctgaccgccgacaagagcagcagcacagcctacatgcaactgagcagcctgaccagcgacgacagcgccgtgtacttctgcgcccggtacagaagctacgactggtacttcgacgtgtggggagccggcaccaccgtgacagtgtcatctacgcgtatccagaaccctgatcctgccgtgtaccagctgcgggatagcaagagcagcgacaagagcgtgtgtctgttcaccgacttcgacagccagaccaacgtgtcccagagcaaggactccgacgtgtacatcaccgataagtgcgtgctggacatgcggagcatggacttcaagagcaactccgccgtggcctggtccaacaagtccgatttcgcctgcgccaacgccttcaacaacagcattatccccgaggacacattcttcccaagccccgagagcagctgcgacgtgaagctggtggaaaagagcttcgagacagacaccaacctgaacttccagatcctgtacgagatcctgctgggcaaggccaccctgtacgccgtgctggtgtctgccctggtgctgatggctatggtcaagcggaaggacagccgggga

SEQ ID NO: 5042 - DNA, 1854 bp, synthetic construct
  source 1..1854: mol_type = other DNA
atggccttaccagtgaccgccttgctcctgccgctggccttgctgctccacgccgccaggccggacatccagatgacccagagcttcagcagcctgagcgccagcgtgggcgacagagtgaccatcacctgtagagccagccaggacatcagcaactacctgaactggtatcagcagaagcccggcaaggcccccaagctgctgatctactacaccagcagactgcacagcggcgtgcccagcagattttctggcagcggctccggcaccgactacaccctgacaatcagctccctgcagcccgaggacttcgctacctacttctgtcagcaaggcaacaccctgccctggacctttggcggaggcaccaagctggaaatcaagagactcgaggacctgaagaacgtgttcccacctgaggtggccgtgttcgagcctagcgaggccgagatcagccacacccagaaagccaccctcgtgtgcctggctaccggcttctaccccgaccatgtggaactgtcttggtgggtcaacggcaaagaggtgcacagcggcgtgtgtaccgacccccagccactgaaagaacagcccgccctgaacgacagccggtactgcctgagcagcagactgagagtgtccgccaccttctggcagaacccccggaaccacttcagatgccaggtgcagttctacggcctgagcgagaacgacgagtggacccaggacagagccaagcccgtgacccagatcgtgtctgccgaagcctggggcagagccgattgcggctttaccagcgagagctaccagcagggcgtgctgagcgccaccaacctgagcgtgatcggcttcagaatcctgctgctgaaagtggccggctttaacctgctgatgaccctgcggctgtggtccagcagggccaagcgatctggatctggagcaacaaacttctcactactcaaacaagcaggtgacgtggaggagaatcccgggcctactagtatggactggatttggcgcatccttttccttgtcggcgctgctaccggcgcgcattccttcgaagaagtgcaactggtgcagtccggcggagggctggtgcagagcggaggatctctgagactgagctgcagagccagcggctacaccttcacccggtactggatgctgtgggtgcgccagaggccaggcaagggactggaatgggtggccgagatcaacccccggaacgaccggaccaactacaacgagaagttcaagacccggttcaccatcagcgtggacagaagcaagaacaccctgtacctgcagatggacagcctgcgggccgaggataccgccgtgtacttttgtgctctgggaggcggctacgctatggactactggggccagggaacccttgtgaccgtgtcctctacgcgtatccagaaccctgatcctgccgtgtaccagctgcgggatagcaagagcagcgacaagagcgtgtgtctgttcaccgacttcgacagccagaccaacgtgtcccagagcaaggactccgacgtgtacatcaccgataagtgcgtgctggacatgcggagcatggacttcaagagcaactccgccgtggcctggtccaacaagtccgatttcgcctgcgccaacgccttcaacaacagcattatccccgaggacacattcttcccaagccccgagagcagctgcgacgtgaagctggtggaaaagagcttcgagacagacaccaacctgaacttccagatcctgtacgagatcctgctgggcaaggccaccctgtacgccgtgctggtgtctgccctggtgctgatggctatggtcaagcggaaggacagccgggga

SEQ ID NO: 5043 - DNA, 1857 bp, synthetic construct
  source 1..1857: mol_type = other DNA
atggccttaccagtgaccgccttgctcctgccgctggccttgctgctccacgccgccaggccggacatccagatgacacagtctccggcgtcactgtccgcctccgtgggggagactgtgactattatttgtagggcatcagttaacatctactcttatttggcctggtaccagcagaagcaaggcaagagtcctcagctgctggtgtataatgcgaagatcctggcagagggcgtgccgagccggttctccggcagcggctcaggtacccaattttccctcaagatcaattcactgcagccagaggactttggcagttactattgtcaacaccactacggcacattcactttcgggtccggtacaaaattggagattaagcgactcgaggacctgaagaacgtgttcccacctgaggtggccgtgttcgagcctagcgaggccgagatcagccacacccagaaagccaccctcgtgtgcctggctaccggcttctaccccgaccatgtggaactgtcttggtgggtcaacggcaaagaggtgcacagcggcgtgtgtaccgacccccagccactgaaagaacagcccgccctgaacgacagccggtactgcctgagcagcagactgagagtgtccgccaccttctggcagaacccccggaaccacttcagatgccaggtgcagttctacggcctgagcgagaacgacgagtggacccaggacagagccaagcccgtgacccagatcgtgtctgccgaagcctggggcagagccgattgcggctttaccagcgagagctaccagcagggcgtgctgagcgccaccaacctgagcgtgatcggcttcagaatcctgctgctgaaagtggccggctttaacctgctgatgaccctgcggctgtggtccagcagggccaagcgatctggatctggagcaacaaacttctcactactcaaacaagcaggtgacgtggaggagaatcccgggcctactagtatggactggatttggcgcatccttttccttgtcggcgctgctaccggcgcgcattccttcgaacaggtacagttgaaagaaagcgggcctggactggtagcgccttcccaatctctctccatcacgtgcaccatctctggcttctccctgacttcctatggagttcactgggtgaggcagccccccggcaagggactggaatggctggtcgtcatctggtccgacgggtccacaacctacaactccgctctgaaaagtcggctctctatttctaaagataatagcaagagccaggtgtttctgaaaatgaactctctgcagaccgatgatacggccatttactactgcgcttcacactatggctcaaccttggcattcgcttcctggggccacggaacactggtgaccgtttccgcagccacgcgtatccagaaccctgatcctgccgtgtaccagctgcgggatagcaagagcagcgacaagagcgtgtgtctgttcaccgacttcgacagccagaccaacgtgtcccagagcaaggactccgacgtgtacatcaccgataagtgcgtgctggacatgcggagcatggacttcaagagcaactccgccgtggcctggtccaacaagtccgatttcgcctgcgccaacgccttcaacaacagcattatccccgaggacacattcttcccaagccccgagagcagctgcgacgtgaagctggtggaaaagagcttcgagacagacaccaacctgaacttccagatcctgtacgagatcctgctgggcaaggccaccctgtacgccgtgctggtgtctgccctggtgctgatggctatggtcaagcggaaggacagccgggga

SEQ ID NO: 5044 - DNA, 1881 bp, synthetic construct
  source 1..1881: mol_type = other DNA
atggccttaccagtgaccgccttgctcctgccgctggccttgctgctccacgccgccaggccggacattgtgatgacccagtctcacaaattcatgtccacatcagtaggagacagggtcagcgtcacctgcaaggccagtcagaatgtgggtaataatgtagcctggtatcaacagaaaccagggcaatctcctaaagtactgatttactcggcatcctaccggtacagtggagtccctgatcgcttcacaggcagtggatctgggacagatttcactctcaccatcagtaatgtgcagtctgaagacttggcagagtatttctgtcagcaatataacacctatccattcacgttcggctcggggacaaagttggaaataaaactcgaggacctgaagaacgtgttcccacctgaggtggccgtgttcgagcctagcgaggccgagatcagccacacccagaaagccaccctcgtgtgcctggctaccggcttctaccccgaccatgtggaactgtcttggtgggtcaacggcaaagaggtgcacagcggcgtgtgtaccgacccccagccactgaaagaacagcccgccctgaacgacagccggtactgcctgagcagcagactgagagtgtccgccaccttctggcagaacccccggaaccacttcagatgccaggtgcagttctacggcctgagcgagaacgacgagtggacccaggacagagccaagcccgtgacccagatcgtgtctgccgaagcctggggcagagccgattgcggctttaccagcgagagctaccagcagggcgtgctgagcgccaccaacctgagcgtgatcggcttcagaatcctgctgctgaaagtggccggctttaacctgctgatgaccctgcggctgtggtccagcagggccaagcgatctggatctggagcaacaaacttctcactactcaaacaagcaggtgacgtggaggagaatcccgggcctactagtatggactggatttggcgcatccttttccttgtcggcgctgctaccggcgcgcattccttcgaagaggtacagctggaggaaagcggtggaggactggtgcaacctggagggtctatgaagctctcttgcgtagcttctgggttcacgttctccaattactggatgaactgggtgcggcagtcccccgagaaaggcctggaatgggtagcagaaattcggttcaagtcccataactatgctacacactttgccgagtctgtcaaaggccggttcactattagtcgagacgacagcaagtcttcagtctacctgcagatgaataacttgcgggcagaggacacaggtatctactactgcaccaggagaatcggcaactccgactatgactggtggtactttgacgtctggggagcaggcaccagcgtgacggtgagttcagcctcaacgcgtatccagaaccctgatcctgccgtgtaccagctgcgggatagcaagagcagcgacaagagcgtgtgtctgttcaccgacttcgacagccagaccaacgtgtcccagagcaaggactccgacgtgtacatcaccgataagtgcgtgctggacatgcggagcatggacttcaagagcaactccgccgtggcctggtccaacaagtccgatttcgcctgcgccaacgccttcaacaacagcattatccccgaggacacattcttcccaagccccgagagcagctgcgacgtgaagctggtggaaaagagcttcgagacagacaccaacctgaacttccagatcctgtacgagatcctgctgggcaaggccaccctgtacgccgtgctggtgtctgccctggtgctgatggctatggtcaagcggaaggacagccgggga

SEQ ID NO: 5045 - DNA, 1860 bp, synthetic construct
  source 1..1860: mol_type = other DNA
atggccttaccagtgaccgccttgctcctgccgctggccttgctgctccacgccgccaggccggaccagatcgtgctgacccagtcccccgctattatgtccgcatcaccgggcgaaaaagtgacgatctcctgtagcgcttcatctagcgtctcctacatgtattggtatcaacagaaacctgggtctagcccaaagccgtggatctacagaaccagtaaccttgccagtggggtgccagcccgcttcagcggtagtggcagtggaacttcctatagcctcacaataagcaacatggaggctgaagatgccgctgcctattactgccagcagtaccacagttacccaaccacgttcggcgggggaactaagctcgaagtaaaactcgaggacctgaagaacgtgttcccacctgaggtggccgtgttcgagcctagcgaggccgagatcagccacacccagaaagccaccctcgtgtgcctggctaccggcttctaccccgaccatgtggaactgtcttggtgggtcaacggcaaagaggtgcacagcggcgtgtgtaccgacccccagccactgaaagaacagcccgccctgaacgacagccggtactgcctgagcagcagactgagagtgtccgccaccttctggcagaacccccggaaccacttcagatgccaggtgcagttctacggcctgagcgagaacgacgagtggacccaggacagagccaagcccgtgacccagatcgtgtctgccgaagcctggggcagagccgattgcggctttaccagcgagagctaccagcagggcgtgctgagcgccaccaacctgagcgtgatcggcttcagaatcctgctgctgaaagtggccggctttaacctgctgatgaccctgcggctgtggtccagcagggccaagcgatctggatctggagcaacaaacttctcactactcaaacaagcaggtgacgtggaggagaatcccgggcctactagtatggactggatttggcgcatccttttccttgtcggcgctgctaccggcgcgcattccttcgaagaggtgcagctggtggaatctgggggcggcctggtccaacctaagggatcactcaagctctcttgtgcggccagcggattctctttcaatacctatgctatgaattgggtgagacaggcgcccggaaagggcctcgaatggatagcccatatccggtcaaaatcaaacaatttcgcaacctactatgcggactccgtgaaggaccgattttccatctcccgagatgcctccgagaatattctgttcctgcagatgaataacctcaagacagaggacaccgccatgtactactgtgtgcgccagggcggtgactttcccatggattactgggggcaggggaccagcgtgaccgtgagctctacgcgtatccagaaccctgatcctgccgtgtaccagctgcgggatagcaagagcagcgacaagagcgtgtgtctgttcaccgacttcgacagccagaccaacgtgtcccagagcaaggactccgacgtgtacatcaccgataagtgcgtgctggacatgcggagcatggacttcaagagcaactccgccgtggcctggtccaacaagtccgatttcgcctgcgccaacgccttcaacaacagcattatccccgaggacacattcttcccaagccccgagagcagctgcgacgtgaagctggtggaaaagagcttcgagacagacaccaacctgaacttccagatcctgtacgagatcctgctgggcaaggccaccctgtacgccgtgctggtgtctgccctggtgctgatggctatggtcaagcggaaggacagccgggga

SEQ ID NO: 5046 - DNA, 1857 bp, synthetic construct
  source 1..1857: mol_type = other DNA
atggccttaccagtgaccgccttgctcctgccgctggccttgctgctccacgccgccaggccggacgacatccagatgacccagagcagcagcagcttcagcgtgagcctgggcgacagagtgaccatcacctgcatggccagcgaggacatctacatcagactggcctggtaccagcagaagcccggcaacgcccccagactgctgatcagcgccgccaccagcctggagaccggcgtgcccagcagattcagcggcagcggcagcggcaaggactacaccctgagcatcaccagcctgcagaccgaggacgtgggcacctactactgccagcagtactggagcagcccctggaccttcggcggcggcaccaagctggagatcaacctcgaggacctgaagaacgtgttcccacctgaggtggccgtgttcgagcctagcgaggccgagatcagccacacccagaaagccaccctcgtgtgcctggctaccggcttctaccccgaccatgtggaactgtcttggtgggtcaacggcaaagaggtgcacagcggcgtgtgtaccgacccccagccactgaaagaacagcccgccctgaacgacagccggtactgcctgagcagcagactgagagtgtccgccaccttctggcagaacccccggaaccacttcagatgccaggtgcagttctacggcctgagcgagaacgacgagtggacccaggacagagccaagcccgtgacccagatcgtgtctgccgaagcctggggcagagccgattgcggctttaccagcgagagctaccagcagggcgtgctgagcgccaccaacctgagcgtgatcggcttcagaatcctgctgctgaaagtggccggctttaacctgctgatgaccctgcggctgtggtccagcagggccaagcgatctggatctggagcaacaaacttctcactactcaaacaagcaggtgacgtggaggagaatcccgggcctactagtatggactggatttggcgcatccttttccttgtcggcgctgctaccggcgcgcattccttcgaagacgtgcagctgcaggagagcggccccggcctggtgaagcccagccagagcctgagcctgacctgcaccgtgaccggctacagcatcaccagcgactacacctggaactggatcagacagttccccggcaacaagctggagtggatgggctacatcacctacagcggcagcaccagctacaaccccagcctgaagagcagaaacagcatcaccagagacaccagcaagaaccagttcttcctgcagctgaacagcgtgaccaccgaggacaccgccacctactactgcgccagactgggcagaagatacacaatggactactggggccagggcaccagcgtgaccgtgagcagcacgcgtatccagaaccctgatcctgccgtgtaccagctgcgggatagcaagagcagcgacaagagcgtgtgtctgttcaccgacttcgacagccagaccaacgtgtcccagagcaaggactccgacgtgtacatcaccgataagtgcgtgctggacatgcggagcatggacttcaagagcaactccgccgtggcctggtccaacaagtccgatttcgcctgcgccaacgccttcaacaacagcattatccccgaggacacattcttcccaagccccgagagcagctgcgacgtgaagctggtggaaaagagcttcgagacagacaccaacctgaacttccagatcctgtacgagatcctgctgggcaaggccaccctgtacgccgtgctggtgtctgccctggtgctgatggctatggtcaagcggaaggacagccgggga

SEQ ID NO: 5047 - DNA, 1866 bp, synthetic construct
  source 1..1866: mol_type = other DNA
atggccttaccagtgaccgccttgctcctgccgctggccttgctgctccacgccgccaggccggacgacatccagatgacccagagccccagcagcctgtctgccagcgtgggcgacagagtgaccatcacctgtagagccagccagagcatcagcagctacctgaactggtatcagcagaagcccggcaaggcccccaaactgctgatctacgacgccagcaacctggaaaccggcgtgcccagcagattttccggcagcggctctggcaccgacttcaccttcaccatcagctccctccagcccgaggacattgccacctactactgccagcagtacgacaacctgcccctgacctttggcggaggcaccaaggtggacatcaagagactcgaggacctgaagaacgtgttcccacctgaggtggccgtgttcgagcctagcgaggccgagatcagccacacccagaaagccaccctcgtgtgcctggctaccggcttctaccccgaccatgtggaactgtcttggtgggtcaacggcaaagaggtgcacagcggcgtgtgtaccgacccccagccactgaaagaacagcccgccctgaacgacagccggtactgcctgagcagcagactgagagtgtccgccaccttctggcagaacccccggaaccacttcagatgccaggtgcagttctacggcctgagcgagaacgacgagtggacccaggacagagccaagcccgtgacccagatcgtgtctgccgaagcctggggcagagccgattgcggctttaccagcgagagctaccagcagggcgtgctgagcgccaccaacctgagcgtgatcggcttcagaatcctgctgctgaaagtggccggctttaacctgctgatgaccctgcggctgtggtccagcagggccaagcgatctggatctggagcaacaaacttctcactactcaaacaagcaggtgacgtggaggagaatcccgggcctactagtatggactggatttggcgcatccttttccttgtcggcgctgctaccggcgcgcattccttcgaacaggtgcaactggtggaatctggcggcggagtggtgcagcctggcagaagcctgagactgagctgtgccgccagcggcttcacctttagcagctacgccatgcactgggtgcgccaggcccctggaaaaggcctggaatgggtggccgtgatctcctacgacggctccaacaagtattacgccgacagcgtgaagggccggttcaccatctccagagacaacagcaagaacaccctgtacctccagatgaacagcctgcgggccgaggacaccgccgtgtactattgtgccagggctcacaacagcagctcttggagcttcgactactggggccagggcaccctcgtgaccgtgtcatctacgcgtatccagaaccctgatcctgccgtgtaccagctgcgggatagcaagagcagcgacaagagcgtgtgtctgttcaccgacttcgacagccagaccaacgtgtcccagagcaaggactccgacgtgtacatcaccgataagtgcgtgctggacatgcggagcatggacttcaagagcaactccgccgtggcctggtccaacaagtccgatttcgcctgcgccaacgccttcaacaacagcattatccccgaggacacattcttcccaagccccgagagcagctgcgacgtgaagctggtggaaaagagcttcgagacagacaccaacctgaacttccagatcctgtacgagatcctgctgggcaaggccaccctgtacgccgtgctggtgtctgccctggtgctgatggctatggtcaagcggaaggacagccgggga

SEQ ID NO: 5048 - DNA, 1893 bp, synthetic construct
  source 1..1893: mol_type = other DNA
atggccttaccagtgaccgccttgctcctgccgctggccttgctgctccacgccgccaggccggacgacgtcgtgatgacccagagccctctgagcctgcctgtgtccctgggcgatcaggccagcatctcctgcagatccagccagagactggtgcacagcaacggcaacacctacctgcactggtatctgcagaagcccggccagagccccaagctgctgatctaccgggtgtccaacagattccccggcgtgcccgatagattcagcggctctggcagcggcaccgacttcaccctgaagatcagccgggtggaagccgaggacctgggcatctatttctgcagccagagcacccacgtgccctacacctttggcggaggcaccaagctggaaatcaagcggctcgaggacctgaagaacgtgttcccacctgaggtggccgtgttcgagcctagcgaggccgagatcagccacacccagaaagccaccctcgtgtgcctggctaccggcttctaccccgaccatgtggaactgtcttggtgggtcaacggcaaagaggtgcacagcggcgtgtgtaccgacccccagccactgaaagaacagcccgccctgaacgacagccggtactgcctgagcagcagactgagagtgtccgccaccttctggcagaacccccggaaccacttcagatgccaggtgcagttctacggcctgagcgagaacgacgagtggacccaggacagagccaagcccgtgacccagatcgtgtctgccgaagcctggggcagagccgattgcggctttaccagcgagagctaccagcagggcgtgctgagcgccaccaacctgagcgtgatcggcttcagaatcctgctgctgaaagtggccggctttaacctgctgatgaccctgcggctgtggtccagcagggccaagcgatctggatctggagcaacaaacttctcactactcaaacaagcaggtgacgtggaggagaatcccgggcctactagtatggactggatttggcgcatccttttccttgtcggcgctgctaccggcgcgcattccttcgaagaagtgcggctgcagcagtctggccccgacctgattaagcctggggccagcgtgaagatgagctgcaaggccagcggctacaccttcaccggctacgtgatgcactgggtcaagcagaggccaggccagggcctggaatggatcggcttcatcaacccctacaacgacgacatccagagcaacgagcggttccggggcaaggccaccctgaccagcgataagagcagcaccaccgcctacatggaactgagcagcctgacctccgaggacagcgccgtgtactactgtgctaggggagccggctacaacttcgacggggcctacagattcttcgacttttggggccagggcaccacactgaccgtgtcctctacgcgtatccagaaccctgatcctgccgtgtaccagctgcgggatagcaagagcagcgacaagagcgtgtgtctgttcaccgacttcgacagccagaccaacgtgtcccagagcaaggactccgacgtgtacatcaccgataagtgcgtgctggacatgcggagcatggacttcaagagcaactccgccgtggcctggtccaacaagtccgatttcgcctgcgccaacgccttcaacaacagcattatccccgaggacacattcttcccaagccccgagagcagctgcgacgtgaagctggtggaaaagagcttcgagacagacaccaacctgaacttccagatcctgtacgagatcctgctgggcaaggccaccctgtacgccgtgctggtgtctgccctggtgctgatggctatggtcaagcggaaggacagccgggga

SEQ ID NO: 5049 - DNA, 1866 bp, synthetic construct
  source 1..1866: mol_type = other DNA
atggccttaccagtgaccgccttgctcctgccgctggccttgctgctccacgccgccaggccggacagctacgagctgacccagcctcctagcgtgtccgtgtctcctggacagaccgccaccatctcttgcagcggcgatcaactgggcgggaagtacggccactggtatcagaagaagcccggccagagccccgtgctggtgctgtaccaggacagaaaacggcctgccggcatccccgagagattcagcggaagcagcagcggcaacaccatcaccctgaccatcagcggcacccaggccgtggatgaggccgactactactgccaggcttgggacaccaatctgggcggcgtgttcggcggaggcaccaaagtgacagtgctgggacagctcgaggacctgaagaacgtgttcccacctgaggtggccgtgttcgagcctagcgaggccgagatcagccacacccagaaagccaccctcgtgtgcctggctaccggcttctaccccgaccatgtggaactgtcttggtgggtcaacggcaaagaggtgcacagcggcgtgtgtaccgacccccagccactgaaagaacagcccgccctgaacgacagccggtactgcctgagcagcagactgagagtgtccgccaccttctggcagaacccccggaaccacttcagatgccaggtgcagttctacggcctgagcgagaacgacgagtggacccaggacagagccaagcccgtgacccagatcgtgtctgccgaagcctggggcagagccgattgcggctttaccagcgagagctaccagcagggcgtgctgagcgccaccaacctgagcgtgatcggcttcagaatcctgctgctgaaagtggccggctttaacctgctgatgaccctgcggctgtggtccagcagggccaagcgatctggatctggagcaacaaacttctcactactcaaacaagcaggtgacgtggaggagaatcccgggcctactagtatggactggatttggcgcatccttttccttgtcggcgctgctaccggcgcgcattccttcgaacaggtgcaactggtggaaagcggagccgaagtgaagaaacctggggccagcgtgaaggtgtcctgcaaggccagcggctacacctttaccggctactacatgcactgggtgcgccaggctccaggccagggactggaatggatgggccggatcaaccccaatagcggcggcaccaactacgcccagaaattccagggcagagtgaccatgaccagagacaccagcatcagcaccgcctacatggaactgagccggctgagaagcgacgacaccgccgtgtactactgcgccagccctagaggcagaggcagcgccttcgatatttggggccagggcacactcgtgaccgtgtcctctacgcgtatccagaaccctgatcctgccgtgtaccagctgcgggatagcaagagcagcgacaagagcgtgtgtctgttcaccgacttcgacagccagaccaacgtgtcccagagcaaggactccgacgtgtacatcaccgataagtgcgtgctggacatgcggagcatggacttcaagagcaactccgccgtggcctggtccaacaagtccgatttcgcctgcgccaacgccttcaacaacagcattatccccgaggacacattcttcccaagccccgagagcagctgcgacgtgaagctggtggaaaagagcttcgagacagacaccaacctgaacttccagatcctgtacgagatcctgctgggcaaggccaccctgtacgccgtgctggtgtctgccctggtgctgatggctatggtcaagcggaaggacagccgggga

SEQ ID NO: 5050 - DNA, 1875 bp, synthetic construct
  source 1..1875: mol_type = other DNA
atggccttaccagtgaccgccttgctcctgccgctggccttgctgctccacgccgccaggccggacaacttcatgctgacccagccccacagcgtgtccgagagccctggcaagaccgtgaccatctcctgcaccagaagcagcggctctatcgccagcaaatacgtgcagtggtatcagcagaggcccggcagcagccctaccaccgtgatctacgaggacaaccagaggcctagcggcgtgcccgatagattcagcggcagcatcgacaccagcagcaacagcgccagcctgaccatcagcggcctgagaacagaggacgaggccgactactactgccacagctacgacagcaacaaccactccgtgttcggcggaggcaccaaagtgacagtgctgggacagctcgaggacctgaagaacgtgttcccacctgaggtggccgtgttcgagcctagcgaggccgagatcagccacacccagaaagccaccctcgtgtgcctggctaccggcttctaccccgaccatgtggaactgtcttggtgggtcaacggcaaagaggtgcacagcggcgtgtgtaccgacccccagccactgaaagaacagcccgccctgaacgacagccggtactgcctgagcagcagactgagagtgtccgccaccttctggcagaacccccggaaccacttcagatgccaggtgcagttctacggcctgagcgagaacgacgagtggacccaggacagagccaagcccgtgacccagatcgtgtctgccgaagcctggggcagagccgattgcggctttaccagcgagagctaccagcagggcgtgctgagcgccaccaacctgagcgtgatcggcttcagaatcctgctgctgaaagtggccggctttaacctgctgatgaccctgcggctgtggtccagcagggccaagcgatctggatctggagcaacaaacttctcactactcaaacaagcaggtgacgtggaggagaatcccgggcctactagtatggactggatttggcgcatccttttccttgtcggcgctgctaccggcgcgcattccttcgaagaagtgcaactggtggaaagcgggggaggcgtggtgcagccaggcggatctctgagactgagctgtgccgccagcggcttcaccttcagcagctacgccatgagctgggtgcgccaggcccctggaaaaggcctggaatgggtgtccgccatctctggctctggcggcagcacctactacgccgatagcgtgaagggccggttcagcatcagccgggacaacagcaagaacaccctgtacctccagatgaacagcctgcgggccgaggacaccgccgtgtactactgtgccagaaccagaagctccggggccttcgacatctggggccagggaacactcgtgaccgtgtcctctacgcgtatccagaaccctgatcctgccgtgtaccagctgcgggatagcaagagcagcgacaagagcgtgtgtctgttcaccgacttcgacagccagaccaacgtgtcccagagcaaggactccgacgtgtacatcaccgataagtgcgtgctggacatgcggagcatggacttcaagagcaactccgccgtggcctggtccaacaagtccgatttcgcctgcgccaacgccttcaacaacagcattatccccgaggacacattcttcccaagccccgagagcagctgcgacgtgaagctggtggaaaagagcttcgagacagacaccaacctgaacttccagatcctgtacgagatcctgctgggcaaggccaccctgtacgccgtgctggtgtctgccctggtgctgatggctatggtcaagcggaaggacagccgggga

SEQ ID NO: 5051 - DNA, 1860 bp, synthetic construct
  source 1..1860: mol_type = other DNA
atggccttaccagtgaccgccttgctcctgccgctggccttgctgctccacgccgccaggccggacatccagatgaaccagagccccagcagcctgagcgccagcctgggcgataccatcaccatcacctgtcacgccagccagaacatcaacgtgtggctgagctggtatcagcagaagcccggcaacatccccaagctgctgatctacaaggccagcaacctgcacaccggcgtgcccagcagattttctggcagcggctctggcaccggcttcaccattaccatcagctccctccagcccgaggacattgccacctactactgccagcagggccagagctacccctggacatttggcggaggcaccaagctggaaatcaagagactcgaggacctgaagaacgtgttcccacctgaggtggccgtgttcgagcctagcgaggccgagatcagccacacccagaaagccaccctcgtgtgcctggctaccggcttctaccccgaccatgtggaactgtcttggtgggtcaacggcaaagaggtgcacagcggcgtgtgtaccgacccccagccactgaaagaacagcccgccctgaacgacagccggtactgcctgagcagcagactgagagtgtccgccaccttctggcagaacccccggaaccacttcagatgccaggtgcagttctacggcctgagcgagaacgacgagtggacccaggacagagccaagcccgtgacccagatcgtgtctgccgaagcctggggcagagccgattgcggctttaccagcgagagctaccagcagggcgtgctgagcgccaccaacctgagcgtgatcggcttcagaatcctgctgctgaaagtggccggctttaacctgctgatgaccctgcggctgtggtccagcagggccaagcgatctggatctggagcaacaaacttctcactactcaaacaagcaggtgacgtggaggagaatcccgggcctactagtatggactggatttggcgcatccttttccttgtcggcgctgctaccggcgcgcattccttcgaagaagtgcaactccagcagagcggcccagagcttgtgaagcctggcgcttccgtgaagattagctgcaaagccagcggctacagcttcaccggctacttcatgaactgggtcaagcagagccacggcaagagcctggagtacatcggcagattcaacccctacaacggcgagacactgtacaaccagaagttcaagggcaaggccaccctgaccgtggacaagagcagcagcaccgtgcacatggaactgctgagcgtgaccagcgaggacagcgccgtgtactactgtggcagaagcggcaacgacgacgctatggactattggggccagggcaccagcgtgaccgtgtctagtgctacgcgtatccagaaccctgatcctgccgtgtaccagctgcgggatagcaagagcagcgacaagagcgtgtgtctgttcaccgacttcgacagccagaccaacgtgtcccagagcaaggactccgacgtgtacatcaccgataagtgcgtgctggacatgcggagcatggacttcaagagcaactccgccgtggcctggtccaacaagtccgatttcgcctgcgccaacgccttcaacaacagcattatccccgaggacacattcttcccaagccccgagagcagctgcgacgtgaagctggtggaaaagagcttcgagacagacaccaacctgaacttccagatcctgtacgagatcctgctgggcaaggccaccctgtacgccgtgctggtgtctgccctggtgctgatggctatggtcaagcggaaggacagccgggga

SEQ ID NO: 5052 - DNA, 1863 bp, synthetic construct
  source 1..1863: mol_type = other DNA
atggccttaccagtgaccgccttgctcctgccgctggccttgctgctccacgccgccaggccggagatcgtgctgacacagagccctgccaccctgtctctgagccctggcgaaagagccaccctgagctgtagagccagccagagcgtgcggagctacctggcctggtatcagcagaagcctggacaggcccccagactgctgatctacgacgccagcaatcgggccacaggcatccccgccagattttctggctctggcagcggcaccgacttcaccctgacaatcagcagcctggaacccgaggacttcgccgtgtactactgccagcagcggagcaactggccccctacctttggacagggcaccaaggtggaaatcaagctcgaggacctgaagaacgtgttcccacctgaggtggccgtgttcgagcctagcgaggccgagatcagccacacccagaaagccaccctcgtgtgcctggctaccggcttctaccccgaccatgtggaactgtcttggtgggtcaacggcaaagaggtgcacagcggcgtgtgtaccgacccccagccactgaaagaacagcccgccctgaacgacagccggtactgcctgagcagcagactgagagtgtccgccaccttctggcagaacccccggaaccacttcagatgccaggtgcagttctacggcctgagcgagaacgacgagtggacccaggacagagccaagcccgtgacccagatcgtgtctgccgaagcctggggcagagccgattgcggctttaccagcgagagctaccagcagggcgtgctgagcgccaccaacctgagcgtgatcggcttcagaatcctgctgctgaaagtggccggctttaacctgctgatgaccctgcggctgtggtccagcagggccaagcgatctggatctggagcaacaaacttctcactactcaaacaagcaggtgacgtggaggagaatcccgggcctactagtatggactggatttggcgcatccttttccttgtcggcgctgctaccggcgcgcattccttcgaacaactccaggtgcaggaatctggccccggactcgtgaagcccagcgagacactgagcctgacctgtaccgtgtccggcggcagcatcagcaacagctacttctcctggggctggatcagacagccccctggcaagggcctggaatggatcggcagcttctactacggcgagaaaacctactacaaccccagcctgaagtccagagccaccatcagcatcgacaccagcaagagccagttctccctgaagctgagcagcgtgacagccgccgacaccgccgtgtattattgccccagaggccccaccatgatccggggcgtgatcgactcttggggccagggaacactcgtgaccgtgtcctctacgcgtatccagaaccctgatcctgccgtgtaccagctgcgggatagcaagagcagcgacaagagcgtgtgtctgttcaccgacttcgacagccagaccaacgtgtcccagagcaaggactccgacgtgtacatcaccgataagtgcgtgctggacatgcggagcatggacttcaagagcaactccgccgtggcctggtccaacaagtccgatttcgcctgcgccaacgccttcaacaacagcattatccccgaggacacattcttcccaagccccgagagcagctgcgacgtgaagctggtggaaaagagcttcgagacagacaccaacctgaacttccagatcctgtacgagatcctgctgggcaaggccaccctgtacgccgtgctggtgtctgccctggtgctgatggctatggtcaagcggaaggacagccgggga

SEQ ID NO: 5053 - DNA, 1890 bp, synthetic construct
  source 1..1890: mol_type = other DNA
atggccttaccagtgaccgccttgctcctgccgctggccttgctgctccacgccgccaggccggacatcgtgatgacccagacccccctgagcctgcctgtgacacctggcgagcctgccagcatctcctgcagaagcagcagaagcctgctggacagcgacgacggcaacacctacctggactggtatctgcagaaacccggccagagcccccaactgctgatctacaccctgagctacagagccagcggcgtgcccgatagattttccggctctggcagcggcaccgacttcaccctgaagatcagccgggtggaagccgaggacgtgggcgtgtactactgtatgcagcgggtggaatttcccatcaccttcggccagggcaccagactggaaatcaagagactcgaggacctgaagaacgtgttcccacctgaggtggccgtgttcgagcctagcgaggccgagatcagccacacccagaaagccaccctcgtgtgcctggctaccggcttctaccccgaccatgtggaactgtcttggtgggtcaacggcaaagaggtgcacagcggcgtgtgtaccgacccccagccactgaaagaacagcccgccctgaacgacagccggtactgcctgagcagcagactgagagtgtccgccaccttctggcagaacccccggaaccacttcagatgccaggtgcagttctacggcctgagcgagaacgacgagtggacccaggacagagccaagcccgtgacccagatcgtgtctgccgaagcctggggcagagccgattgcggctttaccagcgagagctaccagcagggcgtgctgagcgccaccaacctgagcgtgatcggcttcagaatcctgctgctgaaagtggccggctttaacctgctgatgaccctgcggctgtggtccagcagggccaagcgatctggatctggagcaacaaacttctcactactcaaacaagcaggtgacgtggaggagaatcccgggcctactagtatggactggatttggcgcatccttttccttgtcggcgctgctaccggcgcgcattccttcgaacaggtgcaactggtggaatctggcgggggagtggtgcagcctggcagatccctgagactgagctgtgccgccagcggcttcatcttcagcagatacggaatgcactgggtgcgccaggcccctggcaagggactgaaatgggtggccgtgatttggtacgacggcagcaacaagctgtacgccgacagcgtgaagggccggttcaccatcagcagagacaacagcaagaacaccctgtacctgcagatgaacagcctgcgggccgaggacaccgccgtgtactattgcgccagagactactacgacaacagccggcaccactggggcttcgactattggggccagggaacccttgtgaccgtgtcctctacgcgtatccagaaccctgatcctgccgtgtaccagctgcgggatagcaagagcagcgacaagagcgtgtgtctgttcaccgacttcgacagccagaccaacgtgtcccagagcaaggactccgacgtgtacatcaccgataagtgcgtgctggacatgcggagcatggacttcaagagcaactccgccgtggcctggtccaacaagtccgatttcgcctgcgccaacgccttcaacaacagcattatccccgaggacacattcttcccaagccccgagagcagctgcgacgtgaagctggtggaaaagagcttcgagacagacaccaacctgaacttccagatcctgtacgagatcctgctgggcaaggccaccctgtacgccgtgctggtgtctgccctggtgctgatggctatggtcaagcggaaggacagccgggga

SEQ ID NO: 5054 - DNA, 1860 bp, synthetic construct
  source 1..1860: mol_type = other DNA
atggccttaccagtgaccgccttgctcctgccgctggccttgctgctccacgccgccaggccggagatccagatgacccagagccccagcagcatgtctgccagcctgggcgacaccatcaccatcacatgccaggccacccaggacatcttcaagaacctgaactggtatcagcagaagcccggcaagccccccagcctgctgatctactatgccaccgaactggccgagggcgtgcccagcagattttctggcagcggcagcggctccgactacagcctgaccatcagcaacctggaaagcgaggacttcgccgcctactactgcctccagttcttcgagttcccattcaccttcggctccggcaccaagctggaaatgaagctcgaggacctgaagaacgtgttcccacctgaggtggccgtgttcgagcctagcgaggccgagatcagccacacccagaaagccaccctcgtgtgcctggctaccggcttctaccccgaccatgtggaactgtcttggtgggtcaacggcaaagaggtgcacagcggcgtgtgtaccgacccccagccactgaaagaacagcccgccctgaacgacagccggtactgcctgagcagcagactgagagtgtccgccaccttctggcagaacccccggaaccacttcagatgccaggtgcagttctacggcctgagcgagaacgacgagtggacccaggacagagccaagcccgtgacccagatcgtgtctgccgaagcctggggcagagccgattgcggctttaccagcgagagctaccagcagggcgtgctgagcgccaccaacctgagcgtgatcggcttcagaatcctgctgctgaaagtggccggctttaacctgctgatgaccctgcggctgtggtccagcagggccaagcgatctggatctggagcaacaaacttctcactactcaaacaagcaggtgacgtggaggagaatcccgggcctactagtatggactggatttggcgcatccttttccttgtcggcgctgctaccggcgcgcattccttcgaacaggtgcaactccagcagtctggcgctgagcttgtgcggcctggcacctctgtgaaggtgtcctgtaaagccagcggctacgtgttcaccaactactggatcgagtggatcaagcagcggccaggccagggcctggaatggatcggcgtgatgaatccaggcagcggcgagacaacctacaacgagaagttcaagggcaaggccaccctgaccgccgacaagagcagcagcacagcctacatgcaactgtcctccctgaccagcgtggacagcgccgtgtacttctgcgccagggaccacgaccgggactactacgctatggactactggggccagggcaccagcgtgaccgtgtcatctacgcgtatccagaaccctgatcctgccgtgtaccagctgcgggatagcaagagcagcgacaagagcgtgtgtctgttcaccgacttcgacagccagaccaacgtgtcccagagcaaggactccgacgtgtacatcaccgataagtgcgtgctggacatgcggagcatggacttcaagagcaactccgccgtggcctggtccaacaagtccgatttcgcctgcgccaacgccttcaacaacagcattatccccgaggacacattcttcccaagccccgagagcagctgcgacgtgaagctggtggaaaagagcttcgagacagacaccaacctgaacttccagatcctgtacgagatcctgctgggcaaggccaccctgtacgccgtgctggtgtctgccctggtgctgatggctatggtcaagcggaaggacagccgggga

SEQ ID NO: 5055 - DNA, 1851 bp, synthetic construct
  source 1..1851: mol_type = other DNA
atggccttaccagtgaccgccttgctcctgccgctggccttgctgctccacgccgccaggccggacatcctgctgacacagagccccgccatcctgtccgtgtctccaggcgagagagtgtcctttagctgccgggccagccagaacatcggcaccagcatccactggtatcagcagcggaccaacggcagccccagactgctgattaagtacgccagcgagtccgtgtccggcatccccagcagattttctggcagcggctccggcaccgacttcaccctgagcatcaacagcgtggaaagcgaggacattgccgactactactgccagcacaccaatagctggcccaccacctttggcggaggcaccaagctggaaatcaagagactcgaggacctgaagaacgtgttcccacctgaggtggccgtgttcgagcctagcgaggccgagatcagccacacccagaaagccaccctcgtgtgcctggctaccggcttctaccccgaccatgtggaactgtcttggtgggtcaacggcaaagaggtgcacagcggcgtgtgtaccgacccccagccactgaaagaacagcccgccctgaacgacagccggtactgcctgagcagcagactgagagtgtccgccaccttctggcagaacccccggaaccacttcagatgccaggtgcagttctacggcctgagcgagaacgacgagtggacccaggacagagccaagcccgtgacccagatcgtgtctgccgaagcctggggcagagccgattgcggctttaccagcgagagctaccagcagggcgtgctgagcgccaccaacctgagcgtgatcggcttcagaatcctgctgctgaaagtggccggctttaacctgctgatgaccctgcggctgtggtccagcagggccaagcgatctggatctggagcaacaaacttctcactactcaaacaagcaggtgacgtggaggagaatcccgggcctactagtatggactggatttggcgcatccttttccttgtcggcgctgctaccggcgcgcattccttcgaacaggtgcaactccagcagtccgacgccgagcttgtgaagcctggcgcttccgtgaagattagctgcaaggccagcggctacaccttcaccgaccacgccattcactgggtcaagcagaagcccgagcagggcctggaatggatcggctacttcagccccggcaacggcgacatcaagtacaacgagaagttcaagggcaaggccaccctgaccgccgacaagagcagcagcacagcctacatgcaactgaacagcctgaccagcgaggactccgccgtgtacttctgcaagcggagctacggcaactacgactactggggccagggcaccacactgaccgtgtctagtacgcgtatccagaaccctgatcctgccgtgtaccagctgcgggatagcaagagcagcgacaagagcgtgtgtctgttcaccgacttcgacagccagaccaacgtgtcccagagcaaggactccgacgtgtacatcaccgataagtgcgtgctggacatgcggagcatggacttcaagagcaactccgccgtggcctggtccaacaagtccgatttcgcctgcgccaacgccttcaacaacagcattatccccgaggacacattcttcccaagccccgagagcagctgcgacgtgaagctggtggaaaagagcttcgagacagacaccaacctgaacttccagatcctgtacgagatcctgctgggcaaggccaccctgtacgccgtgctggtgtctgccctggtgctgatggctatggtcaagcggaaggacagccgggga

SEQ ID NO: 5056 - DNA, 1866 bp, synthetic construct
  source 1..1866: mol_type = other DNA
atggccttaccagtgaccgccttgctcctgccgctggccttgctgctccacgccgccaggccggacatcgtgatgacccagagccccgatagcctggccgtgtctctgggagagagagccaccatcaactgcaagagcagccagagcctgctgaacagcggcgaccagaagaactacctgacctggtatcagcagaagcccggccagccccccaagctgctgatctactgggccagcaccagagaaagcggcgtgcccgatagattcagcggcagcggaagtggcaccgacttcaccctgaccatcagttctcttcaggccgaggacgtggccgtgtactactgccagaacgactacagctaccccctgaccttcggccagggcaccaaggtggaaatcaagctcgaggacctgaagaacgtgttcccacctgaggtggccgtgttcgagcctagcgaggccgagatcagccacacccagaaagccaccctcgtgtgcctggctaccggcttctaccccgaccatgtggaactgtcttggtgggtcaacggcaaagaggtgcacagcggcgtgtgtaccgacccccagccactgaaagaacagcccgccctgaacgacagccggtactgcctgagcagcagactgagagtgtccgccaccttctggcagaacccccggaaccacttcagatgccaggtgcagttctacggcctgagcgagaacgacgagtggacccaggacagagccaagcccgtgacccagatcgtgtctgccgaagcctggggcagagccgattgcggctttaccagcgagagctaccagcagggcgtgctgagcgccaccaacctgagcgtgatcggcttcagaatcctgctgctgaaagtggccggctttaacctgctgatgaccctgcggctgtggtccagcagggccaagcgatctggatctggagcaacaaacttctcactactcaaacaagcaggtgacgtggaggagaatcccgggcctactagtatggactggatttggcgcatccttttccttgtcggcgctgctaccggcgcgcattccttcgaacaggtgcagctggtgcagtctggggccgaagtgaagaaaaccggcagcagcgtgaaggtgtcctgcaaggccagcggctacacctttaccgaccacgccattcacgtgtggcggcaggctccaggacaggccctggaatggatgggccacttcagccccggcaacaccgacatcaagtacaacgacaagttcaagggcagagtgaccctgaccgtggaccgcagcatgagcaccgcctacatggaactgagcagcctgcggagcgaggacaccgccatgtactattgcaagaccagcaccttctttttcgactactggggccagggaacaatggtcaccgtgtccagcacgcgtatccagaaccctgatcctgccgtgtaccagctgcgggatagcaagagcagcgacaagagcgtgtgtctgttcaccgacttcgacagccagaccaacgtgtcccagagcaaggactccgacgtgtacatcaccgataagtgcgtgctggacatgcggagcatggacttcaagagcaactccgccgtggcctggtccaacaagtccgatttcgcctgcgccaacgccttcaacaacagcattatccccgaggacacattcttcccaagccccgagagcagctgcgacgtgaagctggtggaaaagagcttcgagacagacaccaacctgaacttccagatcctgtacgagatcctgctgggcaaggccaccctgtacgccgtgctggtgtctgccctggtgctgatggctatggtcaagcggaaggacagccgggga

SEQ ID NO: 5057 - DNA, 1863 bp, synthetic construct
  source 1..1863: mol_type = other DNA
atggccttaccagtgaccgccttgctcctgccgctggccttgctgctccacgccgccaggccggacatccagatgacccagagccccagcagcctgtctgccagcgtgggcgacagagtgaccatcacatgcaaggccagccaggacgtgtccattgccgtggcctggtatcagcagaagcccggcaaggcccccaaggtgctgatctacagcgccagctacagatacaccggcgtgcccgacagattcagcggctctggcagcggcaccgacttcaccttcaccatcagctccctccagcccgaggatattgccgtgtactactgccagcagcactacatcacccccctgacctttggcggaggcaccaaggtggaaatcaagctcgaggacctgaagaacgtgttcccacctgaggtggccgtgttcgagcctagcgaggccgagatcagccacacccagaaagccaccctcgtgtgcctggctaccggcttctaccccgaccatgtggaactgtcttggtgggtcaacggcaaagaggtgcacagcggcgtgtgtaccgacccccagccactgaaagaacagcccgccctgaacgacagccggtactgcctgagcagcagactgagagtgtccgccaccttctggcagaacccccggaaccacttcagatgccaggtgcagttctacggcctgagcgagaacgacgagtggacccaggacagagccaagcccgtgacccagatcgtgtctgccgaagcctggggcagagccgattgcggctttaccagcgagagctaccagcagggcgtgctgagcgccaccaacctgagcgtgatcggcttcagaatcctgctgctgaaagtggccggctttaacctgctgatgaccctgcggctgtggtccagcagggccaagcgatctggatctggagcaacaaacttctcactactcaaacaagcaggtgacgtggaggagaatcccgggcctactagtatggactggatttggcgcatccttttccttgtcggcgctgctaccggcgcgcattccttcgaacagatccaactggtgcagagcggccacgaagtgaagaaacctggggccagcgtgaaggtgtcctgcaaagccagcggctacacctttaccaactacggcatgaactgggtgcgccaggcccctggacagggcctggaatggatgggctggatcaacaccaagaccggcgagcccacctacgccgaagagttcaagggcagattcgtgttcagcctggaaaccagcgcctccaccgcctacctccagatcagctctctgaaggccgaggacaccgccatgtacttttgcggcagaggcggctacggcagcagctactggtacttcgatgtgtggggccagggcaccaccgtgaccgtgtcatctacgcgtatccagaaccctgatcctgccgtgtaccagctgcgggatagcaagagcagcgacaagagcgtgtgtctgttcaccgacttcgacagccagaccaacgtgtcccagagcaaggactccgacgtgtacatcaccgataagtgcgtgctggacatgcggagcatggacttcaagagcaactccgccgtggcctggtccaacaagtccgatttcgcctgcgccaacgccttcaacaacagcattatccccgaggacacattcttcccaagccccgagagcagctgcgacgtgaagctggtggaaaagagcttcgagacagacaccaacctgaacttccagatcctgtacgagatcctgctgggcaaggccaccctgtacgccgtgctggtgtctgccctggtgctgatggctatggtcaagcggaaggacagccgggga

SEQ ID NO: 5058 - DNA, 1869 bp, synthetic construct
  source 1..1869: mol_type = other DNA
atggccttaccagtgaccgccttgctcctgccgctggccttgctgctccacgccgccaggccggacatcgtgatgacccagagccccgatagcctggccgtgtctctgggagagagagccaccatcaactgccgggccagcaagagcgtgtccaccagcggctacagctacatgcactggtatcagcagaagcccggccagccccccaagctgctgatctacctggcctccaacctggaaagcggcgtgcccgatagattcagcggcagcggctctggcaccgacttcaccctgaccatcagttctcttcaggccgaggacgtggccgtgtactactgccagcacagcagagagctgccctacaccttcggccagggcaccaagctggaaatcaagctcgaggacctgaagaacgtgttcccacctgaggtggccgtgttcgagcctagcgaggccgagatcagccacacccagaaagccaccctcgtgtgcctggctaccggcttctaccccgaccatgtggaactgtcttggtgggtcaacggcaaagaggtgcacagcggcgtgtgtaccgacccccagccactgaaagaacagcccgccctgaacgacagccggtactgcctgagcagcagactgagagtgtccgccaccttctggcagaacccccggaaccacttcagatgccaggtgcagttctacggcctgagcgagaacgacgagtggacccaggacagagccaagcccgtgacccagatcgtgtctgccgaagcctggggcagagccgattgcggctttaccagcgagagctaccagcagggcgtgctgagcgccaccaacctgagcgtgatcggcttcagaatcctgctgctgaaagtggccggctttaacctgctgatgaccctgcggctgtggtccagcagggccaagcgatctggatctggagcaacaaacttctcactactcaaacaagcaggtgacgtggaggagaatcccgggcctactagtatggactggatttggcgcatccttttccttgtcggcgctgctaccggcgcgcattccttcgaacaggtgcaactccaggaatctggccctggccttgtgaagcccagcgagacactgagcctgacctgtaccgtgtccggcggcagcatcagctcttacggcgtgcactggattcggcagcctccaggcaagggcctggaatggatcggcgtgatctggacctccggcgtgaccgactacaacagcgccctgatgggcagagtgaccatctccgtggacaccagcaagaaccagttcagcctgaagctgagcagcgtgacagccgccgataccgccgtgtattattgcgccagagatggcgactacgaccgctacacaatggactactggggccagggaacccttgtgaccgtgtcctctacgcgtatccagaaccctgatcctgccgtgtaccagctgcgggatagcaagagcagcgacaagagcgtgtgtctgttcaccgacttcgacagccagaccaacgtgtcccagagcaaggactccgacgtgtacatcaccgataagtgcgtgctggacatgcggagcatggacttcaagagcaactccgccgtggcctggtccaacaagtccgatttcgcctgcgccaacgccttcaacaacagcattatccccgaggacacattcttcccaagccccgagagcagctgcgacgtgaagctggtggaaaagagcttcgagacagacaccaacctgaacttccagatcctgtacgagatcctgctgggcaaggccaccctgtacgccgtgctggtgtctgccctggtgctgatggctatggtcaagcggaaggacagccgggga

SEQ ID NO: 5059 - DNA, 1869 bp, synthetic construct
  source 1..1869: mol_type = other DNA
atggccttaccagtgaccgccttgctcctgccgctggccttgctgctccacgccgccaggccggacatccagatgacccagagccccagcagcctgtctgccagcgtgggcgacagagtgaccatcacctgtagagccagccagagcatcggcaccagcctgcactggtatcagcagaagcctggcaaggcccccaagctgctgattaagttcgccagcagactgcagagcggcgtgcccagcagattttctggcagcggctccggcaccgacttcaccctgacaatcagctccctgcagcccgaggacttcgccacctactactgccagcagagccccggcttccctccaacctttggacagggcaccaagctggaaatcaagcggctcgaggacctgaagaacgtgttcccacctgaggtggccgtgttcgagcctagcgaggccgagatcagccacacccagaaagccaccctcgtgtgcctggctaccggcttctaccccgaccatgtggaactgtcttggtgggtcaacggcaaagaggtgcacagcggcgtgtgtaccgacccccagccactgaaagaacagcccgccctgaacgacagccggtactgcctgagcagcagactgagagtgtccgccaccttctggcagaacccccggaaccacttcagatgccaggtgcagttctacggcctgagcgagaacgacgagtggacccaggacagagccaagcccgtgacccagatcgtgtctgccgaagcctggggcagagccgattgcggctttaccagcgagagctaccagcagggcgtgctgagcgccaccaacctgagcgtgatcggcttcagaatcctgctgctgaaagtggccggctttaacctgctgatgaccctgcggctgtggtccagcagggccaagcgatctggatctggagcaacaaacttctcactactcaaacaagcaggtgacgtggaggagaatcccgggcctactagtatggactggatttggcgcatccttttccttgtcggcgctgctaccggcgcgcattccttcgaacaggtgcaactggtggaatctggcggcggacttgtgaagccaggcggcagcctgagactgagctgtgccgccagcggcttcagcatcaccaccagcggctactactggacctggatcagacagttccccggcaagggcctggaatggatgggctacatcggctacaacagcaagacctactacaaccccgccctgaagtcccggatcaccatcagcagagacaacgccaagaacagcctgtacctgcagatgaactccctgagagccgaggataccgccgtgtactactgcgccagatccctgtacggcggctacaaggacgccttcgatagctggggccagggaacccttgtgaccgtgtctagcacgcgtatccagaaccctgatcctgccgtgtaccagctgcgggatagcaagagcagcgacaagagcgtgtgtctgttcaccgacttcgacagccagaccaacgtgtcccagagcaaggactccgacgtgtacatcaccgataagtgcgtgctggacatgcggagcatggacttcaagagcaactccgccgtggcctggtccaacaagtccgatttcgcctgcgccaacgccttcaacaacagcattatccccgaggacacattcttcccaagccccgagagcagctgcgacgtgaagctggtggaaaagagcttcgagacagacaccaacctgaacttccagatcctgtacgagatcctgctgggcaaggccaccctgtacgccgtgctggtgtctgccctggtgctgatggctatggtcaagcggaaggacagccgggga

SEQ ID NO: 5060 - DNA, 1884 bp, synthetic construct
  source 1..1884: mol_type = other DNA
atggccttaccagtgaccgccttgctcctgccgctggccttgctgctccacgccgccaggccggacgagatcgtgctgacccagagccctctgagcctgcctgtgacacctggcgagcctgccagcatctcctgtagaagcagccagagcctgctgcacagcatcggctacaactacctggactggtatctccagaagcccggccagagcccccaactgctgatctacctgggcagcaacagagccagcggcgtgcccgatagattttccggcagcggctccggcaccgacttcaccctgaagatcagccgggtggaagccgaggacgtgggcgtgtactactgtatgcaggccctccagacccccctgacctttggcggaggcaccaaggtggaaatcaagcggctcgaggacctgaagaacgtgttcccacctgaggtggccgtgttcgagcctagcgaggccgagatcagccacacccagaaagccaccctcgtgtgcctggctaccggcttctaccccgaccatgtggaactgtcttggtgggtcaacggcaaagaggtgcacagcggcgtgtgtaccgacccccagccactgaaagaacagcccgccctgaacgacagccggtactgcctgagcagcagactgagagtgtccgccaccttctggcagaacccccggaaccacttcagatgccaggtgcagttctacggcctgagcgagaacgacgagtggacccaggacagagccaagcccgtgacccagatcgtgtctgccgaagcctggggcagagccgattgcggctttaccagcgagagctaccagcagggcgtgctgagcgccaccaacctgagcgtgatcggcttcagaatcctgctgctgaaagtggccggctttaacctgctgatgaccctgcggctgtggtccagcagggccaagcgatctggatctggagcaacaaacttctcactactcaaacaagcaggtgacgtggaggagaatcccgggcctactagtatggactggatttggcgcatccttttccttgtcggcgctgctaccggcgcgcattccttcgaagaagtgcaactggtggaaagcggaggcggcgtggtgcagcctggaagaagcctgagactgagctgtgccgccagcggcttcaccttccggtcctacggaatgcactgggtgcgccaggcccctggcaaaggactggaatgggtggccgtgatctcctacgacggctccaacaagtactacaccgacagcgtgaacggcagattcaccatcagcagagacaacagcaagaacaccctgtacctccagatgaacagcctgcgggccgaggacaccgccgtgtactattgtgctagaggcggaggctactacgagacaagcggccctgattactggggccagggcacactcgtgaccgtgtctagtacgcgtatccagaaccctgatcctgccgtgtaccagctgcgggatagcaagagcagcgacaagagcgtgtgtctgttcaccgacttcgacagccagaccaacgtgtcccagagcaaggactccgacgtgtacatcaccgataagtgcgtgctggacatgcggagcatggacttcaagagcaactccgccgtggcctggtccaacaagtccgatttcgcctgcgccaacgccttcaacaacagcattatccccgaggacacattcttcccaagccccgagagcagctgcgacgtgaagctggtggaaaagagcttcgagacagacaccaacctgaacttccagatcctgtacgagatcctgctgggcaaggccaccctgtacgccgtgctggtgtctgccctggtgctgatggctatggtcaagcggaaggacagccgggga

SEQ ID NO: 5061 - DNA, 1878 bp, synthetic construct
  source 1..1878: mol_type = other DNA
atggccttaccagtgaccgccttgctcctgccgctggccttgctgctccacgccgccaggccggacgacgtcgtgatgacccagagccctctgagcctgcctgtgacacctggcgagcctgccagcatctcctgtagaagcagccagagcctgctgcacagcatcggctacaactacctgcactggtttctccagaagcccggccagagcccccaactgctgatctacctgggcagcaacagagccagcggcgtgcccgatagattttccggcagcggctccggcaccgacttcaccctgaagatcagccgggtggaagccgaggacgtgggcgtgtactactgtatgcaggccctccagacccctcccacctttggacagggcaccagactggaaatcaagcggctcgaggacctgaagaacgtgttcccacctgaggtggccgtgttcgagcctagcgaggccgagatcagccacacccagaaagccaccctcgtgtgcctggctaccggcttctaccccgaccatgtggaactgtcttggtgggtcaacggcaaagaggtgcacagcggcgtgtgtaccgacccccagccactgaaagaacagcccgccctgaacgacagccggtactgcctgagcagcagactgagagtgtccgccaccttctggcagaacccccggaaccacttcagatgccaggtgcagttctacggcctgagcgagaacgacgagtggacccaggacagagccaagcccgtgacccagatcgtgtctgccgaagcctggggcagagccgattgcggctttaccagcgagagctaccagcagggcgtgctgagcgccaccaacctgagcgtgatcggcttcagaatcctgctgctgaaagtggccggctttaacctgctgatgaccctgcggctgtggtccagcagggccaagcgatctggatctggagcaacaaacttctcactactcaaacaagcaggtgacgtggaggagaatcccgggcctactagtatggactggatttggcgcatccttttccttgtcggcgctgctaccggcgcgcattccttcgaacaactccaactccaggaaagcggccctggcctcgtgaagcctagcggcacactgagcctgacatgtgccgtgtctggcggcagcatcagcagcagcaactggtggtcttgggtgcgccagcctcctggcaagggcctggaatggatcggcgaaatctaccacagcggcagcaccaactacaaccccagcctgaagtccagagtgaccatcagcgtggacaagagcaagaaccagttctccctgaagctgagcagcgtgacagccgccgataccgccgtgtactattgcgtgggcagcccctacggcgactacgtgctggattattggggccagggcaccctcgtgaccgtgtctagtacgcgtatccagaaccctgatcctgccgtgtaccagctgcgggatagcaagagcagcgacaagagcgtgtgtctgttcaccgacttcgacagccagaccaacgtgtcccagagcaaggactccgacgtgtacatcaccgataagtgcgtgctggacatgcggagcatggacttcaagagcaactccgccgtggcctggtccaacaagtccgatttcgcctgcgccaacgccttcaacaacagcattatccccgaggacacattcttcccaagccccgagagcagctgcgacgtgaagctggtggaaaagagcttcgagacagacaccaacctgaacttccagatcctgtacgagatcctgctgggcaaggccaccctgtacgccgtgctggtgtctgccctggtgctgatggctatggtcaagcggaaggacagccgggga

SEQ ID NO: 5062 - DNA, 1872 bp, synthetic construct
  source 1..1872: mol_type = other DNA
atggccttaccagtgaccgccttgctcctgccgctggccttgctgctccacgccgccaggccggacgagatcgtgctgacacagagccctggcaccctgagcctgtctctgggagagagagccacactgagctgtcgggccagccagtctatcagcagcagcttcctggcctggtatcagcagaagcccggccaggcccctaagctgctgatctacgccgccagcacaagagccaccggcatccccgatagattcagcggctctggcagcggcaccgacttcaccctgaccatcagcagactggaacccgaggacttcgccgtgtactactgccagcagtacggcagaagcctgagcttcggcggaggcaccaaggtggaagtgaagctcgaggacctgaagaacgtgttcccacctgaggtggccgtgttcgagcctagcgaggccgagatcagccacacccagaaagccaccctcgtgtgcctggctaccggcttctaccccgaccatgtggaactgtcttggtgggtcaacggcaaagaggtgcacagcggcgtgtgtaccgacccccagccactgaaagaacagcccgccctgaacgacagccggtactgcctgagcagcagactgagagtgtccgccaccttctggcagaacccccggaaccacttcagatgccaggtgcagttctacggcctgagcgagaacgacgagtggacccaggacagagccaagcccgtgacccagatcgtgtctgccgaagcctggggcagagccgattgcggctttaccagcgagagctaccagcagggcgtgctgagcgccaccaacctgagcgtgatcggcttcagaatcctgctgctgaaagtggccggctttaacctgctgatgaccctgcggctgtggtccagcagggccaagcgatctggatctggagcaacaaacttctcactactcaaacaagcaggtgacgtggaggagaatcccgggcctactagtatggactggatttggcgcatccttttccttgtcggcgctgctaccggcgcgcattccttcgaacaggtgcaactccagcagtctggccccggactcgtgaagcctagccagacactgagcctgacctgcgccatcagcggcgatagcgtgtccggcaatagcgccacctggaactggatcagacagagcccatctcggggcctggaatggctgggccggacctactaccgcagcaagtggaaccacgactacgccgagagcgtgaagtcccggatcaccatcaaccccgacaccagcaagaaccagttctccttgcaactgaacagcgtgacccccgaggacacagccgtgtattattgcgccagaggcgacagcagctcttggtacgccttcgactattggggccagggcaccctcgtgaccgtgtctagtacgcgtatccagaaccctgatcctgccgtgtaccagctgcgggatagcaagagcagcgacaagagcgtgtgtctgttcaccgacttcgacagccagaccaacgtgtcccagagcaaggactccgacgtgtacatcaccgataagtgcgtgctggacatgcggagcatggacttcaagagcaactccgccgtggcctggtccaacaagtccgatttcgcctgcgccaacgccttcaacaacagcattatccccgaggacacattcttcccaagccccgagagcagctgcgacgtgaagctggtggaaaagagcttcgagacagacaccaacctgaacttccagatcctgtacgagatcctgctgggcaaggccaccctgtacgccgtgctggtgtctgccctggtgctgatggctatggtcaagcggaaggacagccgggga

SEQ ID NO: 5063 - DNA, 1869 bp, synthetic construct
  source 1..1869: mol_type = other DNA
atggccttaccagtgaccgccttgctcctgccgctggccttgctgctccacgccgccaggccggaccagagcgtcgtgacacagcctcctagcgtgtcagtggcccctggcaagaccgccagaatcacctgtggccggaacaacatcggcagcaagagcgtgcactggtatcagcagaagcccggccaggctcctgtgctggtggtgtacgacgacagcgacagacccagcggcatccccgagagattcagcggcagcaactccggcaataccgccaccctgaccatcagcagagtggaagccggcgacgaggccgactactactgccaagtgtgggacagcagcagcgatcacgtggtgtttggcggaggcaccaagctgacagtgctgggtctcgaggacctgaagaacgtgttcccacctgaggtggccgtgttcgagcctagcgaggccgagatcagccacacccagaaagccaccctcgtgtgcctggctaccggcttctaccccgaccatgtggaactgtcttggtgggtcaacggcaaagaggtgcacagcggcgtgtgtaccgacccccagccactgaaagaacagcccgccctgaacgacagccggtactgcctgagcagcagactgagagtgtccgccaccttctggcagaacccccggaaccacttcagatgccaggtgcagttctacggcctgagcgagaacgacgagtggacccaggacagagccaagcccgtgacccagatcgtgtctgccgaagcctggggcagagccgattgcggctttaccagcgagagctaccagcagggcgtgctgagcgccaccaacctgagcgtgatcggcttcagaatcctgctgctgaaagtggccggctttaacctgctgatgaccctgcggctgtggtccagcagggccaagcgatctggatctggagcaacaaacttctcactactcaaacaagcaggtgacgtggaggagaatcccgggcctactagtatggactggatttggcgcatccttttccttgtcggcgctgctaccggcgcgcattccttcgaagtgcaactggtgcagtctggcggaggggtcatgcggcctggcggatctctgagactgtcttgtgccgccagcggcttcaccttcgacgactacggcatgagctgggtgcgccaggcccctggaaaaggcctggaatgggtgtccggcatcaactggaatggcggcagcaccggctacgccgattctgtgcggggcagattcaccatcagccgggacaacgccaagaacagcctgtacctgcagatgaactccctgcgggccgaggacaccgccctgtactattgcgccagagagcggggctacggctaccacgaccctcacgattattggggccagggcacccttgttaccgtgtcctctacgcgtatccagaaccctgatcctgccgtgtaccagctgcgggatagcaagagcagcgacaagagcgtgtgtctgttcaccgacttcgacagccagaccaacgtgtcccagagcaaggactccgacgtgtacatcaccgataagtgcgtgctggacatgcggagcatggacttcaagagcaactccgccgtggcctggtccaacaagtccgatttcgcctgcgccaacgccttcaacaacagcattatccccgaggacacattcttcccaagccccgagagcagctgcgacgtgaagctggtggaaaagagcttcgagacagacaccaacctgaacttccagatcctgtacgagatcctgctgggcaaggccaccctgtacgccgtgctggtgtctgccctggtgctgatggctatggtcaagcggaaggacagccgggga

SEQ ID NO: 5064 - DNA, 1908 bp, synthetic construct
  source 1..1908: mol_type = other DNA
atggccttaccagtgaccgccttgctcctgccgctggccttgctgctccacgccgccaggccggaacagaaactcatcagtgaagaagacctggaattccaggctgtcgtgacacagcctcctagcgcctctggcacaccaggccagagagtgaccatctcctgtagcggcagcagcagcaacatcggcagcaacaccgtgaactggtatcagcaggtgcccggcaccgctcccaagctgctgatctacagcaacaaccagcggcccagcggcgtgcccgatagattttctggcagcaagagcggcaccagcgccagcctggctatctctggactccagtccgaggacgaggccgactactattgcgccgcctgggacgatagcctgaacggctgggtgttcggcggaggcaccaagctgacagtgctgctcgaggacctgaagaacgtgttcccacctgaggtggccgtgttcgagcctagcgaggccgagatcagccacacccagaaagccaccctcgtgtgcctggctaccggcttctaccccgaccatgtggaactgtcttggtgggtcaacggcaaagaggtgcacagcggcgtgtgtaccgacccccagccactgaaagaacagcccgccctgaacgacagccggtactgcctgagcagcagactgagagtgtccgccaccttctggcagaacccccggaaccacttcagatgccaggtgcagttctacggcctgagcgagaacgacgagtggacccaggacagagccaagcccgtgacccagatcgtgtctgccgaagcctggggcagagccgattgcggctttaccagcgagagctaccagcagggcgtgctgagcgccaccaacctgagcgtgatcggcttcagaatcctgctgctgaaagtggccggctttaacctgctgatgaccctgcggctgtggtccagcagggccaagcgatctggatctggagcaacaaacttctcactactcaaacaagcaggtgacgtggaggagaatcccgggcctactagtatggactggatttggcgcatccttttccttgtcggcgctgctaccggcgcgcattccttcgaacagatgcaactggtgcagagcggagccgaagtgaaagagcctggcgagagcctgcggatctcctgcaagggcagcggctacagcttcaccaatttctggatctcttgggtgcgccagatgcccggcaagggcctggaatggatgggcagagtggaccccggctactcctacagcacctacagccctagcttccagggccacgtgaccatcagcgccgacaagagcaccagcaccgcctacctccagtggaacagcctgaaggccagcgacaccgccatgtactactgcgccagagtgcagtacagcggctattacgattggttcgacccctggggccagggcacactcgtgacagtgtcaagcacgcgtatccagaaccctgatcctgccgtgtaccagctgcgggatagcaagagcagcgacaagagcgtgtgtctgttcaccgacttcgacagccagaccaacgtgtcccagagcaaggactccgacgtgtacatcaccgataagtgcgtgctggacatgcggagcatggacttcaagagcaactccgccgtggcctggtccaacaagtccgatttcgcctgcgccaacgccttcaacaacagcattatccccgaggacacattcttcccaagccccgagagcagctgcgacgtgaagctggtggaaaagagcttcgagacagacaccaacctgaacttccagatcctgtacgagatcctgctgggcaaggccaccctgtacgccgtgctggtgtctgccctggtgctgatggctatggtcaagcggaaggacagccgggga

SEQ ID NO: 5065 - DNA, 1890 bp, synthetic construct
  source 1..1890: mol_type = other DNA
atggccttaccagtgaccgccttgctcctgccgctggccttgctgctccacgccgccaggccggaacagaaactcatcagtgaagaagacctggaattcgacatccagatgacccagagccccagcacactgagcgccagcgtgggcgacagagtgaccatcacctgtcgggccagccagaacatcaacaagtggctggcctggtatcagcagaggcccggaaaagccccccagctgctgatctacaaggccagcagcctggaaagcggcgtgcccagcagattttctggcagcggctctggcaccgagtacaccctgaccatcagctccctccagcccgacgacttcgccacctactactgccagcagtacaacagctacgccaccttcggccagggcaccaaggtggaaatcaagagactcgaggacctgaagaacgtgttcccacctgaggtggccgtgttcgagcctagcgaggccgagatcagccacacccagaaagccaccctcgtgtgcctggctaccggcttctaccccgaccatgtggaactgtcttggtgggtcaacggcaaagaggtgcacagcggcgtgtgtaccgacccccagccactgaaagaacagcccgccctgaacgacagccggtactgcctgagcagcagactgagagtgtccgccaccttctggcagaacccccggaaccacttcagatgccaggtgcagttctacggcctgagcgagaacgacgagtggacccaggacagagccaagcccgtgacccagatcgtgtctgccgaagcctggggcagagccgattgcggctttaccagcgagagctaccagcagggcgtgctgagcgccaccaacctgagcgtgatcggcttcagaatcctgctgctgaaagtggccggctttaacctgctgatgaccctgcggctgtggtccagcagggccaagcgatctggatctggagcaacaaacttctcactactcaaacaagcaggtgacgtggaggagaatcccgggcctactagtatggactggatttggcgcatccttttccttgtcggcgctgctaccggcgcgcattccttcgaacaggtgcagctggtgcagtctggggccgaagtgaagaagcctggcgagagcctgaagatcagctgcaagggctccggctacaacttctctaacaagtggatcggctgggtgcgccagctgcctggcagaggactggaatggatcgccatcatctaccccggctacagcgacatcacctacagccccagcttccagggccgcgtgacaatcagcgccgacaccagcatcaacaccgcctacctgcactggcacagcctgaaggccagcgacaccgccatgtactactgcgtgcggcatacagccctggctggcttcgattattggggcctgggcaccctcgtgaccgtgtctagtacgcgtatccagaaccctgatcctgccgtgtaccagctgcgggatagcaagagcagcgacaagagcgtgtgtctgttcaccgacttcgacagccagaccaacgtgtcccagagcaaggactccgacgtgtacatcaccgataagtgcgtgctggacatgcggagcatggacttcaagagcaactccgccgtggcctggtccaacaagtccgatttcgcctgcgccaacgccttcaacaacagcattatccccgaggacacattcttcccaagccccgagagcagctgcgacgtgaagctggtggaaaagagcttcgagacagacaccaacctgaacttccagatcctgtacgagatcctgctgggcaaggccaccctgtacgccgtgctggtgtctgccctggtgctgatggctatggtcaagcggaaggacagccgggga

SEQ ID NO: 5066 - DNA, 1863 bp, synthetic construct
  source 1..1863: mol_type = other DNA
atggccttaccagtgaccgccttgctcctgccgctggccttgctgctccacgccgccaggccgatcgtgctgacacagagccctgcttctctggccgtgtctctgggacagagagccaccatcagctgtagagccagcgagagcgtggacaactacggcaacaccttcatgcactggtatcagcagaagcccggccagcctcctaagctgctgatctacagagccagcaacctggaaagcggcatccccgccagattttctggcagcggcagcagaaccgacttcaccctgaccatcaatcccgtggaagccgacgacgtggcaacctactactgccagcagagcaacgaggaccctcctacatttggagccggcaccaagctggaactgaaactcgaggacctgaagaacgtgttcccacctgaggtggccgtgttcgagcctagcgaggccgagatcagccacacccagaaagccaccctcgtgtgcctggctaccggcttctaccccgaccatgtggaactgtcttggtgggtcaacggcaaagaggtgcacagcggcgtgtgtaccgacccccagccactgaaagaacagcccgccctgaacgacagccggtactgcctgagcagcagactgagagtgtccgccaccttctggcagaacccccggaaccacttcagatgccaggtgcagttctacggcctgagcgagaacgacgagtggacccaggacagagccaagcccgtgacccagatcgtgtctgccgaagcctggggcagagccgattgcggctttaccagcgagagctaccagcagggcgtgctgagcgccaccaacctgagcgtgatcggcttcagaatcctgctgctgaaagtggccggctttaacctgctgatgaccctgcggctgtggtccagcagggccaagcgatctggatctggagcaacaaacttctcactactcaaacaagcaggtgacgtggaggagaatcccgggcctactagtatggactggatttggcgcatccttttccttgtcggcgctgctaccggcgcgcattccttcgaacagattcagctggtgcagtctggccccgagctgaagaaacctggcgagacagtgaagatcagctgcaaggccagcggctacatcttcaccaattacggcatgaactgggtcaagcaggcccctggcaagagcttcaagtggatgggctggatcaacacctacaccggcgagagcacatacagcgccgacttcaagggcagattcgccttcagcctggaaaccagcgccagcacagcctacctgcacatcaacgacctgaagaacgaggacaccgccacctacttttgcgccagaagcggcggctacgaccctatggattattggggccagggcaccagcgtgaccgtttcttctacgcgtatccagaaccctgatcctgccgtgtaccagctgcgggatagcaagagcagcgacaagagcgtgtgtctgttcaccgacttcgacagccagaccaacgtgtcccagagcaaggactccgacgtgtacatcaccgataagtgcgtgctggacatgcggagcatggacttcaagagcaactccgccgtggcctggtccaacaagtccgatttcgcctgcgccaacgccttcaacaacagcattatccccgaggacacattcttcccaagccccgagagcagctgcgacgtgaagctggtggaaaagagcttcgagacagacaccaacctgaacttccagatcctgtacgagatcctgctgggcaaggccaccctgtacgccgtgctggtgtctgccctggtgctgatggctatggtcaagcggaaggacagccgggga

SEQ ID NO: 5067 - DNA, 1860 bp, synthetic construct
  source 1..1860: mol_type = other DNA
atggccttaccagtgaccgccttgctcctgccgctggccttgctgctccacgccgccaggccggagatcgtgctgacacagagccctggcaccctgagcctgtctccaggcgaaagagccacactgagctgtcgggccagccagagcgtgtccaatacctacctggcctggtatcaccagaggcccggacaggctccccggctgctgatctatggcgcttctagcagagccaccggcatccccgatagattcagcggctctggcagcggcaccgacttcgccctgacaatcagctccctggaacccgaggacttcgccgtgtactactgccagcagtacagcaactcctggaccttcggccagggcaccaaggtggaaatcaagagactcgaggacctgaagaacgtgttcccacctgaggtggccgtgttcgagcctagcgaggccgagatcagccacacccagaaagccaccctcgtgtgcctggctaccggcttctaccccgaccatgtggaactgtcttggtgggtcaacggcaaagaggtgcacagcggcgtgtgtaccgacccccagccactgaaagaacagcccgccctgaacgacagccggtactgcctgagcagcagactgagagtgtccgccaccttctggcagaacccccggaaccacttcagatgccaggtgcagttctacggcctgagcgagaacgacgagtggacccaggacagagccaagcccgtgacccagatcgtgtctgccgaagcctggggcagagccgattgcggctttaccagcgagagctaccagcagggcgtgctgagcgccaccaacctgagcgtgatcggcttcagaatcctgctgctgaaagtggccggctttaacctgctgatgaccctgcggctgtggtccagcagggccaagcgatctggatctggagcaacaaacttctcactactcaaacaagcaggtgacgtggaggagaatcccgggcctactagtatggactggatttggcgcatccttttccttgtcggcgctgctaccggcgcgcattccttcgaacaggtgcaactggtggaatctggcgggggagtggtgcagcctggcagaagcctgagactgtcttgtgccgccagcggcttcaccttcagcagctacgacatgcactgggtgcgccaggcccctggcaaaggactggaatgggtggccgtgatctcctacgacggcaccaacgagtattacgccgacagcgtgaagggccggttcaccatctccagagacaccagcaagaacaccctgtacctccagatgaacagcctgcgggccgaggacacagccgtgtattattgcgccagagagcggtacttcgactggtccttcgactactggggccagggaaccctggtgtccgtgtctagtacgcgtatccagaaccctgatcctgccgtgtaccagctgcgggatagcaagagcagcgacaagagcgtgtgtctgttcaccgacttcgacagccagaccaacgtgtcccagagcaaggactccgacgtgtacatcaccgataagtgcgtgctggacatgcggagcatggacttcaagagcaactccgccgtggcctggtccaacaagtccgatttcgcctgcgccaacgccttcaacaacagcattatccccgaggacacattcttcccaagccccgagagcagctgcgacgtgaagctggtggaaaagagcttcgagacagacaccaacctgaacttccagatcctgtacgagatcctgctgggcaaggccaccctgtacgccgtgctggtgtctgccctggtgctgatggctatggtcaagcggaaggacagccgggga

SEQ ID NO: 5068 - DNA, 1857 bp, synthetic construct
  source 1..1857: mol_type = other DNA
atggccttaccagtgaccgccttgctcctgccgctggccttgctgctccacgccgccaggccggagctgacacaggaccctgctgtgtctgttgccctgggccagacagtgcggattacctgtcaaggcgacagcctgagaagcaactacgccaactggtatcagcagaagcccggacaggctcccgtgctggttatctacggccagaacaacagacccagcggcatccccgatagattcagcggctctagctctggcaataccgccagcctgacaatcactggcgctcaggctgccgatgaggccgactactactgcgatagcagagtgtccaccggcaatcacgtggtgtttggcggcggaacaaagctgacagtgctcggacaactcgaggacctgaagaacgtgttcccacctgaggtggccgtgttcgagcctagcgaggccgagatcagccacacccagaaagccaccctcgtgtgcctggctaccggcttctaccccgaccatgtggaactgtcttggtgggtcaacggcaaagaggtgcacagcggcgtgtgtaccgacccccagccactgaaagaacagcccgccctgaacgacagccggtactgcctgagcagcagactgagagtgtccgccaccttctggcagaacccccggaaccacttcagatgccaggtgcagttctacggcctgagcgagaacgacgagtggacccaggacagagccaagcccgtgacccagatcgtgtctgccgaagcctggggcagagccgattgcggctttaccagcgagagctaccagcagggcgtgctgagcgccaccaacctgagcgtgatcggcttcagaatcctgctgctgaaagtggccggctttaacctgctgatgaccctgcggctgtggtccagcagggccaagcgatctggatctggagcaacaaacttctcactactcaaacaagcaggtgacgtggaggagaatcccgggcctactagtatggactggatttggcgcatccttttccttgtcggcgctgctaccggcgcgcattccttcgaagaagttcagctggtgcagagcggagccgaagtgaagaaacctggggcctctgtgaaggtgtcctgcaaggcttccggctacacctttaccagctacgccatgcactgggtccgacaggcacctggacaacggcttgaatggatgggctggatcaacgccggcaacggcaacaccaagtacagccagaaattccagggccgcgtgaccatcaccagagatacaagcgccagcaccgcctacatggaactgtctagcctgagatccgaggacaccgccgtgtactactgtgccagagacatcagctacggcagcttcgactattggggccagggcacactggtcaccgttagctctacgcgtatccagaaccctgatcctgccgtgtaccagctgcgggatagcaagagcagcgacaagagcgtgtgtctgttcaccgacttcgacagccagaccaacgtgtcccagagcaaggactccgacgtgtacatcaccgataagtgcgtgctggacatgcggagcatggacttcaagagcaactccgccgtggcctggtccaacaagtccgatttcgcctgcgccaacgccttcaacaacagcattatccccgaggacacattcttcccaagccccgagagcagctgcgacgtgaagctggtggaaaagagcttcgagacagacaccaacctgaacttccagatcctgtacgagatcctgctgggcaaggccaccctgtacgccgtgctggtgtctgccctggtgctgatggctatggtcaagcggaaggacagccgggga

SEQ ID NO: 5069 - DNA, 1863 bp, synthetic construct
  source 1..1863: mol_type = other DNA
atggccttaccagtgaccgccttgctcctgccgctggccttgctgctccacgccgccaggccggacatcgtgctgacacagacaccagccacactgagcgtgacacctggcgattctgtgtccctgagctgtagagccagccagagcatcagcaacaacctgcactggtatcagcagaagtcccacgagagccccagactgctgattaagaacgccagccagtctatcagcggcatccccagcaagtttagcggctctggcagcggcaccgacttcaccctgagaatcaacagcgtggaaaccgaggacttcgggatgtacttctgccagcagagcaatagctggccctacacatttggctccggcaccaagctggaaatcaaactcgaggacctgaagaacgtgttcccacctgaggtggccgtgttcgagcctagcgaggccgagatcagccacacccagaaagccaccctcgtgtgcctggctaccggcttctaccccgaccatgtggaactgtcttggtgggtcaacggcaaagaggtgcacagcggcgtgtgtaccgacccccagccactgaaagaacagcccgccctgaacgacagccggtactgcctgagcagcagactgagagtgtccgccaccttctggcagaacccccggaaccacttcagatgccaggtgcagttctacggcctgagcgagaacgacgagtggacccaggacagagccaagcccgtgacccagatcgtgtctgccgaagcctggggcagagccgattgcggctttaccagcgagagctaccagcagggcgtgctgagcgccaccaacctgagcgtgatcggcttcagaatcctgctgctgaaagtggccggctttaacctgctgatgaccctgcggctgtggtccagcagggccaagcgatctggatctggagcaacaaacttctcactactcaaacaagcaggtgacgtggaggagaatcccgggcctactagtatggactggatttggcgcatccttttccttgtcggcgctgctaccggcgcgcattccttcgaacaagtgaagctgcaacagagcggacccgagctggttaagccaggcgcttccgtgaagattagctgcaaggccagcggctacagcttcaccggctactacatgcactgggtcaagcagagccacggcaacatcctggactggatcggctacatctacccctacaacggcgtgtccagctacaaccagaagttcaagggcaaagccactctgaccgtggacaagagcagcagcaccgcctacatggaactgagaagcctgaccagcgaggacagcgccgtgtactattgtgccagagagcggggcctgtaccagctcagagcaatggattattggggccagggcaccagcgtgaccgtttcttctacgcgtatccagaaccctgatcctgccgtgtaccagctgcgggatagcaagagcagcgacaagagcgtgtgtctgttcaccgacttcgacagccagaccaacgtgtcccagagcaaggactccgacgtgtacatcaccgataagtgcgtgctggacatgcggagcatggacttcaagagcaactccgccgtggcctggtccaacaagtccgatttcgcctgcgccaacgccttcaacaacagcattatccccgaggacacattcttcccaagccccgagagcagctgcgacgtgaagctggtggaaaagagcttcgagacagacaccaacctgaacttccagatcctgtacgagatcctgctgggcaaggccaccctgtacgccgtgctggtgtctgccctggtgctgatggctatggtcaagcggaaggacagccgggga

SEQ ID NO: 5070 - DNA, 1836 bp, synthetic construct
  source 1..1836: mol_type = other DNA
atggccttaccagtgaccgccttgctcctgccgctggccttgctgctccacgccgccaggccggacatcgtgatgacacagacccctgccatcatgagcgcctctccaggccagaaagtgaccatcacatgtagcgccagcagcagcgtgaactacatgcactggtatcagcagaagctgggcagcagccccaagctgtggatctacgataccagcaaactggcccctggcgtgccagccagattttctggttctggcagcggcaccagctacagcctgacaatcagcagcatggaagccgaggatgccgccagctacttctgccatcagtggtctagctacccctacacctttggctccggcaccaagctggaaatcaaactcgaggacctgaagaacgtgttcccacctgaggtggccgtgttcgagcctagcgaggccgagatcagccacacccagaaagccaccctcgtgtgcctggctaccggcttctaccccgaccatgtggaactgtcttggtgggtcaacggcaaagaggtgcacagcggcgtgtgtaccgacccccagccactgaaagaacagcccgccctgaacgacagccggtactgcctgagcagcagactgagagtgtccgccaccttctggcagaacccccggaaccacttcagatgccaggtgcagttctacggcctgagcgagaacgacgagtggacccaggacagagccaagcccgtgacccagatcgtgtctgccgaagcctggggcagagccgattgcggctttaccagcgagagctaccagcagggcgtgctgagcgccaccaacctgagcgtgatcggcttcagaatcctgctgctgaaagtggccggctttaacctgctgatgaccctgcggctgtggtccagcagggccaagcgatctggatctggagcaacaaacttctcactactcaaacaagcaggtgacgtggaggagaatcccgggcctactagtatggactggatttggcgcatccttttccttgtcggcgctgctaccggcgcgcattccttcgaagaagttcagctccaagagtctggccccgacctggtcaagcctagccaaagcctgagcctgacctgtaccgtgaccggctacagcatcacaagcggctatggatggcactggatcagacagttccccggcaacaaactggaatggatgggctacatccactacagcggcagcaccacctacaatcccagcctgaagtcccggatcagcatcagcagagacaccagcaagaaccagttcttcctgcaactgaacagcgtgaccaccgaggacaccgccacctactattgtgctcggagcctgagatattggggccagggcacaaccctgaccgtgtcatctacgcgtatccagaaccctgatcctgccgtgtaccagctgcgggatagcaagagcagcgacaagagcgtgtgtctgttcaccgacttcgacagccagaccaacgtgtcccagagcaaggactccgacgtgtacatcaccgataagtgcgtgctggacatgcggagcatggacttcaagagcaactccgccgtggcctggtccaacaagtccgatttcgcctgcgccaacgccttcaacaacagcattatccccgaggacacattcttcccaagccccgagagcagctgcgacgtgaagctggtggaaaagagcttcgagacagacaccaacctgaacttccagatcctgtacgagatcctgctgggcaaggccaccctgtacgccgtgctggtgtctgccctggtgctgatggctatggtcaagcggaaggacagccgggga

SEQ ID NO: 5071 - DNA, 1845 bp, synthetic construct
  source 1..1845: mol_type = other DNA
atggccttaccagtgaccgccttgctcctgccgctggccttgctgctccacgccgccaggccggacatccagatgacacagagccctagcagcctgtctgccagcgtgggagacagagtgaccatcacctgtagcgccaccagcagcatcagctacatgcactggtatcagcagaagcccggcaaggcccctaaaggctggatctacgataccagcaaactggcccacggcgtgcccagcagattttctggttctggcagcggcaccgacttcaccctgacaatatctagcctccagcctgaggacttcgccacctactactgccaccagagaagaagctaccccttcaccttcggccagggcaccaaggtggaaatcaaactcgaggacctgaagaacgtgttcccacctgaggtggccgtgttcgagcctagcgaggccgagatcagccacacccagaaagccaccctcgtgtgcctggctaccggcttctaccccgaccatgtggaactgtcttggtgggtcaacggcaaagaggtgcacagcggcgtgtgtaccgacccccagccactgaaagaacagcccgccctgaacgacagccggtactgcctgagcagcagactgagagtgtccgccaccttctggcagaacccccggaaccacttcagatgccaggtgcagttctacggcctgagcgagaacgacgagtggacccaggacagagccaagcccgtgacccagatcgtgtctgccgaagcctggggcagagccgattgcggctttaccagcgagagctaccagcagggcgtgctgagcgccaccaacctgagcgtgatcggcttcagaatcctgctgctgaaagtggccggctttaacctgctgatgaccctgcggctgtggtccagcagggccaagcgatctggatctggagcaacaaacttctcactactcaaacaagcaggtgacgtggaggagaatcccgggcctactagtatggactggatttggcgcatccttttccttgtcggcgctgctaccggcgcgcattccttcgaagaagtgcaactggttcagagcggagccgaagtgaagaaacctggggcctctgtgaaggtgtcctgcaaggcttccggctacacctttaccaatttctggattcactgggtccgacaggctccaggccaaggactggaatggatcggagagatcgaccccagcgacagctacaccaactacaaccagaaattcaaaggccgggtcaccatcaccagagacaccagcacaagcaccgcctacctggaactgagcagcctgagaagcgaggacaccgccgtgtactactgcgccagggaaatcaccaccgtggattattggggccagggaaccctggtcaccgtgtcatctacgcgtatccagaaccctgatcctgccgtgtaccagctgcgggatagcaagagcagcgacaagagcgtgtgtctgttcaccgacttcgacagccagaccaacgtgtcccagagcaaggactccgacgtgtacatcaccgataagtgcgtgctggacatgcggagcatggacttcaagagcaactccgccgtggcctggtccaacaagtccgatttcgcctgcgccaacgccttcaacaacagcattatccccgaggacacattcttcccaagccccgagagcagctgcgacgtgaagctggtggaaaagagcttcgagacagacaccaacctgaacttccagatcctgtacgagatcctgctgggcaaggccaccctgtacgccgtgctggtgtctgccctggtgctgatggctatggtcaagcggaaggacagccgggga

SEQ ID NO: 5072 - DNA, 1866 bp, synthetic construct
  source 1..1866: mol_type = other DNA
atggccttaccagtgaccgccttgctcctgccgctggccttgctgctccacgccgccaggccggacatccagatgacacagagccctagcagcctgtctgccagcgtgggagacagagtgaccatcacatgcaaggccagccagggcttcaacaaatacgtggcctggtatcagcagaagcccggcaaggctcctaagctgctgatctactacaccagcacactccagcctggcgtgcccagcagattttctggctctggcagcggcagagactacaccctgacaatatccagcctccagccagaggacttcgccacctactactgtctccagtacggcaacctgctgtacgcctttggacagggcaccaaggtggaaatcaagagactcgaggacctgaagaacgtgttcccacctgaggtggccgtgttcgagcctagcgaggccgagatcagccacacccagaaagccaccctcgtgtgcctggctaccggcttctaccccgaccatgtggaactgtcttggtgggtcaacggcaaagaggtgcacagcggcgtgtgtaccgacccccagccactgaaagaacagcccgccctgaacgacagccggtactgcctgagcagcagactgagagtgtccgccaccttctggcagaacccccggaaccacttcagatgccaggtgcagttctacggcctgagcgagaacgacgagtggacccaggacagagccaagcccgtgacccagatcgtgtctgccgaagcctggggcagagccgattgcggctttaccagcgagagctaccagcagggcgtgctgagcgccaccaacctgagcgtgatcggcttcagaatcctgctgctgaaagtggccggctttaacctgctgatgaccctgcggctgtggtccagcagggccaagcgatctggatctggagcaacaaacttctcactactcaaacaagcaggtgacgtggaggagaatcccgggcctactagtatggactggatttggcgcatccttttccttgtcggcgctgctaccggcgcgcattccttcgaagaagttcagcttgtgcagagcggagccgaagtgaagaaacctggggcctctgtgaaggtgtcctgcaaagccagcggctacacctttaccagctactggatcggctgggtccgacaggctcctggacaaggactggaatggatcggcgacatctatcccggcggaggctacaccaactacaacgagaagttcaagggccgcgtgacaatcaccagagacacctctacaagcaccgcctacctggaactgagcagcctgagaagcgaggacaccgccgtgtactactgcgccagactggatggcagcagctacagaggcgctatggattcttggggccagggcacactggtcaccgtttcttctacgcgtatccagaaccctgatcctgccgtgtaccagctgcgggatagcaagagcagcgacaagagcgtgtgtctgttcaccgacttcgacagccagaccaacgtgtcccagagcaaggactccgacgtgtacatcaccgataagtgcgtgctggacatgcggagcatggacttcaagagcaactccgccgtggcctggtccaacaagtccgatttcgcctgcgccaacgccttcaacaacagcattatccccgaggacacattcttcccaagccccgagagcagctgcgacgtgaagctggtggaaaagagcttcgagacagacaccaacctgaacttccagatcctgtacgagatcctgctgggcaaggccaccctgtacgccgtgctggtgtctgccctggtgctgatggctatggtcaagcggaaggacagccgggga

SEQ ID NO: 5073 - DNA, 1854 bp, synthetic construct
  source 1..1854: mol_type = other DNA
atggccttaccagtgaccgccttgctcctgccgctggccttgctgctccacgccgccaggccggacatccagatgacacagagccctagcagcctgtctgccagcgtgggagacagagtgaccatcacctgtagagccagccaggacatccggtactacctgaactggtatcagcagaagcccggcaaggcccctaagctgctgatctatgtggcctccagcctccagagcggagtgccttctagattttctggcagcggctccggcaccgagtttaccctgacagtgtctagcttgcagcccgaggacttcgccacctactactgcctgcaagtgtacagcacccctcggacctttggacagggcaccaaggtggaaatcaaactcgaggacctgaagaacgtgttcccacctgaggtggccgtgttcgagcctagcgaggccgagatcagccacacccagaaagccaccctcgtgtgcctggctaccggcttctaccccgaccatgtggaactgtcttggtgggtcaacggcaaagaggtgcacagcggcgtgtgtaccgacccccagccactgaaagaacagcccgccctgaacgacagccggtactgcctgagcagcagactgagagtgtccgccaccttctggcagaacccccggaaccacttcagatgccaggtgcagttctacggcctgagcgagaacgacgagtggacccaggacagagccaagcccgtgacccagatcgtgtctgccgaagcctggggcagagccgattgcggctttaccagcgagagctaccagcagggcgtgctgagcgccaccaacctgagcgtgatcggcttcagaatcctgctgctgaaagtggccggctttaacctgctgatgaccctgcggctgtggtccagcagggccaagcgatctggatctggagcaacaaacttctcactactcaaacaagcaggtgacgtggaggagaatcccgggcctactagtatggactggatttggcgcatccttttccttgtcggcgctgctaccggcgcgcattccttcgaagaagtgcagcttgttgaatctggcggcggactggctaagcctggcggatctctgagactgtcttgtgccgccagcggcttccggttcaccttcaacaactactacatggactgggtccgacaggcccctggacaaggacttgaatgggtgtccagaatcagcagcagcggcgaccctacttggtacgccgattctgtgaagggcagattcaccatcagcagagagaacgccaagaacaccctgttcctccagatgaactccctgagagccgaggacaccgccgtgtactattgtgcctctctgaccaccggcagcgattcttggggacagggcgtgctggttaccgtgtcatctacgcgtatccagaaccctgatcctgccgtgtaccagctgcgggatagcaagagcagcgacaagagcgtgtgtctgttcaccgacttcgacagccagaccaacgtgtcccagagcaaggactccgacgtgtacatcaccgataagtgcgtgctggacatgcggagcatggacttcaagagcaactccgccgtggcctggtccaacaagtccgatttcgcctgcgccaacgccttcaacaacagcattatccccgaggacacattcttcccaagccccgagagcagctgcgacgtgaagctggtggaaaagagcttcgagacagacaccaacctgaacttccagatcctgtacgagatcctgctgggcaaggccaccctgtacgccgtgctggtgtctgccctggtgctgatggctatggtcaagcggaaggacagccgggga

SEQ ID NO: 5074 - DNA, 1857 bp, synthetic construct
  source 1..1857: mol_type = other DNA
atggccttaccagtgaccgccttgctcctgccgctggccttgctgctccacgccgccaggccggagatcgtgatgacacagagccccgccacactgagtgtgtctccaggcgaaagagccacactgtcctgtagagccagccagagcgtgtccagaaacctggcctggtatcagcagaagcctggacaggctccccggctgttgatctacggcgcttctacaagagccaccggcattcccgccagattttctggctctggcagcggcaccgagttcaccctgacaatcggaagcctccagagcgaggacttcgccgtgtactactgccagcagtacaagacctggcctcggacctttggacagggcaccaacgtggaaatcaaactcgaggacctgaagaacgtgttcccacctgaggtggccgtgttcgagcctagcgaggccgagatcagccacacccagaaagccaccctcgtgtgcctggctaccggcttctaccccgaccatgtggaactgtcttggtgggtcaacggcaaagaggtgcacagcggcgtgtgtaccgacccccagccactgaaagaacagcccgccctgaacgacagccggtactgcctgagcagcagactgagagtgtccgccaccttctggcagaacccccggaaccacttcagatgccaggtgcagttctacggcctgagcgagaacgacgagtggacccaggacagagccaagcccgtgacccagatcgtgtctgccgaagcctggggcagagccgattgcggctttaccagcgagagctaccagcagggcgtgctgagcgccaccaacctgagcgtgatcggcttcagaatcctgctgctgaaagtggccggctttaacctgctgatgaccctgcggctgtggtccagcagggccaagcgatctggatctggagcaacaaacttctcactactcaaacaagcaggtgacgtggaggagaatcccgggcctactagtatggactggatttggcgcatccttttccttgtcggcgctgctaccggcgcgcattccttcgaacaagttcagctgcaacaatggggagccggcctgctgaagcctagcgaaacactgtctctgacctgcgccgtgttcggcggctctttcagcggctactactggtcctggatcagacagcctcctggcaaaggactggaatggatcggcgagatcaaccaccggggcaacaccaacgacaaccccagcctgaaaagcagagtgaccatcagcgtggacaccagcaagaaccagttcgccctgaagctgagcagcgtgacagccgctgataccgccgtgtattattgcgccagagagcggggctacacctacggcaatttcgatcactggggccagggcaccctggtcacagtttcttctacgcgtatccagaaccctgatcctgccgtgtaccagctgcgggatagcaagagcagcgacaagagcgtgtgtctgttcaccgacttcgacagccagaccaacgtgtcccagagcaaggactccgacgtgtacatcaccgataagtgcgtgctggacatgcggagcatggacttcaagagcaactccgccgtggcctggtccaacaagtccgatttcgcctgcgccaacgccttcaacaacagcattatccccgaggacacattcttcccaagccccgagagcagctgcgacgtgaagctggtggaaaagagcttcgagacagacaccaacctgaacttccagatcctgtacgagatcctgctgggcaaggccaccctgtacgccgtgctggtgtctgccctggtgctgatggctatggtcaagcggaaggacagccgggga

SEQ ID NO: 5075 - DNA, 1860 bp, synthetic construct
  source 1..1860: mol_type = other DNA
atggccttaccagtgaccgccttgctcctgccgctggccttgctgctccacgccgccaggccggagatcgtgatgacccctagcagcgccacactgagtgtgtctccaggcgaaagagccacactgtcctgtagagccagccagagcgtgtccagaaacctggcctggtatcagcagaagcctggacaggctccccggctgttgatctacggcgcttctacaagagccaccggcattcccgccagattttctggctctggcagcggcaccgagttcaccctgacaatctctagcctccagagcgaggacttcgccgtgtactactgccaccagtacagcaactggatgtgcagcttcggccagggcaccaagctggaaatcaaactcgaggacctgaagaacgtgttcccacctgaggtggccgtgttcgagcctagcgaggccgagatcagccacacccagaaagccaccctcgtgtgcctggctaccggcttctaccccgaccatgtggaactgtcttggtgggtcaacggcaaagaggtgcacagcggcgtgtgtaccgacccccagccactgaaagaacagcccgccctgaacgacagccggtactgcctgagcagcagactgagagtgtccgccaccttctggcagaacccccggaaccacttcagatgccaggtgcagttctacggcctgagcgagaacgacgagtggacccaggacagagccaagcccgtgacccagatcgtgtctgccgaagcctggggcagagccgattgcggctttaccagcgagagctaccagcagggcgtgctgagcgccaccaacctgagcgtgatcggcttcagaatcctgctgctgaaagtggccggctttaacctgctgatgaccctgcggctgtggtccagcagggccaagcgatctggatctggagcaacaaacttctcactactcaaacaagcaggtgacgtggaggagaatcccgggcctactagtatggactggatttggcgcatccttttccttgtcggcgctgctaccggcgcgcattccttcgaagaagttcagctccttgagtcaggtggcggcctggttcaacctggcggatctctgagactgagctgtgccgccagcggcttcacctttagcagatacgccatgaactgggtccgacaggcccctggcaaaggactggaatgggtgtccggcatctctggaagcggcggcagaacctactacgccgattctgtgaagggcagattcaccatcagccgggacaacagcaagaacaccctgtacctccagatgaacagcctgagagccgaggacacagccgtgtattattgcgccaaggaccgggacttttggagcggcccttttgactattggggccagggaaccctggtcaccgttagctctacgcgtatccagaaccctgatcctgccgtgtaccagctgcgggatagcaagagcagcgacaagagcgtgtgtctgttcaccgacttcgacagccagaccaacgtgtcccagagcaaggactccgacgtgtacatcaccgataagtgcgtgctggacatgcggagcatggacttcaagagcaactccgccgtggcctggtccaacaagtccgatttcgcctgcgccaacgccttcaacaacagcattatccccgaggacacattcttcccaagccccgagagcagctgcgacgtgaagctggtggaaaagagcttcgagacagacaccaacctgaacttccagatcctgtacgagatcctgctgggcaaggccaccctgtacgccgtgctggtgtctgccctggtgctgatggctatggtcaagcggaaggacagccgggga

SEQ ID NO: 5076 - DNA, 1875 bp, synthetic construct
  source 1..1875: mol_type = other DNA
atggccttaccagtgaccgccttgctcctgccgctggccttgctgctccacgccgccaggccggacatccagatgacccagagccccagcagcctgtctgccagcgtgggcgacagagtgaccatcacatgcaaggccagcaagaacatcagaagctacctggcctggtatcagcagaagcccggcaaggcccccaagctgctgatctacagcggcagcacactgcacagcggcgtgcccagcagattttccggctctggcagcggcaccgacttcaccctgaccatctctagcctccagcccgaggacttcgccacctactactgccagcagcaccacgagtaccccctgacattcggccagggcaccaaggtggaaatcaagagactcgaggacctgaagaacgtgttcccacctgaggtggccgtgttcgagcctagcgaggccgagatcagccacacccagaaagccaccctcgtgtgcctggctaccggcttctaccccgaccatgtggaactgtcttggtgggtcaacggcaaagaggtgcacagcggcgtgtgtaccgacccccagccactgaaagaacagcccgccctgaacgacagccggtactgcctgagcagcagactgagagtgtccgccaccttctggcagaacccccggaaccacttcagatgccaggtgcagttctacggcctgagcgagaacgacgagtggacccaggacagagccaagcccgtgacccagatcgtgtctgccgaagcctggggcagagccgattgcggctttaccagcgagagctaccagcagggcgtgctgagcgccaccaacctgagcgtgatcggcttcagaatcctgctgctgaaagtggccggctttaacctgctgatgaccctgcggctgtggtccagcagggccaagcgatctggatctggagcaacaaacttctcactactcaaacaagcaggtgacgtggaggagaatcccgggcctactagtatggactggatttggcgcatccttttccttgtcggcgctgctaccggcgcgcattccttcgaacaggtgcaactccaggaatctggccccggactcgtgaagcccagcgagacactgagcctgacctgtaccgtgtccggctacaccatcaccagcggctacgactggtcctggatcagacagcctcctggcaagggcctggaatggatcggctacatcaactacggcggctccaccaactacaagcccagcctgggaagccgcgtgacaatcagcgtggacacctccaagaaccagttcagcctgaagctgagcagcgtgacagccgccgataccgccgtgtactactgcgcccggtacaacgagtacaagagctacatctacgattggtacttcgacttctggggccagggaaccctcgtgaccgtgtctagtacgcgtatccagaaccctgatcctgccgtgtaccagctgcgggatagcaagagcagcgacaagagcgtgtgtctgttcaccgacttcgacagccagaccaacgtgtcccagagcaaggactccgacgtgtacatcaccgataagtgcgtgctggacatgcggagcatggacttcaagagcaactccgccgtggcctggtccaacaagtccgatttcgcctgcgccaacgccttcaacaacagcattatccccgaggacacattcttcccaagccccgagagcagctgcgacgtgaagctggtggaaaagagcttcgagacagacaccaacctgaacttccagatcctgtacgagatcctgctgggcaaggccaccctgtacgccgtgctggtgtctgccctggtgctgatggctatggtcaagcggaaggacagccgggga

SEQ ID NO: 5077 - DNA, 1881 bp, synthetic construct
  source 1..1881: mol_type = other DNA
atggccttaccagtgaccgccttgctcctgccgctggccttgctgctccacgccgccaggccgcagtctgtggtcacacagcctccatccgtgtctgctgcccctggacagaaagtgaccatctcctgtagcggcagcagcagcaacatcggcaacaactacgtgtcctggtatcagcagctccccggcacagctcccaaactgctgatctacgacaacaacaagcggcccagcggcatccccgatagattttctggcagcaagagcggcaccagcgccacactgggaattaccggacttcagacaggcgacgaggccgactactactgtggcacatgggatggcagcctgtacaccatgcttttcggcggaggcaccaagctgacagtgcttctcgaggacctgaagaacgtgttcccacctgaggtggccgtgttcgagcctagcgaggccgagatcagccacacccagaaagccaccctcgtgtgcctggctaccggcttctaccccgaccatgtggaactgtcttggtgggtcaacggcaaagaggtgcacagcggcgtgtgtaccgacccccagccactgaaagaacagcccgccctgaacgacagccggtactgcctgagcagcagactgagagtgtccgccaccttctggcagaacccccggaaccacttcagatgccaggtgcagttctacggcctgagcgagaacgacgagtggacccaggacagagccaagcccgtgacccagatcgtgtctgccgaagcctggggcagagccgattgcggctttaccagcgagagctaccagcagggcgtgctgagcgccaccaacctgagcgtgatcggcttcagaatcctgctgctgaaagtggccggctttaacctgctgatgaccctgcggctgtggtccagcagggccaagcgatctggatctggagcaacaaacttctcactactcaaacaagcaggtgacgtggaggagaatcccgggcctactagtatggactggatttggcgcatccttttccttgtcggcgctgctaccggcgcgcattccttcgaagaagtgcaactggtggaatctggcggcggactggttaagcctggcggatctctgagactgtcttgtgccgccagcggcttcaccttcagcaatgcctggatgagctgggttcgacaggcccctggaaaaggactggaatgggtcggattcatccggtccaaagcctacggcggcaccacagaatatgccgcctctgtgaagggcagattcaccatcagccgggacgacagcaagtctatcgcctacctccagatgaacaacctgaaaaccgaggacaccgccgtgtactactgcgccagagatggcctgtacagcagctcttggtacgacagcgattactggggccagggcacactggtcacagtgtcatctacgcgtatccagaaccctgatcctgccgtgtaccagctgcgggatagcaagagcagcgacaagagcgtgtgtctgttcaccgacttcgacagccagaccaacgtgtcccagagcaaggactccgacgtgtacatcaccgataagtgcgtgctggacatgcggagcatggacttcaagagcaactccgccgtggcctggtccaacaagtccgatttcgcctgcgccaacgccttcaacaacagcattatccccgaggacacattcttcccaagccccgagagcagctgcgacgtgaagctggtggaaaagagcttcgagacagacaccaacctgaacttccagatcctgtacgagatcctgctgggcaaggccaccctgtacgccgtgctggtgtctgccctggtgctgatggctatggtcaagcggaaggacagccgggga

SEQ ID NO: 5078 - DNA, 1896 bp, synthetic construct
  source 1..1896: mol_type = other DNA
atggccttaccagtgaccgccttgctcctgccgctggccttgctgctccacgccgccaggccgcagtctgtgctgacacagcctcctagtgtgtctggcgctcctggacagagagtgaccatctcttgtaccggcagcagcagcaatatcggagccggctatgacgtgcactggtatcagcagctccctggcacagcccctaaactgctgatcttcggcaacagcaacagacccagcggcgtgcccgatagattcagcggctttaagagcggcacaagcgccagcctggctatcactggactgcaagccgaggacgaggccgactacttctgccagagctacgatagcagcctgagcggcagcggagtgtttggcacaggcaccaaagtgacagtgcttggcctcgaggacctgaagaacgtgttcccacctgaggtggccgtgttcgagcctagcgaggccgagatcagccacacccagaaagccaccctcgtgtgcctggctaccggcttctaccccgaccatgtggaactgtcttggtgggtcaacggcaaagaggtgcacagcggcgtgtgtaccgacccccagccactgaaagaacagcccgccctgaacgacagccggtactgcctgagcagcagactgagagtgtccgccaccttctggcagaacccccggaaccacttcagatgccaggtgcagttctacggcctgagcgagaacgacgagtggacccaggacagagccaagcccgtgacccagatcgtgtctgccgaagcctggggcagagccgattgcggctttaccagcgagagctaccagcagggcgtgctgagcgccaccaacctgagcgtgatcggcttcagaatcctgctgctgaaagtggccggctttaacctgctgatgaccctgcggctgtggtccagcagggccaagcgatctggatctggagcaacaaacttctcactactcaaacaagcaggtgacgtggaggagaatcccgggcctactagtatggactggatttggcgcatccttttccttgtcggcgctgctaccggcgcgcattccttcgaacaaatgcaactggttcaaagcggcggtggcctggtgcaacctggaagaagtctgagactgagctgtgccgccagcggcttcaccttcgatgattacgccatgcactgggtccgacaggcccctggaaaaggactggaatgggtgtccggcatctcctggaatagcggctctatcggctacgccgacagcgtgaagggcagattcaccatcagccgggacaacgccaagaacagcctgtacctccagatgaactccctgagagccgaggatacagccctgtactactgcgccaaggacatccacagcggcagctactacggcctgctgtactacgctatggacgtgtggggccagggcacaaccgtgacagtttcttctacgcgtatccagaaccctgatcctgccgtgtaccagctgcgggatagcaagagcagcgacaagagcgtgtgtctgttcaccgacttcgacagccagaccaacgtgtcccagagcaaggactccgacgtgtacatcaccgataagtgcgtgctggacatgcggagcatggacttcaagagcaactccgccgtggcctggtccaacaagtccgatttcgcctgcgccaacgccttcaacaacagcattatccccgaggacacattcttcccaagccccgagagcagctgcgacgtgaagctggtggaaaagagcttcgagacagacaccaacctgaacttccagatcctgtacgagatcctgctgggcaaggccaccctgtacgccgtgctggtgtctgccctggtgctgatggctatggtcaagcggaaggacagccgggga

SEQ ID NO: 5079 - DNA, 1896 bp, synthetic construct
  source 1..1896: mol_type = other DNA
atggccttaccagtgaccgccttgctcctgccgctggccttgctgctccacgccgccaggccgctgcctgttctgacacagcctccatctgcctctggcacacctggacagagagtgaccatcagctgtagcggcagaagcagcaacatcggcagcaacagcgtgaactggtacagacagcttcctggcgctgcccctaagctgctgatctacagcaacaaccagcggcctcctggcgtgccagtcagattttctggcagcaagagcggcacaagcgccagcctggctatttctggactccagtctgaggacgaggccacctactactgtgccacctgggacgacaacctgaacgtgcactacgtgttcggcaccggcaccaaagtgacagtgcttggaagtagactcgaggacctgaagaacgtgttcccacctgaggtggccgtgttcgagcctagcgaggccgagatcagccacacccagaaagccaccctcgtgtgcctggctaccggcttctaccccgaccatgtggaactgtcttggtgggtcaacggcaaagaggtgcacagcggcgtgtgtaccgacccccagccactgaaagaacagcccgccctgaacgacagccggtactgcctgagcagcagactgagagtgtccgccaccttctggcagaacccccggaaccacttcagatgccaggtgcagttctacggcctgagcgagaacgacgagtggacccaggacagagccaagcccgtgacccagatcgtgtctgccgaagcctggggcagagccgattgcggctttaccagcgagagctaccagcagggcgtgctgagcgccaccaacctgagcgtgatcggcttcagaatcctgctgctgaaagtggccggctttaacctgctgatgaccctgcggctgtggtccagcagggccaagcgatctggatctggagcaacaaacttctcactactcaaacaagcaggtgacgtggaggagaatcccgggcctactagtatggactggatttggcgcatccttttccttgtcggcgctgctaccggcgcgcattccttcgaacttgaaatggctcaggtgcagctggtgcagagcggagccgaagtgaagaaacctggcagcagcgtgaaggtgtcctgcaaagcttctggcggcaccttcagcagctacgccatctcttgggttcgacaggcccctggacaaggactggaatggatgggcagaatcatccccatcctgggaatcgccaactacgcccagaaattccagggcagagtgacaatcaccgccgacaagagcaccagcaccgcctacatggaactgagcagcctgagaagcgaggacaccgccgtgtactattgtgcaagaggcggctactacagccacgacatgtggagcgaagattggggccagggcacactggtcacagtgtcatctacgcgtatccagaaccctgatcctgccgtgtaccagctgcgggatagcaagagcagcgacaagagcgtgtgtctgttcaccgacttcgacagccagaccaacgtgtcccagagcaaggactccgacgtgtacatcaccgataagtgcgtgctggacatgcggagcatggacttcaagagcaactccgccgtggcctggtccaacaagtccgatttcgcctgcgccaacgccttcaacaacagcattatccccgaggacacattcttcccaagccccgagagcagctgcgacgtgaagctggtggaaaagagcttcgagacagacaccaacctgaacttccagatcctgtacgagatcctgctgggcaaggccaccctgtacgccgtgctggtgtctgccctggtgctgatggctatggtcaagcggaaggacagccgggga

SEQ ID NO: 5080 - DNA, 1878 bp, synthetic construct
  source 1..1878: mol_type = other DNA
atggccttaccagtgaccgccttgctcctgccgctggccttgctgctccacgccgccaggccggacttcgtgatgacacagagccctgatagcctggccgtgtctctcggcgagcgagtgaccatgagctgcaagtctagccagagcctgctgaacagcggcaaccagaagaactacctgacctggtatcagcagaagcccggccagcctcctaagctgctgatctactgggccagcaccagagaaagcggcgtgcccgatagattttctggctctggcagcggcaccgacttcaccctgacaatttctagcctgcaagccgaggacgtggccgtgtactactgccagaacgactacagctacccctacaccttcggccagggcaccaagctggaaatcaaactcgaggacctgaagaacgtgttcccacctgaggtggccgtgttcgagcctagcgaggccgagatcagccacacccagaaagccaccctcgtgtgcctggctaccggcttctaccccgaccatgtggaactgtcttggtgggtcaacggcaaagaggtgcacagcggcgtgtgtaccgacccccagccactgaaagaacagcccgccctgaacgacagccggtactgcctgagcagcagactgagagtgtccgccaccttctggcagaacccccggaaccacttcagatgccaggtgcagttctacggcctgagcgagaacgacgagtggacccaggacagagccaagcccgtgacccagatcgtgtctgccgaagcctggggcagagccgattgcggctttaccagcgagagctaccagcagggcgtgctgagcgccaccaacctgagcgtgatcggcttcagaatcctgctgctgaaagtggccggctttaacctgctgatgaccctgcggctgtggtccagcagggccaagcgatctggatctggagcaacaaacttctcactactcaaacaagcaggtgacgtggaggagaatcccgggcctactagtatggactggatttggcgcatccttttccttgtcggcgctgctaccggcgcgcattccttcgaagaagtgcaactggttcagagcggagccgagctgaagaaacctggggccagcgtgaaggtgtcctgtaaagccagcggctacacctttaccgactactacatgaaatgggtccgacaggccccaggccagggactcgaatggatcggcgatattatccccagcaacggggccaccttctacaaccagaaattcaagggccgcgtgaccatcaccgtggacaagagcacaagcaccgcctacatggaactgagcagcctgagaagcgaggacaccgccgtgtattattgcgccagaagccatctgctgcgggccagttggttcgcctattggggacagggaaccctggtcaccgttagctctacgcgtatccagaaccctgatcctgccgtgtaccagctgcgggatagcaagagcagcgacaagagcgtgtgtctgttcaccgacttcgacagccagaccaacgtgtcccagagcaaggactccgacgtgtacatcaccgataagtgcgtgctggacatgcggagcatggacttcaagagcaactccgccgtggcctggtccaacaagtccgatttcgcctgcgccaacgccttcaacaacagcattatccccgaggacacattcttcccaagccccgagagcagctgcgacgtgaagctggtggaaaagagcttcgagacagacaccaacctgaacttccagatcctgtacgagatcctgctgggcaaggccaccctgtacgccgtgctggtgtctgccctggtgctgatggctatggtcaagcggaaggacagccgggga

SEQ ID NO: 5081 - DNA, 1878 bp, synthetic construct
  source 1..1878: mol_type = other DNA
atggccttaccagtgaccgccttgctcctgccgctggccttgctgctccacgccgccaggccggacttcgtgatgacacagagccctgatagcctggccgtgtctctcggcgagcgagtgaccatgagctgcaagtctagccagagcctgctgaacagcggcaaccagaagaactacctgacctggtatcagcagaagcccggccagcctcctaagctgctgatctactgggccagcaccagagaaagcggcgtgcccgatagattttctggctctggcagcggcaccgacttcaccctgacaatttctagcctgcaagccgaggacgtggccgtgtactactgccagaacgactacagctacccctacaccttcggccagggcaccaagctggaaatcaaactcgaggacctgaagaacgtgttcccacctgaggtggccgtgttcgagcctagcgaggccgagatcagccacacccagaaagccaccctcgtgtgcctggctaccggcttctaccccgaccatgtggaactgtcttggtgggtcaacggcaaagaggtgcacagcggcgtgtgtaccgacccccagccactgaaagaacagcccgccctgaacgacagccggtactgcctgagcagcagactgagagtgtccgccaccttctggcagaacccccggaaccacttcagatgccaggtgcagttctacggcctgagcgagaacgacgagtggacccaggacagagccaagcccgtgacccagatcgtgtctgccgaagcctggggcagagccgattgcggctttaccagcgagagctaccagcagggcgtgctgagcgccaccaacctgagcgtgatcggcttcagaatcctgctgctgaaagtggccggctttaacctgctgatgaccctgcggctgtggtccagcagggccaagcgatctggatctggagcaacaaacttctcactactcaaacaagcaggtgacgtggaggagaatcccgggcctactagtatggactggatttggcgcatccttttccttgtcggcgctgctaccggcgcgcattccttcgaacaagtgcaactggttcagagcggagccgagctgaagaaacctggggccagcgtgaaggtgtcctgtaaagccagcggctacacctttaccgactactacatgaaatgggtccgacaggccccaggccagggactcgaatggatcggcgatattatccccagcaacggggccaccttctacaaccagaaattcaagggccgcgtgaccatcaccgtggacaagagcacaagcaccgcctacatggaactgagcagcctgagaagcgaggacaccgccgtgtattattgcgccagaagccatctgctgcgggccagttggttcgcctattggggacagggaaccctggtcaccgttagctctacgcgtatccagaaccctgatcctgccgtgtaccagctgcgggatagcaagagcagcgacaagagcgtgtgtctgttcaccgacttcgacagccagaccaacgtgtcccagagcaaggactccgacgtgtacatcaccgataagtgcgtgctggacatgcggagcatggacttcaagagcaactccgccgtggcctggtccaacaagtccgatttcgcctgcgccaacgccttcaacaacagcattatccccgaggacacattcttcccaagccccgagagcagctgcgacgtgaagctggtggaaaagagcttcgagacagacaccaacctgaacttccagatcctgtacgagatcctgctgggcaaggccaccctgtacgccgtgctggtgtctgccctggtgctgatggctatggtcaagcggaaggacagccgggga

SEQ ID NO: 5082 - DNA, 1848 bp, synthetic construct
  source 1..1848: mol_type = other DNA
atggccttaccagtgaccgccttgctcctgccgctggccttgctgctccacgccgccaggccggacgtgcagatcacacagagccctagctacctggctgcctctcctggcgagacaatcaccatcaactgtcgggccagcaagagcatcagcaaggacctggcctggtatcaagagaagcccggcaagaccaacaagctgctgatctacagcggcagcacactccagtctggcatccccagcagattttccggctctggcagcggcaccgatttcaccctgaccataagcagcctggaacctgaggacttcgccatgtactactgccagcagcacaacaagtacccctacacctttggcggaggcaccaagctggaaatcaagagactcgaggacctgaagaacgtgttcccacctgaggtggccgtgttcgagcctagcgaggccgagatcagccacacccagaaagccaccctcgtgtgcctggctaccggcttctaccccgaccatgtggaactgtcttggtgggtcaacggcaaagaggtgcacagcggcgtgtgtaccgacccccagccactgaaagaacagcccgccctgaacgacagccggtactgcctgagcagcagactgagagtgtccgccaccttctggcagaacccccggaaccacttcagatgccaggtgcagttctacggcctgagcgagaacgacgagtggacccaggacagagccaagcccgtgacccagatcgtgtctgccgaagcctggggcagagccgattgcggctttaccagcgagagctaccagcagggcgtgctgagcgccaccaacctgagcgtgatcggcttcagaatcctgctgctgaaagtggccggctttaacctgctgatgaccctgcggctgtggtccagcagggccaagcgatctggatctggagcaacaaacttctcactactcaaacaagcaggtgacgtggaggagaatcccgggcctactagtatggactggatttggcgcatccttttccttgtcggcgctgctaccggcgcgcattccttcgaacaagttcaactgcaacagcctggggccgagcttgttagacctggcgcttctgtgaagctgagctgcaaggccagcggctacaccttcaccagctactggatgaactgggtcaagcagcggcctgaccagggcctcgaatggatcggcagaatcgacccctacgacagcgagacacactacaaccagaagttcaaggacaaggccatcctgaccgtggacaagagcagctccaccgcctacatgcaactgagcagcctgacctctgaggatagcgccgtgtactattgcgccagaggcaactgggacgactattggggccagggcacaaccctgacagtgtctagtacgcgtatccagaaccctgatcctgccgtgtaccagctgcgggatagcaagagcagcgacaagagcgtgtgtctgttcaccgacttcgacagccagaccaacgtgtcccagagcaaggactccgacgtgtacatcaccgataagtgcgtgctggacatgcggagcatggacttcaagagcaactccgccgtggcctggtccaacaagtccgatttcgcctgcgccaacgccttcaacaacagcattatccccgaggacacattcttcccaagccccgagagcagctgcgacgtgaagctggtggaaaagagcttcgagacagacaccaacctgaacttccagatcctgtacgagatcctgctgggcaaggccaccctgtacgccgtgctggtgtctgccctggtgctgatggctatggtcaagcggaaggacagccgggga

SEQ ID NO: 5083 - DNA, 1854 bp, synthetic construct
  source 1..1854: mol_type = other DNA
atggccttaccagtgaccgccttgctcctgccgctggccttgctgctccacgccgccaggccggagatcgtgctgacacagagccctaccagcatgacagcctctccaggcgagcaagtgaccatcacctgtagagccagcagcagcatcaactacatgcactggtatcagcagaagcctggcgcaagccccagaccttggatctacgagacaagcaagctggcctccggcgtgcccgatagattttctggatctgccagcggcaccagctacagcctgaccatcaacaacatggaagccgaggacgccgccacctactactgccagcagtggaattacccctcctggacctttggcggaggcaccaagctggaacttaaactcgaggacctgaagaacgtgttcccacctgaggtggccgtgttcgagcctagcgaggccgagatcagccacacccagaaagccaccctcgtgtgcctggctaccggcttctaccccgaccatgtggaactgtcttggtgggtcaacggcaaagaggtgcacagcggcgtgtgtaccgacccccagccactgaaagaacagcccgccctgaacgacagccggtactgcctgagcagcagactgagagtgtccgccaccttctggcagaacccccggaaccacttcagatgccaggtgcagttctacggcctgagcgagaacgacgagtggacccaggacagagccaagcccgtgacccagatcgtgtctgccgaagcctggggcagagccgattgcggctttaccagcgagagctaccagcagggcgtgctgagcgccaccaacctgagcgtgatcggcttcagaatcctgctgctgaaagtggccggctttaacctgctgatgaccctgcggctgtggtccagcagggccaagcgatctggatctggagcaacaaacttctcactactcaaacaagcaggtgacgtggaggagaatcccgggcctactagtatggactggatttggcgcatccttttccttgtcggcgctgctaccggcgcgcattccttcgaagaagtgcagctcgttgagtctggtggcggactggttcagcctggaagaagcctgaagctgagctgtgccgccagcggcttcaccttcagcgactacaatatggcctgggtccgacaggcccctaagaaaggactggaatgggtcgccaccatcctgtacgatggcggcagaacctactaccggggcagcgtgaagggcagattcaccatcagcagagacaacgccaagagcaccctgtacctgcggatggactctctgagaagcgaggataccgccacatattactgtgccacacacagccggggcaccgactactttgattattggggccagggcgtgatggttaccgtgtctagtacgcgtatccagaaccctgatcctgccgtgtaccagctgcgggatagcaagagcagcgacaagagcgtgtgtctgttcaccgacttcgacagccagaccaacgtgtcccagagcaaggactccgacgtgtacatcaccgataagtgcgtgctggacatgcggagcatggacttcaagagcaactccgccgtggcctggtccaacaagtccgatttcgcctgcgccaacgccttcaacaacagcattatccccgaggacacattcttcccaagccccgagagcagctgcgacgtgaagctggtggaaaagagcttcgagacagacaccaacctgaacttccagatcctgtacgagatcctgctgggcaaggccaccctgtacgccgtgctggtgtctgccctggtgctgatggctatggtcaagcggaaggacagccgggga

SEQ ID NO: 5084 - DNA, 1881 bp, synthetic construct
  source 1..1881: mol_type = other DNA
atggccttaccagtgaccgccttgctcctgccgctggccttgctgctccacgccgccaggccggacatcgtgatgacacagagcccttctagcctggccgtgtctgagggcgagacagtgaccatcaactgcaagagcagccagagcttcctgtctagcggcgacggcaagaattacgtggcctggtatcagtacaagcccggacagagccccaagctgctgatctactgggccagcacaagacagagcggcgtgcccgatagattcatcggctctggcagcggcaccgacttcaccctgacaatctctacagtgcaggccgaggacctggctatctactactgccagcagtattacgacacccctctgacctttggctccggcaccaagctggaaatcaaactcgaggacctgaagaacgtgttcccacctgaggtggccgtgttcgagcctagcgaggccgagatcagccacacccagaaagccaccctcgtgtgcctggctaccggcttctaccccgaccatgtggaactgtcttggtgggtcaacggcaaagaggtgcacagcggcgtgtgtaccgacccccagccactgaaagaacagcccgccctgaacgacagccggtactgcctgagcagcagactgagagtgtccgccaccttctggcagaacccccggaaccacttcagatgccaggtgcagttctacggcctgagcgagaacgacgagtggacccaggacagagccaagcccgtgacccagatcgtgtctgccgaagcctggggcagagccgattgcggctttaccagcgagagctaccagcagggcgtgctgagcgccaccaacctgagcgtgatcggcttcagaatcctgctgctgaaagtggccggctttaacctgctgatgaccctgcggctgtggtccagcagggccaagcgatctggatctggagcaacaaacttctcactactcaaacaagcaggtgacgtggaggagaatcccgggcctactagtatggactggatttggcgcatccttttccttgtcggcgctgctaccggcgcgcattccttcgaagaagtgaagctgcaagagtctggccccagcctggtgcagagtagccaaacactgagcctgacctgtaccgtgtccggctttagcctgaccagctaccacatccactgggtccgacagacccctggcaaaggactggaatggatgggcgtgatgtggagcgacggcgacaccagctataacagcgccctgaagtcccggctgagcatcagcagagatacaagccagagccaggtgttcctgaagatgaacagcctccagaccgaggacaccgccacctactattgtgccagaggctactacagcagctacctgtacctttggttcgcctattggggccagggcaccctggttacagtcagctctacgcgtatccagaaccctgatcctgccgtgtaccagctgcgggatagcaagagcagcgacaagagcgtgtgtctgttcaccgacttcgacagccagaccaacgtgtcccagagcaaggactccgacgtgtacatcaccgataagtgcgtgctggacatgcggagcatggacttcaagagcaactccgccgtggcctggtccaacaagtccgatttcgcctgcgccaacgccttcaacaacagcattatccccgaggacacattcttcccaagccccgagagcagctgcgacgtgaagctggtggaaaagagcttcgagacagacaccaacctgaacttccagatcctgtacgagatcctgctgggcaaggccaccctgtacgccgtgctggtgtctgccctggtgctgatggctatggtcaagcggaaggacagccgggga

SEQ ID NO: 5085 - DNA, 1893 bp, synthetic construct
  source 1..1893: mol_type = other DNA
atggccttaccagtgaccgccttgctcctgccgctggccttgctgctccacgccgccaggccggacgtgctgatgacccagacacctgtgtctctgccagtgtctctcggaggccaggtgtccatctcctgtagaagcagccagagcctggtgcactccgacggcgatacctacctgcactggtatctccagaagcctggacagagccctcagctcctgatctaccgggtgtccaacagattcagcggcgtgcccgatagattttccggcagcggctctggcaccgacttcaccctgaagatcagcagagtggaacccgaggacctgggcctgtactactgtctccagaccacacacttcccaccttggacctttggcggaggcaccaagctggaaatgaaactcgaggacctgaagaacgtgttcccacctgaggtggccgtgttcgagcctagcgaggccgagatcagccacacccagaaagccaccctcgtgtgcctggctaccggcttctaccccgaccatgtggaactgtcttggtgggtcaacggcaaagaggtgcacagcggcgtgtgtaccgacccccagccactgaaagaacagcccgccctgaacgacagccggtactgcctgagcagcagactgagagtgtccgccaccttctggcagaacccccggaaccacttcagatgccaggtgcagttctacggcctgagcgagaacgacgagtggacccaggacagagccaagcccgtgacccagatcgtgtctgccgaagcctggggcagagccgattgcggctttaccagcgagagctaccagcagggcgtgctgagcgccaccaacctgagcgtgatcggcttcagaatcctgctgctgaaagtggccggctttaacctgctgatgaccctgcggctgtggtccagcagggccaagcgatctggatctggagcaacaaacttctcactactcaaacaagcaggtgacgtggaggagaatcccgggcctactagtatggactggatttggcgcatccttttccttgtcggcgctgctaccggcgcgcattccttcgaacaggttcagctccagcagtctggacccgagcttagaaggccaggatctagcgtcagactgagctgcaaggccagcggctaccggatcaaggacttcctgatccactggattaagaacagacccgagcacggcctggaatggatcggatggattgaccctgaggacggcgagactaagtacgcccagaagttccagaccaaggccacactgaccgccgacacctctagcaacaccgcctacatgcaactgagcagcctgaccagcgaggacaccgccacctacttttgtgctagatggggcgacgtgtactacggcctgatgagaggccatgtgatggatgcctggggccagggaacaagcgtgacagtctcttctacgcgtatccagaaccctgatcctgccgtgtaccagctgcgggatagcaagagcagcgacaagagcgtgtgtctgttcaccgacttcgacagccagaccaacgtgtcccagagcaaggactccgacgtgtacatcaccgataagtgcgtgctggacatgcggagcatggacttcaagagcaactccgccgtggcctggtccaacaagtccgatttcgcctgcgccaacgccttcaacaacagcattatccccgaggacacattcttcccaagccccgagagcagctgcgacgtgaagctggtggaaaagagcttcgagacagacaccaacctgaacttccagatcctgtacgagatcctgctgggcaaggccaccctgtacgccgtgctggtgtctgccctggtgctgatggctatggtcaagcggaaggacagccgggga

SEQ ID NO: 5086 - DNA, 1878 bp, synthetic construct
  source 1..1878: mol_type = other DNA
atggccttaccagtgaccgccttgctcctgccgctggccttgctgctccacgccgccaggccggacatcgtgatgacacagagccccgccacactgtcactgtctccaggcgaaagagccacactgagctgtcggagcagcaagagcctccagaacgtgaacggcaacacctacctgtactggttccagcagaagcccggccagtctcctcagctcctgatctacagaatgagcaacctgaacagcggcgtgcccgacagattttctggcagcggaagcggcaccgagttcaccctgaccataagcagcctggaacctgaggacttcgccgtgtactactgtatgcagcacctggaataccccatcaccttcggagccggcaccaagctggaaatcaaactcgaggacctgaagaacgtgttcccacctgaggtggccgtgttcgagcctagcgaggccgagatcagccacacccagaaagccaccctcgtgtgcctggctaccggcttctaccccgaccatgtggaactgtcttggtgggtcaacggcaaagaggtgcacagcggcgtgtgtaccgacccccagccactgaaagaacagcccgccctgaacgacagccggtactgcctgagcagcagactgagagtgtccgccaccttctggcagaacccccggaaccacttcagatgccaggtgcagttctacggcctgagcgagaacgacgagtggacccaggacagagccaagcccgtgacccagatcgtgtctgccgaagcctggggcagagccgattgcggctttaccagcgagagctaccagcagggcgtgctgagcgccaccaacctgagcgtgatcggcttcagaatcctgctgctgaaagtggccggctttaacctgctgatgaccctgcggctgtggtccagcagggccaagcgatctggatctggagcaacaaacttctcactactcaaacaagcaggtgacgtggaggagaatcccgggcctactagtatggactggatttggcgcatccttttccttgtcggcgctgctaccggcgcgcattccttcgaagaagtgcaactggttgaatctggcggcggactggttaagcctggcggatctctgaagctgagctgtgccgccagcggctacacctttaccagctacgtgatgcactgggtccgacaggcccctggcaaaggacttgagtggatcggctacatcaacccctacaacgatggcaccaagtacaacgagaagttccagggcagagtgaccatcagctccgacaagagcatcagcaccgcctacatggaactgagcagcctgagaagcgaggataccgccatgtactattgcgccagaggcacctactactacggcaccagagtgttcgactactggggccagggaaccctggtcacagtctcttctacgcgtatccagaaccctgatcctgccgtgtaccagctgcgggatagcaagagcagcgacaagagcgtgtgtctgttcaccgacttcgacagccagaccaacgtgtcccagagcaaggactccgacgtgtacatcaccgataagtgcgtgctggacatgcggagcatggacttcaagagcaactccgccgtggcctggtccaacaagtccgatttcgcctgcgccaacgccttcaacaacagcattatccccgaggacacattcttcccaagccccgagagcagctgcgacgtgaagctggtggaaaagagcttcgagacagacaccaacctgaacttccagatcctgtacgagatcctgctgggcaaggccaccctgtacgccgtgctggtgtctgccctggtgctgatggctatggtcaagcggaaggacagccgggga

SEQ ID NO: 5087 - DNA, 1866 bp, synthetic construct
  source 1..1866: mol_type = other DNA
atggccttaccagtgaccgccttgctcctgccgctggccttgctgctccacgccgccaggccggacatccagatgacacagagccctagcagcctgtctgccagcgtgggagacagagtgaccatcacatgcaaggccagcgaccacatcaacaactggctggcctggtatcagcagaagcctggacaggcccctaagctgctgatctacggcgctaccacactggaaacaggcgtgcccagcagattttctggcagcggctctggcaccgactacaccctgacaatatccagcctccagcctgaggacttcgccacctactactgtcagcagagctggaacaccccttggacattcggccagggcaccaagctggaaatcaagagactcgaggacctgaagaacgtgttcccacctgaggtggccgtgttcgagcctagcgaggccgagatcagccacacccagaaagccaccctcgtgtgcctggctaccggcttctaccccgaccatgtggaactgtcttggtgggtcaacggcaaagaggtgcacagcggcgtgtgtaccgacccccagccactgaaagaacagcccgccctgaacgacagccggtactgcctgagcagcagactgagagtgtccgccaccttctggcagaacccccggaaccacttcagatgccaggtgcagttctacggcctgagcgagaacgacgagtggacccaggacagagccaagcccgtgacccagatcgtgtctgccgaagcctggggcagagccgattgcggctttaccagcgagagctaccagcagggcgtgctgagcgccaccaacctgagcgtgatcggcttcagaatcctgctgctgaaagtggccggctttaacctgctgatgaccctgcggctgtggtccagcagggccaagcgatctggatctggagcaacaaacttctcactactcaaacaagcaggtgacgtggaggagaatcccgggcctactagtatggactggatttggcgcatccttttccttgtcggcgctgctaccggcgcgcattccttcgaacaagttcagcttcaacagcctggcgctgagctggtcaaacctggcgcttctgtgaagatgagctgcaaagccagcggctacgccttcagcagctactggatcaactggatgaagcagaaacccggccagggactcgaatggatcggccaaatctatcccggcgacggcgacaccaactacaacggcaagttcaagggcagagccacactgaccgccgatacctctagcagcacagcctacatgcagctgagcagcctgaccagcgaagatagcgccgtgtacttctgtgcccggtccatcacaacagtcgtgggctgcgctatggactattggggccagggaacaagcgtgaccgtgtctagtacgcgtatccagaaccctgatcctgccgtgtaccagctgcgggatagcaagagcagcgacaagagcgtgtgtctgttcaccgacttcgacagccagaccaacgtgtcccagagcaaggactccgacgtgtacatcaccgataagtgcgtgctggacatgcggagcatggacttcaagagcaactccgccgtggcctggtccaacaagtccgatttcgcctgcgccaacgccttcaacaacagcattatccccgaggacacattcttcccaagccccgagagcagctgcgacgtgaagctggtggaaaagagcttcgagacagacaccaacctgaacttccagatcctgtacgagatcctgctgggcaaggccaccctgtacgccgtgctggtgtctgccctggtgctgatggctatggtcaagcggaaggacagccgggga

SEQ ID NO: 5088 - DNA, 1872 bp, synthetic construct
  source 1..1872: mol_type = other DNA
atggccttaccagtgaccgccttgctcctgccgctggccttgctgctccacgccgccaggccgcagatcgtgctgtctcagtctcctgccatcctgagcgcttccccaggcgagaaagtgaccatgacctgtagagccagcagcagcgtgtcctacatgcactggtatcagcagaagcccggcagcagccctaagccttggatctacgccaccagcaatctggcctctggcgtgccagccagattttctggctctggcagcggcaccagctacagcttcacaatcagcagagtggaagccgaggacgccgccacctactattgtcagcagtggaccttcaatcctcctaccttcggcggaggcacccggctggaaatcaaaagaacagtggctgctctcgaggacctgaagaacgtgttcccacctgaggtggccgtgttcgagcctagcgaggccgagatcagccacacccagaaagccaccctcgtgtgcctggctaccggcttctaccccgaccatgtggaactgtcttggtgggtcaacggcaaagaggtgcacagcggcgtgtgtaccgacccccagccactgaaagaacagcccgccctgaacgacagccggtactgcctgagcagcagactgagagtgtccgccaccttctggcagaacccccggaaccacttcagatgccaggtgcagttctacggcctgagcgagaacgacgagtggacccaggacagagccaagcccgtgacccagatcgtgtctgccgaagcctggggcagagccgattgcggctttaccagcgagagctaccagcagggcgtgctgagcgccaccaacctgagcgtgatcggcttcagaatcctgctgctgaaagtggccggctttaacctgctgatgaccctgcggctgtggtccagcagggccaagcgatctggatctggagcaacaaacttctcactactcaaacaagcaggtgacgtggaggagaatcccgggcctactagtatggactggatttggcgcatccttttccttgtcggcgctgctaccggcgcgcattccttcgaacaggcttatctgcaacagagcggagccgaactcgtcagacctggcgcttctgtgaagatgagctgcaaggccagcggctacaccttcaccagctataatatgcactgggtcaagcagacccctcggcagggactcgaatggatcggcggaatctatcccggcaacggcgacacctcctacaaccagaagttcaagggcaaagccacactgaccgtgggcaagagcagcagcaccgcctatatgcagctcagcagcctgaccagcgaggacagcgccgtgtacttctgcgccagatacgactacaactacgctatggactactggggccagggcaccagcgtgacagttagctctgccagcacgcgtatccagaaccctgatcctgccgtgtaccagctgcgggatagcaagagcagcgacaagagcgtgtgtctgttcaccgacttcgacagccagaccaacgtgtcccagagcaaggactccgacgtgtacatcaccgataagtgcgtgctggacatgcggagcatggacttcaagagcaactccgccgtggcctggtccaacaagtccgatttcgcctgcgccaacgccttcaacaacagcattatccccgaggacacattcttcccaagccccgagagcagctgcgacgtgaagctggtggaaaagagcttcgagacagacaccaacctgaacttccagatcctgtacgagatcctgctgggcaaggccaccctgtacgccgtgctggtgtctgccctggtgctgatggctatggtcaagcggaaggacagccgggga

SEQ ID NO: 5089 - DNA, 1866 bp, synthetic construct
  source 1..1866: mol_type = other DNA
atggccttaccagtgaccgccttgctcctgccgctggccttgctgctccacgccgccaggccggagatcgtgctgacacagagccctgccaccctgtctctgagccctggcgaaagagccaccctgagctgtagagccagccagagcgtgtccagctacctggcctggtatcagcagaagcccggccaggctccccggctgctgatctacgatgccagcaatagagccaccggcatccccgccagattttccggctctggcagcggcaccgacttcaccctgaccatcagctccctggaacccgaggacttcgccgtgtactactgccagcagcggagcaactggcccatcacattcggccagggcacccggctggaaatcaaactcgaggacctgaagaacgtgttcccacctgaggtggccgtgttcgagcctagcgaggccgagatcagccacacccagaaagccaccctcgtgtgcctggctaccggcttctaccccgaccatgtggaactgtcttggtgggtcaacggcaaagaggtgcacagcggcgtgtgtaccgacccccagccactgaaagaacagcccgccctgaacgacagccggtactgcctgagcagcagactgagagtgtccgccaccttctggcagaacccccggaaccacttcagatgccaggtgcagttctacggcctgagcgagaacgacgagtggacccaggacagagccaagcccgtgacccagatcgtgtctgccgaagcctggggcagagccgattgcggctttaccagcgagagctaccagcagggcgtgctgagcgccaccaacctgagcgtgatcggcttcagaatcctgctgctgaaagtggccggctttaacctgctgatgaccctgcggctgtggtccagcagggccaagcgatctggatctggagcaacaaacttctcactactcaaacaagcaggtgacgtggaggagaatcccgggcctactagtatggactggatttggcgcatccttttccttgtcggcgctgctaccggcgcgcattccttcgaagaggtgcagcttgttgagtctggcggaggactggtgcagcccgatagaagcctgagactgtcttgtgccgccagcggcttcaccttccacgattatgccatgcactgggtccgacaggcccctggcaaaggacttgaatgggtgtccaccatctcttggaacagcggcacaatcggctacgccgactctgtgaagggcagattcaccatcagccgggacaacgccaagaacagcctgtacctccagatgaactccctgagagccgaggacacagccctgtactactgcgccaaggacatccagtacggcaactactactacggcatggacgtgtggggccagggcacaacagtgacagtctcttctacgcgtatccagaaccctgatcctgccgtgtaccagctgcgggatagcaagagcagcgacaagagcgtgtgtctgttcaccgacttcgacagccagaccaacgtgtcccagagcaaggactccgacgtgtacatcaccgataagtgcgtgctggacatgcggagcatggacttcaagagcaactccgccgtggcctggtccaacaagtccgatttcgcctgcgccaacgccttcaacaacagcattatccccgaggacacattcttcccaagccccgagagcagctgcgacgtgaagctggtggaaaagagcttcgagacagacaccaacctgaacttccagatcctgtacgagatcctgctgggcaaggccaccctgtacgccgtgctggtgtctgccctggtgctgatggctatggtcaagcggaaggacagccgggga

SEQ ID NO: 5090 - DNA, 1851 bp, synthetic construct
  source 1..1851: mol_type = other DNA
atggccttaccagtgaccgccttgctcctgccgctggccttgctgctccacgccgccaggccggacatccagatgacacagagccctagcagcctgtctgccagcgtgggagatagagtgaccatcaactgcaaggccagccaggacatcaacagctacctgagctggttccagcagaagcctggcaaggcccctaagacactgatctaccgggccaacagactggtggatggcgtgccaagcagattttctggcagcggcagcggccaggattacaccctgacaatatccagcctccagcctgaggacttcgccacctactactgcctccagtacgacgagttccctctgacctttggcggaggcaccaaggtggaaatcaaactcgaggacctgaagaacgtgttcccacctgaggtggccgtgttcgagcctagcgaggccgagatcagccacacccagaaagccaccctcgtgtgcctggctaccggcttctaccccgaccatgtggaactgtcttggtgggtcaacggcaaagaggtgcacagcggcgtgtgtaccgacccccagccactgaaagaacagcccgccctgaacgacagccggtactgcctgagcagcagactgagagtgtccgccaccttctggcagaacccccggaaccacttcagatgccaggtgcagttctacggcctgagcgagaacgacgagtggacccaggacagagccaagcccgtgacccagatcgtgtctgccgaagcctggggcagagccgattgcggctttaccagcgagagctaccagcagggcgtgctgagcgccaccaacctgagcgtgatcggcttcagaatcctgctgctgaaagtggccggctttaacctgctgatgaccctgcggctgtggtccagcagggccaagcgatctggatctggagcaacaaacttctcactactcaaacaagcaggtgacgtggaggagaatcccgggcctactagtatggactggatttggcgcatccttttccttgtcggcgctgctaccggcgcgcattccttcgaacaggtgcaactggtgcagtctggggccgaagtgaagaaacctggggcctctgtgaaggtgtcctgcaaagccagcggctacacctttaccaactacgacatcaactgggtccgacaggctccaggccaaggactggaatggatcggctggatctatcctggcgacggcagcaccaagtacaacgagaagttcaaggccaaggccacactgaccgccgataccagcacaagcaccgcctacatggaactgcggagcctgagaagcgacgacaccgccgtgtactattgtgcctccggctacgaggacgctatggactattggggccagggcaccaccgtgacagtgtctagtacgcgtatccagaaccctgatcctgccgtgtaccagctgcgggatagcaagagcagcgacaagagcgtgtgtctgttcaccgacttcgacagccagaccaacgtgtcccagagcaaggactccgacgtgtacatcaccgataagtgcgtgctggacatgcggagcatggacttcaagagcaactccgccgtggcctggtccaacaagtccgatttcgcctgcgccaacgccttcaacaacagcattatccccgaggacacattcttcccaagccccgagagcagctgcgacgtgaagctggtggaaaagagcttcgagacagacaccaacctgaacttccagatcctgtacgagatcctgctgggcaaggccaccctgtacgccgtgctggtgtctgccctggtgctgatggctatggtcaagcggaaggacagccgggga

SEQ ID NO: 5091 - DNA, 1857 bp, synthetic construct
  source 1..1857: mol_type = other DNA
atggccttaccagtgaccgccttgctcctgccgctggccttgctgctccacgccgccaggccggacatcgtgatgacccagacacctctgagcctgagcgtgacacctggacagcctgccagcattagctgcaagagcagccagtctctgctggacggcgacggcaagacctacctgaattggctgctccagaagcctggacagagccctcagcggctgatctacctggtgtccaagctggatagcggcgtgcccgatagattttctggcagcggctctggcaccgacttcaccctgaagatcagcagagtggaagccgaggacgtgggcgtgtactactgttggcagggcacacacttccccagaacattcggccagggcacaaagctggaaatcaaactcgaggacctgaagaacgtgttcccacctgaggtggccgtgttcgagcctagcgaggccgagatcagccacacccagaaagccaccctcgtgtgcctggctaccggcttctaccccgaccatgtggaactgtcttggtgggtcaacggcaaagaggtgcacagcggcgtgtgtaccgacccccagccactgaaagaacagcccgccctgaacgacagccggtactgcctgagcagcagactgagagtgtccgccaccttctggcagaacccccggaaccacttcagatgccaggtgcagttctacggcctgagcgagaacgacgagtggacccaggacagagccaagcccgtgacccagatcgtgtctgccgaagcctggggcagagccgattgcggctttaccagcgagagctaccagcagggcgtgctgagcgccaccaacctgagcgtgatcggcttcagaatcctgctgctgaaagtggccggctttaacctgctgatgaccctgcggctgtggtccagcagggccaagcgatctggatctggagcaacaaacttctcactactcaaacaagcaggtgacgtggaggagaatcccgggcctactagtatggactggatttggcgcatccttttccttgtcggcgctgctaccggcgcgcattccttcgaacaagtgcaactggttcagagcggagccgaagtgaagaaacctggggcctctgtgaaggtgtcctgcaaggccagcggctacaccttcaaggacacctacatccactgggtccgacaggcccctggacaaggacttgagtggatgggcagaatcgaccccgccaacggcaacaccaaatacgaccccaagttccagggcagagtgaccatgaccagagacaccagcatcagcaccgcctacatggaactgagccggctgagatccgatgacaccgccgtgtactattgcgctagaagaggcggagtggattggggccagggaacactggttaccgtgtctagtacgcgtatccagaaccctgatcctgccgtgtaccagctgcgggatagcaagagcagcgacaagagcgtgtgtctgttcaccgacttcgacagccagaccaacgtgtcccagagcaaggactccgacgtgtacatcaccgataagtgcgtgctggacatgcggagcatggacttcaagagcaactccgccgtggcctggtccaacaagtccgatttcgcctgcgccaacgccttcaacaacagcattatccccgaggacacattcttcccaagccccgagagcagctgcgacgtgaagctggtggaaaagagcttcgagacagacaccaacctgaacttccagatcctgtacgagatcctgctgggcaaggccaccctgtacgccgtgctggtgtctgccctggtgctgatggctatggtcaagcggaaggacagccgggga

SEQ ID NO: 5092 - DNA, 1860 bp, synthetic construct
  source 1..1860: mol_type = other DNA
atggccttaccagtgaccgccttgctcctgccgctggccttgctgctccacgccgccaggccggacatccagatgacacagagccctagcagcctgtctgccagcgtgggagacagagtgaccatcacatgcaaggccagccaggatgtgtctacagccgtggcctggttccagcagaagcctggaaaagcccctaagctgctgatctacagccccagctacagatacaccggcgtgcccagcagattttctggcagcggctctggcaccgacttcaccctgacaatatccagcctccagcctgaggacttcacctactactgccagcagctctacagcaccccttacacattcggccagggcaccaaggtggaaatcaaactcgaggacctgaagaacgtgttcccacctgaggtggccgtgttcgagcctagcgaggccgagatcagccacacccagaaagccaccctcgtgtgcctggctaccggcttctaccccgaccatgtggaactgtcttggtgggtcaacggcaaagaggtgcacagcggcgtgtgtaccgacccccagccactgaaagaacagcccgccctgaacgacagccggtactgcctgagcagcagactgagagtgtccgccaccttctggcagaacccccggaaccacttcagatgccaggtgcagttctacggcctgagcgagaacgacgagtggacccaggacagagccaagcccgtgacccagatcgtgtctgccgaagcctggggcagagccgattgcggctttaccagcgagagctaccagcagggcgtgctgagcgccaccaacctgagcgtgatcggcttcagaatcctgctgctgaaagtggccggctttaacctgctgatgaccctgcggctgtggtccagcagggccaagcgatctggatctggagcaacaaacttctcactactcaaacaagcaggtgacgtggaggagaatcccgggcctactagtatggactggatttggcgcatccttttccttgtcggcgctgctaccggcgcgcattccttcgaagaagtgcaactggttcagagcggagccgaagtgaagaaacctggggcctctgtgaaggtgtcctgcaaagccagcggctacacctttaccgactactacctggacgtggtcgtgcggcaagctcctggacaaggactggaatggatcggcagagtgaacccctacaacggcggcaccatctacaaccagaaattcaagggaagagtgaccctgaccagagacaccagcacctccacagcctacctggaactgagcagcctgagaagcgaagataccgccgtgtactactgcgccagggaccactacagatatgaccctctgctggactactggggccagggaaccctggttacagtgtctagtacgcgtatccagaaccctgatcctgccgtgtaccagctgcgggatagcaagagcagcgacaagagcgtgtgtctgttcaccgacttcgacagccagaccaacgtgtcccagagcaaggactccgacgtgtacatcaccgataagtgcgtgctggacatgcggagcatggacttcaagagcaactccgccgtggcctggtccaacaagtccgatttcgcctgcgccaacgccttcaacaacagcattatccccgaggacacattcttcccaagccccgagagcagctgcgacgtgaagctggtggaaaagagcttcgagacagacaccaacctgaacttccagatcctgtacgagatcctgctgggcaaggccaccctgtacgccgtgctggtgtctgccctggtgctgatggctatggtcaagcggaaggacagccgggga

SEQ ID NO: 5093 - DNA, 1878 bp, synthetic construct
  source 1..1878: mol_type = other DNA
atggccttaccagtgaccgccttgctcctgccgctggccttgctgctccacgccgccaggccggacatccagatgacacagagccctagcagcctgtctgccagcgtgggagacagagtgaccatcacctgtagagccagccagagcgtgtccaccagcagctacaactacatgcactggtatcagcagaagcccggcaagcctcctaagctgctgattaagtacgccagcaacctggaaagcggcgtgcccagcagattttctggcagcggctctggcaccgacttcaccctgacaatatccagcctccagcctgaggacttcgccacctactactgtcagcactcctgggagatccctctgacattcggccagggcaccaaggtggaaatcaaactcgaggacctgaagaacgtgttcccacctgaggtggccgtgttcgagcctagcgaggccgagatcagccacacccagaaagccaccctcgtgtgcctggctaccggcttctaccccgaccatgtggaactgtcttggtgggtcaacggcaaagaggtgcacagcggcgtgtgtaccgacccccagccactgaaagaacagcccgccctgaacgacagccggtactgcctgagcagcagactgagagtgtccgccaccttctggcagaacccccggaaccacttcagatgccaggtgcagttctacggcctgagcgagaacgacgagtggacccaggacagagccaagcccgtgacccagatcgtgtctgccgaagcctggggcagagccgattgcggctttaccagcgagagctaccagcagggcgtgctgagcgccaccaacctgagcgtgatcggcttcagaatcctgctgctgaaagtggccggctttaacctgctgatgaccctgcggctgtggtccagcagggccaagcgatctggatctggagcaacaaacttctcactactcaaacaagcaggtgacgtggaggagaatcccgggcctactagtatggactggatttggcgcatccttttccttgtcggcgctgctaccggcgcgcattccttcgaagaagtgcaactggttcagagcggagccgaagtgaagaaacctggggcctctgtgaaggtgtcctgcaaggccagcggctacagcttcaccgactattatatgcactgggtccgacaggctccaggccagggacttgagtggatcggcagaatcaacccctacaacggcgctgccttctacagccagaacttcaaggatagagtgaccctgaccgtggacaccagcaccagcacagcctacctggaactgagcagcctgagaagcgaggacaccgccgtgtactactgcgccattgagagaggcgctgacctggaaggctacgctatggattattggggccagggaaccctggtcaccgtgtcatctacgcgtatccagaaccctgatcctgccgtgtaccagctgcgggatagcaagagcagcgacaagagcgtgtgtctgttcaccgacttcgacagccagaccaacgtgtcccagagcaaggactccgacgtgtacatcaccgataagtgcgtgctggacatgcggagcatggacttcaagagcaactccgccgtggcctggtccaacaagtccgatttcgcctgcgccaacgccttcaacaacagcattatccccgaggacacattcttcccaagccccgagagcagctgcgacgtgaagctggtggaaaagagcttcgagacagacaccaacctgaacttccagatcctgtacgagatcctgctgggcaaggccaccctgtacgccgtgctggtgtctgccctggtgctgatggctatggtcaagcggaaggacagccgggga

SEQ ID NO: 5094 - DNA, 1872 bp, synthetic construct
  source 1..1872: mol_type = other DNA
atggccttaccagtgaccgccttgctcctgccgctggccttgctgctccacgccgccaggccggagatcgtgctgacacagtctccagccacactgagcgcttctccaggcgagagagtgaccctgacctgtagagccagcagcaacgtgatctccagctacgtgcactggtatcagcagaagcctggcagcagccccagactgtttctgtacagcaccagcaatctggcctccggcgtgccaagcagattttctggctctggcagcggcaccgacttcacctttaccatctctagcctggaagccgaggacgccgccacctactactgtcagcagtacagcggctaccctctgaccttcggccagggcacaagactggaaatcaaactcgaggacctgaagaacgtgttcccacctgaggtggccgtgttcgagcctagcgaggccgagatcagccacacccagaaagccaccctcgtgtgcctggctaccggcttctaccccgaccatgtggaactgtcttggtgggtcaacggcaaagaggtgcacagcggcgtgtgtaccgacccccagccactgaaagaacagcccgccctgaacgacagccggtactgcctgagcagcagactgagagtgtccgccaccttctggcagaacccccggaaccacttcagatgccaggtgcagttctacggcctgagcgagaacgacgagtggacccaggacagagccaagcccgtgacccagatcgtgtctgccgaagcctggggcagagccgattgcggctttaccagcgagagctaccagcagggcgtgctgagcgccaccaacctgagcgtgatcggcttcagaatcctgctgctgaaagtggccggctttaacctgctgatgaccctgcggctgtggtccagcagggccaagcgatctggatctggagcaacaaacttctcactactcaaacaagcaggtgacgtggaggagaatcccgggcctactagtatggactggatttggcgcatccttttccttgtcggcgctgctaccggcgcgcattccttcgaacaagttcagctgcaagagtctggccctggcctggtcaagcctagcgaaacactgagcctgacctgcgccgtgtctggctactctatcaccagcgcctactattggaactggatcagacagcctcctggcaaaggactggaatggatcggctacatcagctacgacggcagaaacaactacaaccccagcctgaagaaccggatcaccatcaatcccgacaccagcaagaaccagttcagcctccagctgaacagcgtgacccctgaggataccgccgtgtactactgtgccagagaaggcgactacgacgtgggcaactactacgctatggactactggggccagggaaccctggtcacagtctcttctacgcgtatccagaaccctgatcctgccgtgtaccagctgcgggatagcaagagcagcgacaagagcgtgtgtctgttcaccgacttcgacagccagaccaacgtgtcccagagcaaggactccgacgtgtacatcaccgataagtgcgtgctggacatgcggagcatggacttcaagagcaactccgccgtggcctggtccaacaagtccgatttcgcctgcgccaacgccttcaacaacagcattatccccgaggacacattcttcccaagccccgagagcagctgcgacgtgaagctggtggaaaagagcttcgagacagacaccaacctgaacttccagatcctgtacgagatcctgctgggcaaggccaccctgtacgccgtgctggtgtctgccctggtgctgatggctatggtcaagcggaaggacagccgggga

SEQ ID NO: 5095 - DNA, 1872 bp, synthetic construct
  source 1..1872: mol_type = other DNA
atggccttaccagtgaccgccttgctcctgccgctggccttgctgctccacgccgccaggccggagatcgtgctgacacagtctcccgccacactgtcactgtctccaggcgaaagagccacactgagctgtagagccagcagcaacgtgatctccagctacgtgcactggtatcagcagaagcctggacaggcccctcggctgctgatctacagcacaagcaatctggcctctggcatccccgccagattttctggctctggaagcggcaccgacttcaccctgaccataagcagcctggaacctgaggacttcgccgtgtactactgccagcagtatagcggctaccctctgaccttcggccagggcacaagactggaaatcaaactcgaggacctgaagaacgtgttcccacctgaggtggccgtgttcgagcctagcgaggccgagatcagccacacccagaaagccaccctcgtgtgcctggctaccggcttctaccccgaccatgtggaactgtcttggtgggtcaacggcaaagaggtgcacagcggcgtgtgtaccgacccccagccactgaaagaacagcccgccctgaacgacagccggtactgcctgagcagcagactgagagtgtccgccaccttctggcagaacccccggaaccacttcagatgccaggtgcagttctacggcctgagcgagaacgacgagtggacccaggacagagccaagcccgtgacccagatcgtgtctgccgaagcctggggcagagccgattgcggctttaccagcgagagctaccagcagggcgtgctgagcgccaccaacctgagcgtgatcggcttcagaatcctgctgctgaaagtggccggctttaacctgctgatgaccctgcggctgtggtccagcagggccaagcgatctggatctggagcaacaaacttctcactactcaaacaagcaggtgacgtggaggagaatcccgggcctactagtatggactggatttggcgcatccttttccttgtcggcgctgctaccggcgcgcattccttcgaagaagtgcaactggtggaaagtggcggcggactggtgcaacctggaagaagcctgagactgtcctgtgccgccagcggctactctatcacaagcgcctactactggaactgggtccgacaggctcctggcaaaggactggaatgggtgtcctacatcagctacgacggcagaaacaactacaaccccagcctgaagaaccgcttcaccatcagccgggacaacgccaagaagtccctgtacctccagatgaacagcctgagagccgaggacacagccctgtactattgcgccaaagagggcgactacgacgtcggcaactactacgctatggactactggggccagggaaccaccgtgactgtctcttctacgcgtatccagaaccctgatcctgccgtgtaccagctgcgggatagcaagagcagcgacaagagcgtgtgtctgttcaccgacttcgacagccagaccaacgtgtcccagagcaaggactccgacgtgtacatcaccgataagtgcgtgctggacatgcggagcatggacttcaagagcaactccgccgtggcctggtccaacaagtccgatttcgcctgcgccaacgccttcaacaacagcattatccccgaggacacattcttcccaagccccgagagcagctgcgacgtgaagctggtggaaaagagcttcgagacagacaccaacctgaacttccagatcctgtacgagatcctgctgggcaaggccaccctgtacgccgtgctggtgtctgccctggtgctgatggctatggtcaagcggaaggacagccgggga

SEQ ID NO: 5096 - DNA, 1869 bp, synthetic construct
  source 1..1869: mol_type = other DNA
atggccttaccagtgaccgccttgctcctgccgctggccttgctgctccacgccgccaggccggacgtggtcatgacacagaccccactgagcctgcctgtgtctctgggagatcaggccagcatctcctgtagaagcagccagagcctggtgcacagcaacggcaacacctacctgcggtggtatctccagaagcctggacagagccccaaggtgctgatctacaaggtgtccaacagagtgtccggcgtgcccgatagattttctggcagcggctctggcaccgacttcaccctgaagatcaatagagtggaagccgaggacctgggcgtgtacttctgtagccagagcacccatgtgccttggacctttggcggaggcaccaagctggaaatcaagctcgaggacctgaagaacgtgttcccacctgaggtggccgtgttcgagcctagcgaggccgagatcagccacacccagaaagccaccctcgtgtgcctggctaccggcttctaccccgaccatgtggaactgtcttggtgggtcaacggcaaagaggtgcacagcggcgtgtgtaccgacccccagccactgaaagaacagcccgccctgaacgacagccggtactgcctgagcagcagactgagagtgtccgccaccttctggcagaacccccggaaccacttcagatgccaggtgcagttctacggcctgagcgagaacgacgagtggacccaggacagagccaagcccgtgacccagatcgtgtctgccgaagcctggggcagagccgattgcggctttaccagcgagagctaccagcagggcgtgctgagcgccaccaacctgagcgtgatcggcttcagaatcctgctgctgaaagtggccggctttaacctgctgatgaccctgcggctgtggtccagcagggccaagcgatctggatctggagcaacaaacttctcactactcaaacaagcaggtgacgtggaggagaatcccgggcctactagtatggactggatttggcgcatccttttccttgtcggcgctgctaccggcgcgcattccttcgaaggcgtgaagctggacgagacaggcggaggacttgttcaacctggcggagccatgaagctgagctgtgtgaccagcggctttaccttcggccactactggatgaactgggtccgacagtcccctgagaaaggactggaatgggtcgcccagttcagaaacaagccctacaactacgaaacctactacagcgacagcgtgaagggcagattcaccatcagccgggacgacagcaagtccagcgtgtacctccagatgaacaacctgcgcgtggaagataccggcatctactactgtaccggggccagctacggcatggaatatctcggccagggcaccagcgtgaccgtgtctacaacgcgtatccagaaccctgatcctgccgtgtaccagctgcgggatagcaagagcagcgacaagagcgtgtgtctgttcaccgacttcgacagccagaccaacgtgtcccagagcaaggactccgacgtgtacatcaccgataagtgcgtgctggacatgcggagcatggacttcaagagcaactccgccgtggcctggtccaacaagtccgatttcgcctgcgccaacgccttcaacaacagcattatccccgaggacacattcttcccaagccccgagagcagctgcgacgtgaagctggtggaaaagagcttcgagacagacaccaacctgaacttccagatcctgtacgagatcctgctgggcaaggccaccctgtacgccgtgctggtgtctgccctggtgctgatggctatggtcaagcggaaggacagccgggga

SEQ ID NO: 5097 - DNA, 1887 bp, synthetic construct
  source 1..1887: mol_type = other DNA
atggccttaccagtgaccgccttgctcctgccgctggccttgctgctccacgccgccaggccgcaggtgcaactggtggaatctggcggcaatctggttcagcctggcggctctctgagactgtcttgtgccgccagcggcttcaccttcggcagcttttctatgagctgggtccgacaagctcctggcggaggacttgaatgggtggcaggactgtctgccagaagcagcctgacacactacgccgactctgtgaagggcagattcaccatcagccgggacaacgccaagaacagcgtgtacctccagatgaacagcctgagagtggaagataccgccgtgtactactgcgccagaagaagctacgacagcagcggctactggggccacttctacagctacatggatgtgtggggccagggcaccctggttacagtttctctcgaggacctgaagaacgtgttcccacctgaggtggccgtgttcgagcctagcgaggccgagatcagccacacccagaaagccaccctcgtgtgcctggctaccggcttctaccccgaccatgtggaactgtcttggtgggtcaacggcaaagaggtgcacagcggcgtgtgtaccgacccccagccactgaaagaacagcccgccctgaacgacagccggtactgcctgagcagcagactgagagtgtccgccaccttctggcagaacccccggaaccacttcagatgccaggtgcagttctacggcctgagcgagaacgacgagtggacccaggacagagccaagcccgtgacccagatcgtgtctgccgaagcctggggcagagccgattgcggctttaccagcgagagctaccagcagggcgtgctgagcgccaccaacctgagcgtgatcggcttcagaatcctgctgctgaaagtggccggctttaacctgctgatgaccctgcggctgtggtccagcagggccaagcgatctggatctggagcaacaaacttctcactactcaaacaagcaggtgacgtggaggagaatcccgggcctactagtatggactggatttggcgcatccttttccttgtcggcgctgctaccggcgcgcattccttcgaatctgtgctgacccagcctagctccgtgtctgctgctcctggacagaaagtgaccatctcctgtagcggcagcaccagcaacatcggcaacaactacgtgtcctggtatcagcagcaccccggcaaggcccctaagctgatgatctacgacgtgtccaagaggcccagcggcgtgccagatagattttccggcagcaagagcggcaacagcgccagcctggatattagcggactccagtctgaggacgaggccgactactattgcgccgcctgggatgatagcctgagcgagtttctgtttggcaccggcaccaagctgacagtgcttggaacgcgtatccagaaccctgatcctgccgtgtaccagctgcgggatagcaagagcagcgacaagagcgtgtgtctgttcaccgacttcgacagccagaccaacgtgtcccagagcaaggactccgacgtgtacatcaccgataagtgcgtgctggacatgcggagcatggacttcaagagcaactccgccgtggcctggtccaacaagtccgatttcgcctgcgccaacgccttcaacaacagcattatccccgaggacacattcttcccaagccccgagagcagctgcgacgtgaagctggtggaaaagagcttcgagacagacaccaacctgaacttccagatcctgtacgagatcctgctgggcaaggccaccctgtacgccgtgctggtgtctgccctggtgctgatggctatggtcaagcggaaggacagccgggga

SEQ ID NO: 5098 - DNA, 1872 bp, synthetic construct
  source 1..1872: mol_type = other DNA
atggccttaccagtgaccgccttgctcctgccgctggccttgctgctccacgccgccaggccggacgtggtcatgacacagagcccttctagcctgtctgccagcgtgggcgacagagtgacaatcacctgtcagagcagcctggacatcagccactacctgaactggtatcagcagaagcccggcaaggcccctaagctgctgatctacgacgccagcaatctggaaaccggcgtgcccagcagattttctggcagcggaagcggcacccacttcaccttcacaatatccagcctccagcctgaggacttcgccacctactactgccagcagtacgacaacctgcctctgacctttggcggaggcaccaagctggaaatcaagagactcgaggacctgaagaacgtgttcccacctgaggtggccgtgttcgagcctagcgaggccgagatcagccacacccagaaagccaccctcgtgtgcctggctaccggcttctaccccgaccatgtggaactgtcttggtgggtcaacggcaaagaggtgcacagcggcgtgtgtaccgacccccagccactgaaagaacagcccgccctgaacgacagccggtactgcctgagcagcagactgagagtgtccgccaccttctggcagaacccccggaaccacttcagatgccaggtgcagttctacggcctgagcgagaacgacgagtggacccaggacagagccaagcccgtgacccagatcgtgtctgccgaagcctggggcagagccgattgcggctttaccagcgagagctaccagcagggcgtgctgagcgccaccaacctgagcgtgatcggcttcagaatcctgctgctgaaagtggccggctttaacctgctgatgaccctgcggctgtggtccagcagggccaagcgatctggatctggagcaacaaacttctcactactcaaacaagcaggtgacgtggaggagaatcccgggcctactagtatggactggatttggcgcatccttttccttgtcggcgctgctaccggcgcgcattccttcgaacaagttcaactggttcaatcaggcggaggcgtggtgcaacctggtggctctctgagagtgtcttgtgctgcctctggcgtgaccctgagcgactatggaatgcactgggtccgacaggcccctggcaaaggacttgagtgggtcgccttcatcagaaacgacggcagcgacaagtattacgccgacagcgtgaagggcagattcaccatcagccgggacaacagcgagaaaaccgtgtctctccagatgtctagcctgagagccgaggacaccgccgtgtactactgtgccaagaatggcgagagcggccctctggactactggtatctggatctgtggggcagaggcaccctggtcacagtctcttctacgcgtatccagaaccctgatcctgccgtgtaccagctgcgggatagcaagagcagcgacaagagcgtgtgtctgttcaccgacttcgacagccagaccaacgtgtcccagagcaaggactccgacgtgtacatcaccgataagtgcgtgctggacatgcggagcatggacttcaagagcaactccgccgtggcctggtccaacaagtccgatttcgcctgcgccaacgccttcaacaacagcattatccccgaggacacattcttcccaagccccgagagcagctgcgacgtgaagctggtggaaaagagcttcgagacagacaccaacctgaacttccagatcctgtacgagatcctgctgggcaaggccaccctgtacgccgtgctggtgtctgccctggtgctgatggctatggtcaagcggaaggacagccgggga

SEQ ID NO: 5099 - DNA, 1884 bp, synthetic construct
  source 1..1884: mol_type = other DNA
atggccttaccagtgaccgccttgctcctgccgctggccttgctgctccacgccgccaggccgagctacgagctgacacagcctccatccgtgtctggcacacctggacagagagtggctatctcctgtagcggcagcagcagcaacatcggcaccagaatggtcacctggtatcagcacgtgccaggcacagcccctaagctgctgatcttcaacaacaaccagcggcctagcggcgtgcccgatagattttctgccagcaagagcggcacaagcgccagcctggctatcatcggactccagtctgacgacgaggccgactactactgtgccacctgggacgacaacgtgaagtcctacgtgttcggcaccggcaccaaagtgacagtgcttggaagtagactcgaggacctgaagaacgtgttcccacctgaggtggccgtgttcgagcctagcgaggccgagatcagccacacccagaaagccaccctcgtgtgcctggctaccggcttctaccccgaccatgtggaactgtcttggtgggtcaacggcaaagaggtgcacagcggcgtgtgtaccgacccccagccactgaaagaacagcccgccctgaacgacagccggtactgcctgagcagcagactgagagtgtccgccaccttctggcagaacccccggaaccacttcagatgccaggtgcagttctacggcctgagcgagaacgacgagtggacccaggacagagccaagcccgtgacccagatcgtgtctgccgaagcctggggcagagccgattgcggctttaccagcgagagctaccagcagggcgtgctgagcgccaccaacctgagcgtgatcggcttcagaatcctgctgctgaaagtggccggctttaacctgctgatgaccctgcggctgtggtccagcagggccaagcgatctggatctggagcaacaaacttctcactactcaaacaagcaggtgacgtggaggagaatcccgggcctactagtatggactggatttggcgcatccttttccttgtcggcgctgctaccggcgcgcattccttcgaacttgaaatggcccaggttcagctccagcagtggggagctggactgctgaagcctagcgagacactgagcctgacctgtgctgtgtacggcggcagcttcagcggctactactggtcctggatcagacagcctcctggcaaaggactggaatggatcggcgagatcaaccacagcggctccaccaactacaaccccagcctgaagtccagagtgaccatcagcgtggacaccagcaagaaccagttctccctgaagctgagcagcgtgacagccgctgataccgccgtgtactattgcgctagagcccctcagtcttggtacgtgggagatgtgtggggccagggcacactggttacagtgtcatctacgcgtatccagaaccctgatcctgccgtgtaccagctgcgggatagcaagagcagcgacaagagcgtgtgtctgttcaccgacttcgacagccagaccaacgtgtcccagagcaaggactccgacgtgtacatcaccgataagtgcgtgctggacatgcggagcatggacttcaagagcaactccgccgtggcctggtccaacaagtccgatttcgcctgcgccaacgccttcaacaacagcattatccccgaggacacattcttcccaagccccgagagcagctgcgacgtgaagctggtggaaaagagcttcgagacagacaccaacctgaacttccagatcctgtacgagatcctgctgggcaaggccaccctgtacgccgtgctggtgtctgccctggtgctgatggctatggtcaagcggaaggacagccgggga

SEQ ID NO: 5100 - DNA, 1875 bp, synthetic construct
  source 1..1875: mol_type = other DNA
atggccttaccagtgaccgccttgctcctgccgctggccttgctgctccacgccgccaggccgcagtctgtgctgacacagcctcctagcctgtctgtggcccctggaaagacagccagcatcacatgcggcggcaacaacatcggcatgaagtccgtgcactggtatcagcagaggccaggacaggctcctgtgctggtcatctactacgacagcgacagaccctctggcatccccggcagattttccggcagcaactctggcaataccgccacactgaccatctccagagtggaagctggcgacgaggccgactactactgccaagtgtgggataccaccggcgatcaccctggctatgtgtttggcaccggcaccaaagtgacagtgcttctcgaggacctgaagaacgtgttcccacctgaggtggccgtgttcgagcctagcgaggccgagatcagccacacccagaaagccaccctcgtgtgcctggctaccggcttctaccccgaccatgtggaactgtcttggtgggtcaacggcaaagaggtgcacagcggcgtgtgtaccgacccccagccactgaaagaacagcccgccctgaacgacagccggtactgcctgagcagcagactgagagtgtccgccaccttctggcagaacccccggaaccacttcagatgccaggtgcagttctacggcctgagcgagaacgacgagtggacccaggacagagccaagcccgtgacccagatcgtgtctgccgaagcctggggcagagccgattgcggctttaccagcgagagctaccagcagggcgtgctgagcgccaccaacctgagcgtgatcggcttcagaatcctgctgctgaaagtggccggctttaacctgctgatgaccctgcggctgtggtccagcagggccaagcgatctggatctggagcaacaaacttctcactactcaaacaagcaggtgacgtggaggagaatcccgggcctactagtatggactggatttggcgcatccttttccttgtcggcgctgctaccggcgcgcattccttcgaacaagttcaactggttcagagcggagccgaagtgaagaaacctggcagcagcgtgaaggtgtcctgcaaagcaagcggcggcacctttagcagctacgccatctcttgggtccgacaggcacctggacaaggactggaatggatgggcggcatcatccccatcttcggcacagccaattacgcccagaaattccagggcagagtgaccatcaccgccgacgagtctacaagcaccgcctacatggaactgagcagcctgagaagcgaggacaccgccgtgtactattgtgccagaggcgtgtacggctacagcggctctgccccttatgatgagtggggccagggaaccctggtcaccgtttcttctacgcgtatccagaaccctgatcctgccgtgtaccagctgcgggatagcaagagcagcgacaagagcgtgtgtctgttcaccgacttcgacagccagaccaacgtgtcccagagcaaggactccgacgtgtacatcaccgataagtgcgtgctggacatgcggagcatggacttcaagagcaactccgccgtggcctggtccaacaagtccgatttcgcctgcgccaacgccttcaacaacagcattatccccgaggacacattcttcccaagccccgagagcagctgcgacgtgaagctggtggaaaagagcttcgagacagacaccaacctgaacttccagatcctgtacgagatcctgctgggcaaggccaccctgtacgccgtgctggtgtctgccctggtgctgatggctatggtcaagcggaaggacagccgggga

SEQ ID NO: 5101 - DNA, 1869 bp, synthetic construct
  source 1..1869: mol_type = other DNA
atggccttaccagtgaccgccttgctcctgccgctggccttgctgctccacgccgccaggccggaggtgcaactggttgagtctggcggaggactggtgcagcctggaagaagcctgagactgtcttgtgccgccagcggcttcaccttcgacgattatgccatgcactgggtccgacaggcccctggcaaaggacttgaatgggtgtccggcatctcctggaacagcggctctatcggctacgccgattccgtgaagggcagattcaccatcagccgggacaacgccaagaacagcctgtacctccagatgaactccctgagagccgaggacacagccctgtactactgcgccaaagacaaaggcggaggctactacgacttttggagcggcagcgattattggggccagggcacactggtcacagtgtctagcctcgaggacctgaagaacgtgttcccacctgaggtggccgtgttcgagcctagcgaggccgagatcagccacacccagaaagccaccctcgtgtgcctggctaccggcttctaccccgaccatgtggaactgtcttggtgggtcaacggcaaagaggtgcacagcggcgtgtgtaccgacccccagccactgaaagaacagcccgccctgaacgacagccggtactgcctgagcagcagactgagagtgtccgccaccttctggcagaacccccggaaccacttcagatgccaggtgcagttctacggcctgagcgagaacgacgagtggacccaggacagagccaagcccgtgacccagatcgtgtctgccgaagcctggggcagagccgattgcggctttaccagcgagagctaccagcagggcgtgctgagcgccaccaacctgagcgtgatcggcttcagaatcctgctgctgaaagtggccggctttaacctgctgatgaccctgcggctgtggtccagcagggccaagcgatctggatctggagcaacaaacttctcactactcaaacaagcaggtgacgtggaggagaatcccgggcctactagtatggactggatttggcgcatccttttccttgtcggcgctgctaccggcgcgcattccttcgaatcttctgagctgacacaggaccctgccgtgtctgttgctctgggccagacagtgcggattacctgtcagggcgatagcctgagaagctactacgcctcctggtatcagcagaagccaggccaggctcctgtgctggtcatctacggcaagaacaacagacccagcggcatccccgatagattcagcggaagcagctctggcaataccgccagcctgacaattactggcgctcaggccgaggacgaggccgactactactgcaacagcagagatagcagcggctgggttttcggcggaggcacaaaactgacagtgctgacgcgtatccagaaccctgatcctgccgtgtaccagctgcgggatagcaagagcagcgacaagagcgtgtgtctgttcaccgacttcgacagccagaccaacgtgtcccagagcaaggactccgacgtgtacatcaccgataagtgcgtgctggacatgcggagcatggacttcaagagcaactccgccgtggcctggtccaacaagtccgatttcgcctgcgccaacgccttcaacaacagcattatccccgaggacacattcttcccaagccccgagagcagctgcgacgtgaagctggtggaaaagagcttcgagacagacaccaacctgaacttccagatcctgtacgagatcctgctgggcaaggccaccctgtacgccgtgctggtgtctgccctggtgctgatggctatggtcaagcggaaggacagccgggga

SEQ ID NO: 5102 - DNA, 1896 bp, synthetic construct
  source 1..1896: mol_type = other DNA
atggccttaccagtgaccgccttgctcctgccgctggccttgctgctccacgccgccaggccggaagtgcagctccagcagtctggacctggcctggttaagcctagccagacactgagcctgacctgtgccatcagcggcgatagcgtgctgagcaacagcgacacctggaactggatcagacagagccctagcagaggactggaatggctgggcagaacctaccacagaagcacttggtacgacgactacgccagctctgtgcggggcagagtgtccatcaatgtggacaccagcaagaaccagtacagcctgcaactgaacgccgtgacacctgaggataccggcgtgtactactgcgccagagacagactccaggacggcaactcttggagcgacgcctttgatgtgtggggccagggcacaatggtcaccgtttctagcctcgaggacctgaagaacgtgttcccacctgaggtggccgtgttcgagcctagcgaggccgagatcagccacacccagaaagccaccctcgtgtgcctggctaccggcttctaccccgaccatgtggaactgtcttggtgggtcaacggcaaagaggtgcacagcggcgtgtgtaccgacccccagccactgaaagaacagcccgccctgaacgacagccggtactgcctgagcagcagactgagagtgtccgccaccttctggcagaacccccggaaccacttcagatgccaggtgcagttctacggcctgagcgagaacgacgagtggacccaggacagagccaagcccgtgacccagatcgtgtctgccgaagcctggggcagagccgattgcggctttaccagcgagagctaccagcagggcgtgctgagcgccaccaacctgagcgtgatcggcttcagaatcctgctgctgaaagtggccggctttaacctgctgatgaccctgcggctgtggtccagcagggccaagcgatctggatctggagcaacaaacttctcactactcaaacaagcaggtgacgtggaggagaatcccgggcctactagtatggactggatttggcgcatccttttccttgtcggcgctgctaccggcgcgcattccttcgaacaatctgctctgacacagcctgccagcgtgtcaggatctcctggacagagcatcaccatctcttgcaccggcaccagctctgatgtcggcggctacaattacgtgtcctggtatcagcagcaccccggcaaggcccctaagctgatgatctacgacgtgtccaacagacccagcggcgtgtccaatagattctccggcagcaagagcggcaacaccgccagcctgacaatttctggactgcaagccgaggacgaggccgactactactgtagcagctacaccagcagcagcacactggtgtacgtgttcggcacaggcaccaaagtgaccgtgcttacgcgtatccagaaccctgatcctgccgtgtaccagctgcgggatagcaagagcagcgacaagagcgtgtgtctgttcaccgacttcgacagccagaccaacgtgtcccagagcaaggactccgacgtgtacatcaccgataagtgcgtgctggacatgcggagcatggacttcaagagcaactccgccgtggcctggtccaacaagtccgatttcgcctgcgccaacgccttcaacaacagcattatccccgaggacacattcttcccaagccccgagagcagctgcgacgtgaagctggtggaaaagagcttcgagacagacaccaacctgaacttccagatcctgtacgagatcctgctgggcaaggccaccctgtacgccgtgctggtgtctgccctggtgctgatggctatggtcaagcggaaggacagccgggga

SEQ ID NO: 5103 - DNA, 1830 bp, synthetic construct
  source 1..1830: mol_type = other DNA
atggccttaccagtgaccgccttgctcctgccgctggccttgctgctccacgccgccaggccgcaggtgcaactggttcagtctggggccgaagtgaagaaacctggggcctctgtgaaggtgtcctgcaaggcttccggctacacctttaccagctacgacatcaactgggtccgacaggccacaggccaaggactggaatggatgggctggatgaaccccaacagcggcaataccggctacgcccagaaattccagggcagagtgaccatgaccagaaacaccagcatcagcaccgcctacatggaactgagcagcctgagaagcgaggacaccgccgtgtactattgcgccagaggcgacagcaccaaggtggaaatcaaactcgaggacctgaagaacgtgttcccacctgaggtggccgtgttcgagcctagcgaggccgagatcagccacacccagaaagccaccctcgtgtgcctggctaccggcttctaccccgaccatgtggaactgtcttggtgggtcaacggcaaagaggtgcacagcggcgtgtgtaccgacccccagccactgaaagaacagcccgccctgaacgacagccggtactgcctgagcagcagactgagagtgtccgccaccttctggcagaacccccggaaccacttcagatgccaggtgcagttctacggcctgagcgagaacgacgagtggacccaggacagagccaagcccgtgacccagatcgtgtctgccgaagcctggggcagagccgattgcggctttaccagcgagagctaccagcagggcgtgctgagcgccaccaacctgagcgtgatcggcttcagaatcctgctgctgaaagtggccggctttaacctgctgatgaccctgcggctgtggtccagcagggccaagcgatctggatctggagcaacaaacttctcactactcaaacaagcaggtgacgtggaggagaatcccgggcctactagtatggactggatttggcgcatccttttccttgtcggcgctgctaccggcgcgcattccttcgaacaatctgtgctgacccagcctagatccgtgtctggctctcctggacagagcgtgaccatctcttgtaccggcaccagctctgatgtcggcggctacaattacgtgtcctggtatcagcagcaccccggcgaagcccctaagctgattatctacgacgccgacaagcggcccagcggcatcagcaatagattcagctctggcaagagcggcaacaccgccagcctgacaatcagcggactccaggtggaagatgaggccgactactactgctgctcctatgccggcggaagcacctgggttttcggaggcggtacaaaagtgaccgtgctgacgcgtatccagaaccctgatcctgccgtgtaccagctgcgggatagcaagagcagcgacaagagcgtgtgtctgttcaccgacttcgacagccagaccaacgtgtcccagagcaaggactccgacgtgtacatcaccgataagtgcgtgctggacatgcggagcatggacttcaagagcaactccgccgtggcctggtccaacaagtccgatttcgcctgcgccaacgccttcaacaacagcattatccccgaggacacattcttcccaagccccgagagcagctgcgacgtgaagctggtggaaaagagcttcgagacagacaccaacctgaacttccagatcctgtacgagatcctgctgggcaaggccaccctgtacgccgtgctggtgtctgccctggtgctgatggctatggtcaagcggaaggacagccgggga

SEQ ID NO: 5104 - DNA, 1896 bp, synthetic construct
  source 1..1896: mol_type = other DNA
atggccttaccagtgaccgccttgctcctgccgctggccttgctgctccacgccgccaggccggaagtgcagctccagcagtctggacctggcctggttaagcctagccagacactgagcctgacctgtgccatcagcggcgatagcgtgtcctctaatagcgccgcctggaactggatcagacagagccctagcagaggactggaatggctgggcagaacctactaccgcagcaagtggtacagcgactacgccgtgtccgtgaagtcccggatcaccatcaatcccgacaccagcaagaaccagttcagcctgcaactgaacagcgtgacccctgaggataccgccgtgtactactgcgccagagatccctacgacttttggagcggctaccccgacgcctttgacatctggggacagggcacaatggtcaccgtttctagcctcgaggacctgaagaacgtgttcccacctgaggtggccgtgttcgagcctagcgaggccgagatcagccacacccagaaagccaccctcgtgtgcctggctaccggcttctaccccgaccatgtggaactgtcttggtgggtcaacggcaaagaggtgcacagcggcgtgtgtaccgacccccagccactgaaagaacagcccgccctgaacgacagccggtactgcctgagcagcagactgagagtgtccgccaccttctggcagaacccccggaaccacttcagatgccaggtgcagttctacggcctgagcgagaacgacgagtggacccaggacagagccaagcccgtgacccagatcgtgtctgccgaagcctggggcagagccgattgcggctttaccagcgagagctaccagcagggcgtgctgagcgccaccaacctgagcgtgatcggcttcagaatcctgctgctgaaagtggccggctttaacctgctgatgaccctgcggctgtggtccagcagggccaagcgatctggatctggagcaacaaacttctcactactcaaacaagcaggtgacgtggaggagaatcccgggcctactagtatggactggatttggcgcatccttttccttgtcggcgctgctaccggcgcgcattccttcgaacaatctgctctgacacagcctgccagcgtgtcaggatctcctggacagagcatcaccatctcttgcaccggcaccagctctgatgtcggcggctacaattacgtgtcctggtatcagcagcaccccggcaaggcccctaaagtgattatcagcgaagtgaacaacagacccagcggcgtgtcccacagattcagcggctctaagtctggcaacaccgccagcctgacaatctctggactgcaagccgaggacgaggccgactacttctgtagcagctacaccagcggcagaaccctgtacgtgttcggcacaggcagcaaagtgacagtgctgggaacgcgtatccagaaccctgatcctgccgtgtaccagctgcgggatagcaagagcagcgacaagagcgtgtgtctgttcaccgacttcgacagccagaccaacgtgtcccagagcaaggactccgacgtgtacatcaccgataagtgcgtgctggacatgcggagcatggacttcaagagcaactccgccgtggcctggtccaacaagtccgatttcgcctgcgccaacgccttcaacaacagcattatccccgaggacacattcttcccaagccccgagagcagctgcgacgtgaagctggtggaaaagagcttcgagacagacaccaacctgaacttccagatcctgtacgagatcctgctgggcaaggccaccctgtacgccgtgctggtgtctgccctggtgctgatggctatggtcaagcggaaggacagccgggga

SEQ ID NO: 5105 - DNA, 1893 bp, synthetic construct
  source 1..1893: mol_type = other DNA
atggccttaccagtgaccgccttgctcctgccgctggccttgctgctccacgccgccaggccgcaatctgctctgacacagcctgccagcgcctctggatctcctggacagagcgtgaccatctcctgtaccggcacctcttctgatgtcggcggctacaactacgtgtcctggtatcagcagcaccccggcaaggcccctaagctgatgatctacgacgtgtccaacagacccagcggcgtgtccaatagattctccggcagcaagagcggcaacaccgccagcctgacaatttctggactgcaagccgaggacgaggccgactactactgtagcagctacaccagcagcagcacactgtacgtgttcggcacaggcacccagctcacagttcttctcgaggacctgaagaacgtgttcccacctgaggtggccgtgttcgagcctagcgaggccgagatcagccacacccagaaagccaccctcgtgtgcctggctaccggcttctaccccgaccatgtggaactgtcttggtgggtcaacggcaaagaggtgcacagcggcgtgtgtaccgacccccagccactgaaagaacagcccgccctgaacgacagccggtactgcctgagcagcagactgagagtgtccgccaccttctggcagaacccccggaaccacttcagatgccaggtgcagttctacggcctgagcgagaacgacgagtggacccaggacagagccaagcccgtgacccagatcgtgtctgccgaagcctggggcagagccgattgcggctttaccagcgagagctaccagcagggcgtgctgagcgccaccaacctgagcgtgatcggcttcagaatcctgctgctgaaagtggccggctttaacctgctgatgaccctgcggctgtggtccagcagggccaagcgatctggatctggagcaacaaacttctcactactcaaacaagcaggtgacgtggaggagaatcccgggcctactagtatggactggatttggcgcatccttttccttgtcggcgctgctaccggcgcgcattccttcgaagaagtgcagctccagcagtctggacctggcctggttaagcctagccagacactgagcctgacctgtgccatcagcggcgattccatgctgagcaacagcgacacctggaactggatcagacagagccccagcagaggcctggaatggctgggcagaacataccacagaagcacttggtacgacgactacgccagctctgtgcggggcagagtgtccatcaatgtggacaccagcaagaaccagtacagcctgcaactgaacgccgtgacacctgaggataccggcgtgtactactgtgccagagtgcggctccaggacggcaattcttggagcgacgcctttgatgtgtggggccagggcacaatggtcaccgtttctagcacgcgtatccagaaccctgatcctgccgtgtaccagctgcgggatagcaagagcagcgacaagagcgtgtgtctgttcaccgacttcgacagccagaccaacgtgtcccagagcaaggactccgacgtgtacatcaccgataagtgcgtgctggacatgcggagcatggacttcaagagcaactccgccgtggcctggtccaacaagtccgatttcgcctgcgccaacgccttcaacaacagcattatccccgaggacacattcttcccaagccccgagagcagctgcgacgtgaagctggtggaaaagagcttcgagacagacaccaacctgaacttccagatcctgtacgagatcctgctgggcaaggccaccctgtacgccgtgctggtgtctgccctggtgctgatggctatggtcaagcggaaggacagccgggga

SEQ ID NO: 5106 - DNA, 1893 bp, synthetic construct
  source 1..1893: mol_type = other DNA
atggccttaccagtgaccgccttgctcctgccgctggccttgctgctccacgccgccaggccggacgtgatgctgacccagacaccactgagcctgcctgtgtctctgggcgatcaggccagcatctcctgtagaagcagccagagcatcctgcacagcaccggcgatacctacctggaatggtatctccagaagcctggacagagccccaagctgctgattaacaaggtgtccaaccggctgagcggcgtgcccgatagattttctggcagcggctctggcaccgacttcaccctgaagatcagcagagtggaagccgaggacctgggcgtgtactactgcttccaaggcagccatgttccttggacctttggcggaggcaccaagctggaaatcaagagagctgacgccgctcctaccgtgtccatctttcctctcgaggacctgaagaacgtgttcccacctgaggtggccgtgttcgagcctagcgaggccgagatcagccacacccagaaagccaccctcgtgtgcctggctaccggcttctaccccgaccatgtggaactgtcttggtgggtcaacggcaaagaggtgcacagcggcgtgtgtaccgacccccagccactgaaagaacagcccgccctgaacgacagccggtactgcctgagcagcagactgagagtgtccgccaccttctggcagaacccccggaaccacttcagatgccaggtgcagttctacggcctgagcgagaacgacgagtggacccaggacagagccaagcccgtgacccagatcgtgtctgccgaagcctggggcagagccgattgcggctttaccagcgagagctaccagcagggcgtgctgagcgccaccaacctgagcgtgatcggcttcagaatcctgctgctgaaagtggccggctttaacctgctgatgaccctgcggctgtggtccagcagggccaagcgatctggatctggagcaacaaacttctcactactcaaacaagcaggtgacgtggaggagaatcccgggcctactagtatggactggatttggcgcatccttttccttgtcggcgctgctaccggcgcgcattccttcgaacaagtgaagctccagcagagcggccctagccttgtgaaacctggcgcttccgtgaagatgagctgcaaggccagcggctacaccttcaccgatttctacatgaaatgggtcaagcagagccacggcaagtctctggaatggatcggcgacatcaaccccaacatcggagacaccttctacaaccagaagttcaagggcaaagccacactgaccgtggacaagagcagcagcaccgcctacatgcagctcaacagcctgaccagcgaggacagcgccgtgtacttttgttccgtgggctacttcgacgtgtggggagccggaacaaccgtgacagtctcttctacgcgtatccagaaccctgatcctgccgtgtaccagctgcgggatagcaagagcagcgacaagagcgtgtgtctgttcaccgacttcgacagccagaccaacgtgtcccagagcaaggactccgacgtgtacatcaccgataagtgcgtgctggacatgcggagcatggacttcaagagcaactccgccgtggcctggtccaacaagtccgatttcgcctgcgccaacgccttcaacaacagcattatccccgaggacacattcttcccaagccccgagagcagctgcgacgtgaagctggtggaaaagagcttcgagacagacaccaacctgaacttccagatcctgtacgagatcctgctgggcaaggccaccctgtacgccgtgctggtgtctgccctggtgctgatggctatggtcaagcggaaggacagccgggga

SEQ ID NO: 5107 - DNA, 1881 bp, synthetic construct
  source 1..1881: mol_type = other DNA
atggccttaccagtgaccgccttgctcctgccgctggccttgctgctccacgccgccaggccggagatcgtgctgacacagtctcccgccacactgtcactgtctccaggcgaaagagccacactgagctgtagagccagccagagcgtgtccatctacctggcctggtatcagcagaagcctggacaggctccccggctgctgatctacgatgccagcaatagagccacaggcatccccgccagattttctggctctggcagcggcaccgatttcaccctgaccataagcagcctggaacctgaggacttcgccgtgtactactgccagcagagaagcaactggcctcctttcacattcggccctggcaccaaggtggacatcaaactcgaggacctgaagaacgtgttcccacctgaggtggccgtgttcgagcctagcgaggccgagatcagccacacccagaaagccaccctcgtgtgcctggctaccggcttctaccccgaccatgtggaactgtcttggtgggtcaacggcaaagaggtgcacagcggcgtgtgtaccgacccccagccactgaaagaacagcccgccctgaacgacagccggtactgcctgagcagcagactgagagtgtccgccaccttctggcagaacccccggaaccacttcagatgccaggtgcagttctacggcctgagcgagaacgacgagtggacccaggacagagccaagcccgtgacccagatcgtgtctgccgaagcctggggcagagccgattgcggctttaccagcgagagctaccagcagggcgtgctgagcgccaccaacctgagcgtgatcggcttcagaatcctgctgctgaaagtggccggctttaacctgctgatgaccctgcggctgtggtccagcagggccaagcgatctggatctggagcaacaaacttctcactactcaaacaagcaggtgacgtggaggagaatcccgggcctactagtatggactggatttggcgcatccttttccttgtcggcgctgctaccggcgcgcattccttcgaacaggtgcagcttgttgaaagcggaggcggagttgtgcagcctggcagaagtctgagactgtcttgtgccgccagcggcttcaccttcagcagctatggaatgcactgggtccgacaggcccctggcaaaggacttgaatgggttgccgtgatctgggacgacggcagcaacaagtattacgtggacagcgtgaagggcagattcaccatcagccgggacaacagcaagaacaccctgtacctccagatgaacagcctgagagccgaggacacagccgtgtattattgcgccagagatgactactacggcagcggctccttcaacagctactatggcacagacgtgtggggccagggcacaacagttaccgttagctctacgcgtatccagaaccctgatcctgccgtgtaccagctgcgggatagcaagagcagcgacaagagcgtgtgtctgttcaccgacttcgacagccagaccaacgtgtcccagagcaaggactccgacgtgtacatcaccgataagtgcgtgctggacatgcggagcatggacttcaagagcaactccgccgtggcctggtccaacaagtccgatttcgcctgcgccaacgccttcaacaacagcattatccccgaggacacattcttcccaagccccgagagcagctgcgacgtgaagctggtggaaaagagcttcgagacagacaccaacctgaacttccagatcctgtacgagatcctgctgggcaaggccaccctgtacgccgtgctggtgtctgccctggtgctgatggctatggtcaagcggaaggacagccgggga

SEQ ID NO: 5108 - DNA, 1836 bp, synthetic construct
  source 1..1836: mol_type = other DNA
atggccttaccagtgaccgccttgctcctgccgctggccttgctgctccacgccgccaggccggacatccagatgacacagagccctagcagcctgtctgccagcgtgggagacagagtgaccatcacctgtagagccagccagggcatctcttcttggctggcctggtatcagcagaagcccgagaaggcccctaagagcctgatctatgccgccagctctctccagagcggagtgcctagcagattttctggcagcggctccggcaccgatttcaccctgacaatatccagcctccagcctgaggacttcgccacctactactgccagcagtacaacagctacccctacaccttcggccagggcaccaagctggaaatcaaactcgaggacctgaagaacgtgttcccacctgaggtggccgtgttcgagcctagcgaggccgagatcagccacacccagaaagccaccctcgtgtgcctggctaccggcttctaccccgaccatgtggaactgtcttggtgggtcaacggcaaagaggtgcacagcggcgtgtgtaccgacccccagccactgaaagaacagcccgccctgaacgacagccggtactgcctgagcagcagactgagagtgtccgccaccttctggcagaacccccggaaccacttcagatgccaggtgcagttctacggcctgagcgagaacgacgagtggacccaggacagagccaagcccgtgacccagatcgtgtctgccgaagcctggggcagagccgattgcggctttaccagcgagagctaccagcagggcgtgctgagcgccaccaacctgagcgtgatcggcttcagaatcctgctgctgaaagtggccggctttaacctgctgatgaccctgcggctgtggtccagcagggccaagcgatctggatctggagcaacaaacttctcactactcaaacaagcaggtgacgtggaggagaatcccgggcctactagtatggactggatttggcgcatccttttccttgtcggcgctgctaccggcgcgcattccttcgaagaagtgcaactggttcaatctggcggcggactggttcatccaggcggttctctgagactgagctgtgccggctctggcttcaccttcagcacctacctgatgtactgggtccgacaggcccctggcaagacactggaatgggtgtccgctattggcagcggaggcgatacctactacgccgactctgtgaagggcagattcaccatcagccgggacaacgccaagaacagcctgtacctccagatgaactccctgagagccgaggacatggccgtgtactactgtgccagaggactcggctattggggccagggaacactggtcacagtgtcctctacgcgtatccagaaccctgatcctgccgtgtaccagctgcgggatagcaagagcagcgacaagagcgtgtgtctgttcaccgacttcgacagccagaccaacgtgtcccagagcaaggactccgacgtgtacatcaccgataagtgcgtgctggacatgcggagcatggacttcaagagcaactccgccgtggcctggtccaacaagtccgatttcgcctgcgccaacgccttcaacaacagcattatccccgaggacacattcttcccaagccccgagagcagctgcgacgtgaagctggtggaaaagagcttcgagacagacaccaacctgaacttccagatcctgtacgagatcctgctgggcaaggccaccctgtacgccgtgctggtgtctgccctggtgctgatggctatggtcaagcggaaggacagccgggga

SEQ ID NO: 5109 - DNA, 1893 bp, synthetic construct
  source 1..1893: mol_type = other DNA
atggccttaccagtgaccgccttgctcctgccgctggccttgctgctccacgccgccaggccgctgcctgttctgacacagcctccatccgtgtctgtggcccctggaaagaccgccagaatcacatgcggcggcaacaacatcggcagcaagagcgtgcactggtatcagcagaagcctggacaggctcctgtgctggtggtgtacgacgacagcgatagacctagcggcatccccgagagattcagcggcagcaattccggcaataccgccacactgaccatcagcagagtggaagctggcgacgaggccgactactactgccaagtgtgggacagcagcagcgactacgtggtgtttggcggcggaacaaagctgacagtgcttctcgaggacctgaagaacgtgttcccacctgaggtggccgtgttcgagcctagcgaggccgagatcagccacacccagaaagccaccctcgtgtgcctggctaccggcttctaccccgaccatgtggaactgtcttggtgggtcaacggcaaagaggtgcacagcggcgtgtgtaccgacccccagccactgaaagaacagcccgccctgaacgacagccggtactgcctgagcagcagactgagagtgtccgccaccttctggcagaacccccggaaccacttcagatgccaggtgcagttctacggcctgagcgagaacgacgagtggacccaggacagagccaagcccgtgacccagatcgtgtctgccgaagcctggggcagagccgattgcggctttaccagcgagagctaccagcagggcgtgctgagcgccaccaacctgagcgtgatcggcttcagaatcctgctgctgaaagtggccggctttaacctgctgatgaccctgcggctgtggtccagcagggccaagcgatctggatctggagcaacaaacttctcactactcaaacaagcaggtgacgtggaggagaatcccgggcctactagtatggactggatttggcgcatccttttccttgtcggcgctgctaccggcgcgcattccttcgaagaagttcaactggtgcagagcggagccgaagtgaagaagccaggcgagagcctgaagattagctgcaaaggcagcggctacagcttcaccagctactggatcggctgggtccgacagatgcctggcaaaggactggaatggatgggcatcatctaccccggcgacagcgacaccagatacagccctagctttcagggccaagtgaccatctccgccgacaagagcatcagcacagcctacctccagtggtcctctctgaaggccagcgataccgccatgtactactgcgccagacaagtctggggatggcaaggcggcatgtaccccaggtctaactggtggtacaacctggactcttggggccagggcacactggtcacagtctcttctacgcgtatccagaaccctgatcctgccgtgtaccagctgcgggatagcaagagcagcgacaagagcgtgtgtctgttcaccgacttcgacagccagaccaacgtgtcccagagcaaggactccgacgtgtacatcaccgataagtgcgtgctggacatgcggagcatggacttcaagagcaactccgccgtggcctggtccaacaagtccgatttcgcctgcgccaacgccttcaacaacagcattatccccgaggacacattcttcccaagccccgagagcagctgcgacgtgaagctggtggaaaagagcttcgagacagacaccaacctgaacttccagatcctgtacgagatcctgctgggcaaggccaccctgtacgccgtgctggtgtctgccctggtgctgatggctatggtcaagcggaaggacagccgggga

SEQ ID NO: 5110 - DNA, 1872 bp, synthetic construct
  source 1..1872: mol_type = other DNA
atggccttaccagtgaccgccttgctcctgccgctggccttgctgctccacgccgccaggccggagctggtcatgacacagagccctgcttctctggccgtgtcactgggacagagagccaccatctcttgcagagccagcgagagcgtggacagctacggcaagagcttcatgcactggtatcagctcaagcccggccagcctcctaagctgctgatctacagagcctccaacctggaaagcggcgtgccagccagattttctggcagcggcagcagaaccgacttcaccctgaccattgatcccgtggaagccgatgatgccgccacctactactgccagcagaacaacgaggacccctggacatttggcggaggcaccaagctggaaatcaaactcgaggacctgaagaacgtgttcccacctgaggtggccgtgttcgagcctagcgaggccgagatcagccacacccagaaagccaccctcgtgtgcctggctaccggcttctaccccgaccatgtggaactgtcttggtgggtcaacggcaaagaggtgcacagcggcgtgtgtaccgacccccagccactgaaagaacagcccgccctgaacgacagccggtactgcctgagcagcagactgagagtgtccgccaccttctggcagaacccccggaaccacttcagatgccaggtgcagttctacggcctgagcgagaacgacgagtggacccaggacagagccaagcccgtgacccagatcgtgtctgccgaagcctggggcagagccgattgcggctttaccagcgagagctaccagcagggcgtgctgagcgccaccaacctgagcgtgatcggcttcagaatcctgctgctgaaagtggccggctttaacctgctgatgaccctgcggctgtggtccagcagggccaagcgatctggatctggagcaacaaacttctcactactcaaacaagcaggtgacgtggaggagaatcccgggcctactagtatggactggatttggcgcatccttttccttgtcggcgctgctaccggcgcgcattccttcgaagaagtgcagctcgaacagtctggccccgagcttgtgaaacctggcgcttccgtgaagatgagctgcaaggccagcggctacaccttcaccaactactacatgaaatgggtcaagcagagccacggcaagtccctggaatggatcggcgatctgaaccccaacaacggcgacaccttctacaaccagaagttcaagggcaaagccacactgaccgtggacaagagcagcaacaccgcctacatgcagctcaactccctgaccagcgaggacagcgccgtgtactactgtgccagaaccggcagatacgaagagaacgctatggactactggggccagggcacaagcgtgacagtctcttctacgcgtatccagaaccctgatcctgccgtgtaccagctgcgggatagcaagagcagcgacaagagcgtgtgtctgttcaccgacttcgacagccagaccaacgtgtcccagagcaaggactccgacgtgtacatcaccgataagtgcgtgctggacatgcggagcatggacttcaagagcaactccgccgtggcctggtccaacaagtccgatttcgcctgcgccaacgccttcaacaacagcattatccccgaggacacattcttcccaagccccgagagcagctgcgacgtgaagctggtggaaaagagcttcgagacagacaccaacctgaacttccagatcctgtacgagatcctgctgggcaaggccaccctgtacgccgtgctggtgtctgccctggtgctgatggctatggtcaagcggaaggacagccgggga

SEQ ID NO: 5111 - DNA, 1854 bp, synthetic construct
  source 1..1854: mol_type = other DNA
atggccttaccagtgaccgccttgctcctgccgctggccttgctgctccacgccgccaggccggacgtggtcatgacacagagcccttctagcctgtctgccagcgtgggcgacagagtgaccatcacctgtatggcctccgaggacatctacatccggctggcctggtatcagcagaagcctggaaacgcccctaagctgctgatctacgccgccacctctctggaaacaggcgtgccaagcagattttccggcagcggctctggcaccgatttcaccctgacaatatccagcctccagcctgaggacttcgccacctactactgccagcagtattggagcagcccctggacatttggcggaggcaccaaggtggaaatcaaactcgaggacctgaagaacgtgttcccacctgaggtggccgtgttcgagcctagcgaggccgagatcagccacacccagaaagccaccctcgtgtgcctggctaccggcttctaccccgaccatgtggaactgtcttggtgggtcaacggcaaagaggtgcacagcggcgtgtgtaccgacccccagccactgaaagaacagcccgccctgaacgacagccggtactgcctgagcagcagactgagagtgtccgccaccttctggcagaacccccggaaccacttcagatgccaggtgcagttctacggcctgagcgagaacgacgagtggacccaggacagagccaagcccgtgacccagatcgtgtctgccgaagcctggggcagagccgattgcggctttaccagcgagagctaccagcagggcgtgctgagcgccaccaacctgagcgtgatcggcttcagaatcctgctgctgaaagtggccggctttaacctgctgatgaccctgcggctgtggtccagcagggccaagcgatctggatctggagcaacaaacttctcactactcaaacaagcaggtgacgtggaggagaatcccgggcctactagtatggactggatttggcgcatccttttccttgtcggcgctgctaccggcgcgcattccttcgaacaggttcagctgcaagagtctggccccggactggtcaagcctagccaaacactgagcctgacctgtaccgtgtccggctacagcatcaccagcgactacacctggaactggatcagacagcctcctggcaacggactggaatggatcggctacatcacctacagcggcagcaccagctacaaccccagcctgaaaagccgggtgctgatctccgtggacaccagcaagaatcaggtgtccctgaagctgagcagcgtgacagccgctgataccgccgtgtactactgtgccagactggggagaagatacacaatggactactggggccagggcaccaccgtgacagtttcttctacgcgtatccagaaccctgatcctgccgtgtaccagctgcgggatagcaagagcagcgacaagagcgtgtgtctgttcaccgacttcgacagccagaccaacgtgtcccagagcaaggactccgacgtgtacatcaccgataagtgcgtgctggacatgcggagcatggacttcaagagcaactccgccgtggcctggtccaacaagtccgatttcgcctgcgccaacgccttcaacaacagcattatccccgaggacacattcttcccaagccccgagagcagctgcgacgtgaagctggtggaaaagagcttcgagacagacaccaacctgaacttccagatcctgtacgagatcctgctgggcaaggccaccctgtacgccgtgctggtgtctgccctggtgctgatggctatggtcaagcggaaggacagccgggga

SEQ ID NO: 5112 - DNA, 1866 bp, synthetic construct
  source 1..1866: mol_type = other DNA
atggccttaccagtgaccgccttgctcctgccgctggccttgctgctccacgccgccaggccggatattgtgctgactcagagccctgccactctgagccttagtccaggcgacagagctaccatctcctgtagggcctctgaatccgtgaccattctgggctctcatctcatatattggtatcaacaaaagccgggccagcctccacggctgctcattcaactggcctctaacgtgcagaccggcgtgccagctagattttctggctctggctcccggaccgactttacactgacaatcagctccgtggaacccgaagattttgccgtctattattgcctccagtccaggaccattcctcggacattcggccagggaacaaaactcgaaatcaagcggctcgaggacctgaagaacgtgttcccacctgaggtggccgtgttcgagcctagcgaggccgagatcagccacacccagaaagccaccctcgtgtgcctggctaccggcttctaccccgaccatgtggaactgtcttggtgggtcaacggcaaagaggtgcacagcggcgtgtgtaccgacccccagccactgaaagaacagcccgccctgaacgacagccggtactgcctgagcagcagactgagagtgtccgccaccttctggcagaacccccggaaccacttcagatgccaggtgcagttctacggcctgagcgagaacgacgagtggacccaggacagagccaagcccgtgacccagatcgtgtctgccgaagcctggggcagagccgattgcggctttaccagcgagagctaccagcagggcgtgctgagcgccaccaacctgagcgtgatcggcttcagaatcctgctgctgaaagtggccggctttaacctgctgatgaccctgcggctgtggtccagcagggccaagcgatctggatctggagcaacaaacttctcactactcaaacaagcaggtgacgtggaggagaatcccgggcctactagtatggactggatttggcgcatccttttccttgtcggcgctgctaccggcgcgcattccttcgaacaggtgcagctcgttcagagtggccccgaagtgaaaaagccaggcgagtccgtgaagatttcctgcaaagcctccggctacacattccggcactactctatgaattgggtcaagcaggccccaggccagggccttaagtggatgggacgcatcaataccgagtccggcgtgccaatctacgccgatgacttcaaaggccggttcagcttcaccgtggatacctctgcctccaccgcctacctggaaatcagcagcctgaccagcgaggatacagctgtgtacttctgtagcaacgattacctctacagcctggatttctggggacagggaaccacactgaccgtgtctagcacgcgtatccagaaccctgatcctgccgtgtaccagctgcgggatagcaagagcagcgacaagagcgtgtgtctgttcaccgacttcgacagccagaccaacgtgtcccagagcaaggactccgacgtgtacatcaccgataagtgcgtgctggacatgcggagcatggacttcaagagcaactccgccgtggcctggtccaacaagtccgatttcgcctgcgccaacgccttcaacaacagcattatccccgaggacacattcttcccaagccccgagagcagctgcgacgtgaagctggtggaaaagagcttcgagacagacaccaacctgaacttccagatcctgtacgagatcctgctgggcaaggccaccctgtacgccgtgctggtgtctgccctggtgctgatggctatggtcaagcggaaggacagccgggga

SEQ ID NO: 5113 - DNA, 1866 bp, synthetic construct
  source 1..1866: mol_type = other DNA
atggccttaccagtgaccgccttgctcctgccgctggccttgctgctccacgccgccaggccggacatcgtgctgacacagtctcccgccacactgtcactgagccctggcgatagagccacactgagctgtagagccagcgagagcgtgacaatcctgggcagccacctgatctactggtatcagcagaagcccggacaggcccctagactgctgattcagctcgccagcaatgtgcagacaggcatccctgccagattttccggcagcggcagcagaaccgatttcaccctgaccataagcagcctggaacctgaggacttcgccgtgtactactgcctccagagccggacaatccccagaacctttggacagggcaccaagctggaaatcaagagactcgaggacctgaagaacgtgttcccacctgaggtggccgtgttcgagcctagcgaggccgagatcagccacacccagaaagccaccctcgtgtgcctggctaccggcttctaccccgaccatgtggaactgtcttggtgggtcaacggcaaagaggtgcacagcggcgtgtgtaccgacccccagccactgaaagaacagcccgccctgaacgacagccggtactgcctgagcagcagactgagagtgtccgccaccttctggcagaacccccggaaccacttcagatgccaggtgcagttctacggcctgagcgagaacgacgagtggacccaggacagagccaagcccgtgacccagatcgtgtctgccgaagcctggggcagagccgattgcggctttaccagcgagagctaccagcagggcgtgctgagcgccaccaacctgagcgtgatcggcttcagaatcctgctgctgaaagtggccggctttaacctgctgatgaccctgcggctgtggtccagcagggccaagcgatctggatctggagcaacaaacttctcactactcaaacaagcaggtgacgtggaggagaatcccgggcctactagtatggactggatttggcgcatccttttccttgtcggcgctgctaccggcgcgcattccttcgaacaggttcagctggtgcagtctggcagcgagctgaagaaacctggcgagagcgtgaagatcagctgcaaggccagcggctacaccttcacacactacagcatgaactgggtccgacaggcccctggacaaggactggaatggatgggcagaatcaacaccgagacaggcgagcccctgtacgccgacgatttcaagggcagattcgtgttcagcctggacaccagcgccagcacagcctatctccagatcagctctctgaaggccgaggacaccgccgtgtactactgctccaacgactacctgtactccctggactattggggccagggcacactggtcacagtgtctagtacgcgtatccagaaccctgatcctgccgtgtaccagctgcgggatagcaagagcagcgacaagagcgtgtgtctgttcaccgacttcgacagccagaccaacgtgtcccagagcaaggactccgacgtgtacatcaccgataagtgcgtgctggacatgcggagcatggacttcaagagcaactccgccgtggcctggtccaacaagtccgatttcgcctgcgccaacgccttcaacaacagcattatccccgaggacacattcttcccaagccccgagagcagctgcgacgtgaagctggtggaaaagagcttcgagacagacaccaacctgaacttccagatcctgtacgagatcctgctgggcaaggccaccctgtacgccgtgctggtgtctgccctggtgctgatggctatggtcaagcggaaggacagccgggga

SEQ ID NO: 5114 - DNA, 1869 bp, synthetic construct
  source 1..1869: mol_type = other DNA
atggccttaccagtgaccgccttgctcctgccgctggccttgctgctccacgccgccaggccggacatccagctgactcagagccctagctttctgagcgccagcgtgggcgacagagtgaccattacatgtagagccagccagggcatcagcaccgacctgaactggtatcagcagaagcctggcaaggcccctaagctgctgatctacgccgccagcaatctggaaagcggcgtgccaagcagattttccggctctggcagcggcaccgagttcaccctgacaatatctagcctccagcctgaggacttcgccacctactactgccagcagagctacaactggccctacacctttggcggaggcaccaaggtggaaatcaagagactcgaggacctgaagaacgtgttcccacctgaggtggccgtgttcgagcctagcgaggccgagatcagccacacccagaaagccaccctcgtgtgcctggctaccggcttctaccccgaccatgtggaactgtcttggtgggtcaacggcaaagaggtgcacagcggcgtgtgtaccgacccccagccactgaaagaacagcccgccctgaacgacagccggtactgcctgagcagcagactgagagtgtccgccaccttctggcagaacccccggaaccacttcagatgccaggtgcagttctacggcctgagcgagaacgacgagtggacccaggacagagccaagcccgtgacccagatcgtgtctgccgaagcctggggcagagccgattgcggctttaccagcgagagctaccagcagggcgtgctgagcgccaccaacctgagcgtgatcggcttcagaatcctgctgctgaaagtggccggctttaacctgctgatgaccctgcggctgtggtccagcagggccaagcgatctggatctggagcaacaaacttctcactactcaaacaagcaggtgacgtggaggagaatcccgggcctactagtatggactggatttggcgcatccttttccttgtcggcgctgctaccggcgcgcattccttcgaagaagttcagctggttgaatcaggcggaggactcgtgaaacctggcggctctctgagactgtcttgtgccgccagcggcttcaccttcagcaacttcgagatgaactgggtccgacaggccccaggcaaaggactggaatgggtgtccggcatcagctccaatggccggtacatcaactacgccgacagcgtgaagggcagattcaccatcagccgggacaacgccaagaacagcctgtacctccagatgaactccctgagagccgaggacaccgccgtgtactattgtgccagagtggtggacttcgaccaggactacaacggcttcgactattggggccagggcaccctggttaccgttagctctacgcgtatccagaaccctgatcctgccgtgtaccagctgcgggatagcaagagcagcgacaagagcgtgtgtctgttcaccgacttcgacagccagaccaacgtgtcccagagcaaggactccgacgtgtacatcaccgataagtgcgtgctggacatgcggagcatggacttcaagagcaactccgccgtggcctggtccaacaagtccgatttcgcctgcgccaacgccttcaacaacagcattatccccgaggacacattcttcccaagccccgagagcagctgcgacgtgaagctggtggaaaagagcttcgagacagacaccaacctgaacttccagatcctgtacgagatcctgctgggcaaggccaccctgtacgccgtgctggtgtctgccctggtgctgatggctatggtcaagcggaaggacagccgggga

SEQ ID NO: 5115 - DNA, 1863 bp, synthetic construct
  source 1..1863: mol_type = other DNA
atggccttaccagtgaccgccttgctcctgccgctggccttgctgctccacgccgccaggccggacatccaactgactcagagccccagctttctgagcgcctctgtgggcgacagagtgaccatcacatgtagtctcagcctgggcatcagcacatggcgggattggtttccgccgaggcttggcaggggccttgagccgctgacctacgccgccagcacactgcaaagcggagtgcctagcagattttccggcagcggctctggcaccgagttcaccctgacaatatccagcctccagcctgaggacttcgccacctactactgccagcagctcaacagctaccctctgacctttggcggaggcaccaaggtggaaatcaagagactcgaggacctgaagaacgtgttcccacctgaggtggccgtgttcgagcctagcgaggccgagatcagccacacccagaaagccaccctcgtgtgcctggctaccggcttctaccccgaccatgtggaactgtcttggtgggtcaacggcaaagaggtgcacagcggcgtgtgtaccgacccccagccactgaaagaacagcccgccctgaacgacagccggtactgcctgagcagcagactgagagtgtccgccaccttctggcagaacccccggaaccacttcagatgccaggtgcagttctacggcctgagcgagaacgacgagtggacccaggacagagccaagcccgtgacccagatcgtgtctgccgaagcctggggcagagccgattgcggctttaccagcgagagctaccagcagggcgtgctgagcgccaccaacctgagcgtgatcggcttcagaatcctgctgctgaaagtggccggctttaacctgctgatgaccctgcggctgtggtccagcagggccaagcgatctggatctggagcaacaaacttctcactactcaaacaagcaggtgacgtggaggagaatcccgggcctactagtatggactggatttggcgcatccttttccttgtcggcgctgctaccggcgcgcattccttcgaagaagttcaactggttgagtctggtggcggcctggttaagcctggcggatctctgagactgagctgtgccgccagcggcttcacctttagcacatacggcatgagctgggtccgacaggcccctggaaaaggacttgagtgggtcgcctacatcaacaacggctccggctacatctactacgccgacagcgtgaagggcagattcaccatcagccgggacaacgccaagaacagcctgtacctccagatgaactccctgagagccgaggacaccgccgtgtactattgtgccagaggacagtggtggagcggcggagactttgattattggggccagggcaccctggtcaccgtttcttctacgcgtatccagaaccctgatcctgccgtgtaccagctgcgggatagcaagagcagcgacaagagcgtgtgtctgttcaccgacttcgacagccagaccaacgtgtcccagagcaaggactccgacgtgtacatcaccgataagtgcgtgctggacatgcggagcatggacttcaagagcaactccgccgtggcctggtccaacaagtccgatttcgcctgcgccaacgccttcaacaacagcattatccccgaggacacattcttcccaagccccgagagcagctgcgacgtgaagctggtggaaaagagcttcgagacagacaccaacctgaacttccagatcctgtacgagatcctgctgggcaaggccaccctgtacgccgtgctggtgtctgccctggtgctgatggctatggtcaagcggaaggacagccgggga

SEQ ID NO: 5116 - DNA, 1866 bp, synthetic construct
  source 1..1866: mol_type = other DNA
atggccttaccagtgaccgccttgctcctgccgctggccttgctgctccacgccgccaggccggagatcgtgctgacacagtctcccgccacactgtcactgtctccaggcgaaagagccacactgagctgtagcgccagcagcagcgtgtcctacatgtactggtatcagcagaagcccggacaggcccctagactgctgatctacagaaccagcaacctggcctctggcatccccgccagattttctggctctggcagcggcaccgatttcaccctgaccataagcagcctggaacctgaggacttcgccgtgtactactgccagcagtaccacagctaccccaccacctttggacagggcaccaaggtggaaatcaagcggacagttctcgaggacctgaagaacgtgttcccacctgaggtggccgtgttcgagcctagcgaggccgagatcagccacacccagaaagccaccctcgtgtgcctggctaccggcttctaccccgaccatgtggaactgtcttggtgggtcaacggcaaagaggtgcacagcggcgtgtgtaccgacccccagccactgaaagaacagcccgccctgaacgacagccggtactgcctgagcagcagactgagagtgtccgccaccttctggcagaacccccggaaccacttcagatgccaggtgcagttctacggcctgagcgagaacgacgagtggacccaggacagagccaagcccgtgacccagatcgtgtctgccgaagcctggggcagagccgattgcggctttaccagcgagagctaccagcagggcgtgctgagcgccaccaacctgagcgtgatcggcttcagaatcctgctgctgaaagtggccggctttaacctgctgatgaccctgcggctgtggtccagcagggccaagcgatctggatctggagcaacaaacttctcactactcaaacaagcaggtgacgtggaggagaatcccgggcctactagtatggactggatttggcgcatccttttccttgtcggcgctgctaccggcgcgcattccttcgaagaagtgcagctggttgaatcaggtggcggcctggttcaacctggcggatctctgagactgtcttgtgccgccagcggcttcagcttcaacacctacgccatgaactgggtccgacaggctcctggcaaaggactggaatgggtgtcccacatcagaagcaagagcaacaacttcgccacctactacgccgacagcgtgaaggacagattcaccatcagccgggacaacgccaagaacagcctgtacctccagatgaactccctgagagccgaggacaccgccgtgtattattgcgccagacaaggcggcgacttccctatggattattggggccagggcaccctggtcaccgtttcttctacgcgtatccagaaccctgatcctgccgtgtaccagctgcgggatagcaagagcagcgacaagagcgtgtgtctgttcaccgacttcgacagccagaccaacgtgtcccagagcaaggactccgacgtgtacatcaccgataagtgcgtgctggacatgcggagcatggacttcaagagcaactccgccgtggcctggtccaacaagtccgatttcgcctgcgccaacgccttcaacaacagcattatccccgaggacacattcttcccaagccccgagagcagctgcgacgtgaagctggtggaaaagagcttcgagacagacaccaacctgaacttccagatcctgtacgagatcctgctgggcaaggccaccctgtacgccgtgctggtgtctgccctggtgctgatggctatggtcaagcggaaggacagccgggga

SEQ ID NO: 5117 - DNA, 1854 bp, synthetic construct
  source 1..1854: mol_type = other DNA
atggccttaccagtgaccgccttgctcctgccgctggccttgctgctccacgccgccaggccggacgtggtcatgacacagagcccttctagcctgtctgccagcgtgggcgacagagtgaccatcacctgtaaagccagcgaggacatctacatccggctggcctggtatcagcagaagcctggaaaggcccctaagctgctgatctacgccgccacctctctggaaacaggcgtgccaagcagattttccggcagcggctctggcaccgatttcaccctgacaatatccagcctccagcctgaggacttcgccacctactactgccagcagtattggaccacaccttggacctttggcggaggcaccaaggtggaaatcaaactcgaggacctgaagaacgtgttcccacctgaggtggccgtgttcgagcctagcgaggccgagatcagccacacccagaaagccaccctcgtgtgcctggctaccggcttctaccccgaccatgtggaactgtcttggtgggtcaacggcaaagaggtgcacagcggcgtgtgtaccgacccccagccactgaaagaacagcccgccctgaacgacagccggtactgcctgagcagcagactgagagtgtccgccaccttctggcagaacccccggaaccacttcagatgccaggtgcagttctacggcctgagcgagaacgacgagtggacccaggacagagccaagcccgtgacccagatcgtgtctgccgaagcctggggcagagccgattgcggctttaccagcgagagctaccagcagggcgtgctgagcgccaccaacctgagcgtgatcggcttcagaatcctgctgctgaaagtggccggctttaacctgctgatgaccctgcggctgtggtccagcagggccaagcgatctggatctggagcaacaaacttctcactactcaaacaagcaggtgacgtggaggagaatcccgggcctactagtatggactggatttggcgcatccttttccttgtcggcgctgctaccggcgcgcattccttcgaacaggtgcagctccaagagtctggccctggactggtcaagcctagccagacactgagcctgacctgtaccgtgtccggctacagcatcaccatcgactacacctggaactggatcagacagcctcctggcaaaggactggaatggatcggctacatcacctacagcggcagcaccgactacaaccccagcctgaaaagccgggtgctgatctccgtggacaccagcaagaatcaggtgtccctgaagctgagcagcgtgacagccgctgataccgccgtgtactactgtgccagactgggcagaagatacgccctggattattggggccagggcaccaccgtgacagtgtcatctacgcgtatccagaaccctgatcctgccgtgtaccagctgcgggatagcaagagcagcgacaagagcgtgtgtctgttcaccgacttcgacagccagaccaacgtgtcccagagcaaggactccgacgtgtacatcaccgataagtgcgtgctggacatgcggagcatggacttcaagagcaactccgccgtggcctggtccaacaagtccgatttcgcctgcgccaacgccttcaacaacagcattatccccgaggacacattcttcccaagccccgagagcagctgcgacgtgaagctggtggaaaagagcttcgagacagacaccaacctgaacttccagatcctgtacgagatcctgctgggcaaggccaccctgtacgccgtgctggtgtctgccctggtgctgatggctatggtcaagcggaaggacagccgggga

SEQ ID NO: 5118 - DNA, 1869 bp, synthetic construct
  source 1..1869: mol_type = other DNA
atggccttaccagtgaccgccttgctcctgccgctggccttgctgctccacgccgccaggccggacatccagatgacccagaccacaagcagcctgtctgccagcctgggcgacagagtgaccatctcttgtagagccagccaggacatcagcaactacctgaactggtatcagcagaaacccgacggcaccgtgaagctgctgatctactacaccagcatcctgcacagcggcgtgcccagcagattttctggctctggcagcggcaccgactacagcctgaccatcagcaatctggaacaagaggacttcgctacctacttctgccagcaaggcaacaccctgccttggacatttggcggaggcaccaagctggaaatcaaagctctcgaggacctgaagaacgtgttcccacctgaggtggccgtgttcgagcctagcgaggccgagatcagccacacccagaaagccaccctcgtgtgcctggctaccggcttctaccccgaccatgtggaactgtcttggtgggtcaacggcaaagaggtgcacagcggcgtgtgtaccgacccccagccactgaaagaacagcccgccctgaacgacagccggtactgcctgagcagcagactgagagtgtccgccaccttctggcagaacccccggaaccacttcagatgccaggtgcagttctacggcctgagcgagaacgacgagtggacccaggacagagccaagcccgtgacccagatcgtgtctgccgaagcctggggcagagccgattgcggctttaccagcgagagctaccagcagggcgtgctgagcgccaccaacctgagcgtgatcggcttcagaatcctgctgctgaaagtggccggctttaacctgctgatgaccctgcggctgtggtccagcagggccaagcgatctggatctggagcaacaaacttctcactactcaaacaagcaggtgacgtggaggagaatcccgggcctactagtatggactggatttggcgcatccttttccttgtcggcgctgctaccggcgcgcattccttcgaagaagtgcaactggttgaatctggcggcggactggttaagcctggcggatctctgaagctgagctgtgccgcctctggcttcgccttcagcatctacgatatgagctgggtccgacagacccctgagaagagactggaatgggtcgcctacatctctagcggcggagggacctactatcccgacacagtgaagggcagattcaccatctccagagacaacgccaagaacaccctgtacctccagatgagcagcctgaagtccgaggacaccgccatgtactactgcgccagacacagcggctatggcacacattggggagtgctgtttgcctactggggccagggaacactggtcacagtttctgctacgcgtatccagaaccctgatcctgccgtgtaccagctgcgggatagcaagagcagcgacaagagcgtgtgtctgttcaccgacttcgacagccagaccaacgtgtcccagagcaaggactccgacgtgtacatcaccgataagtgcgtgctggacatgcggagcatggacttcaagagcaactccgccgtggcctggtccaacaagtccgatttcgcctgcgccaacgccttcaacaacagcattatccccgaggacacattcttcccaagccccgagagcagctgcgacgtgaagctggtggaaaagagcttcgagacagacaccaacctgaacttccagatcctgtacgagatcctgctgggcaaggccaccctgtacgccgtgctggtgtctgccctggtgctgatggctatggtcaagcggaaggacagccgggga

SEQ ID NO: 5119 - DNA, 1899 bp, synthetic construct
  source 1..1899: mol_type = other DNA
atggccttaccagtgaccgccttgctcctgccgctggccttgctgctccacgccgccaggccggacatcgtgatgacacagagccctgatagcctggccgtgtctctgggagagagagccaccatcaactgcaagagcagccagagcctgctgtacagaagcaaccagaagaactacctggcctggtatcagcagaagcccggccagcctcctaagctgctgatctactgggccagcaccagagaaagcggcgtgcccgatagattttctggctctggcagcggcaccgacttcaccctgacaatttctagcctgcaagccgaggacgtggccgtgtactactgccagcagtattacaactaccccagaaccttcggccagggcaccaaggtggaaatcaagagaacagttctcgaggacctgaagaacgtgttcccacctgaggtggccgtgttcgagcctagcgaggccgagatcagccacacccagaaagccaccctcgtgtgcctggctaccggcttctaccccgaccatgtggaactgtcttggtgggtcaacggcaaagaggtgcacagcggcgtgtgtaccgacccccagccactgaaagaacagcccgccctgaacgacagccggtactgcctgagcagcagactgagagtgtccgccaccttctggcagaacccccggaaccacttcagatgccaggtgcagttctacggcctgagcgagaacgacgagtggacccaggacagagccaagcccgtgacccagatcgtgtctgccgaagcctggggcagagccgattgcggctttaccagcgagagctaccagcagggcgtgctgagcgccaccaacctgagcgtgatcggcttcagaatcctgctgctgaaagtggccggctttaacctgctgatgaccctgcggctgtggtccagcagggccaagcgatctggatctggagcaacaaacttctcactactcaaacaagcaggtgacgtggaggagaatcccgggcctactagtatggactggatttggcgcatccttttccttgtcggcgctgctaccggcgcgcattccttcgaagaagttcagctgcttgaatcaggcggcggactggttcaacctggcggatctctgagactgagctgtgccgccagcggctacagcatcacaagcgactatgcctggaactgggtccgacaggcccctggcaaaggactggaatgggtgtcctacatcagcaacagcggcagcaccagctacaaccccagcctgaagtcccggttcaccatcagcagagacaacagcaagaacaccctgtacctccagatgaacagcctgagagctgaggacaccgccgtgtattattgcgccaaagagcggaactacgactacgacgattactactacgctatggactactggggccagggaaccctggtcacagtctcttctacgcgtatccagaaccctgatcctgccgtgtaccagctgcgggatagcaagagcagcgacaagagcgtgtgtctgttcaccgacttcgacagccagaccaacgtgtcccagagcaaggactccgacgtgtacatcaccgataagtgcgtgctggacatgcggagcatggacttcaagagcaactccgccgtggcctggtccaacaagtccgatttcgcctgcgccaacgccttcaacaacagcattatccccgaggacacattcttcccaagccccgagagcagctgcgacgtgaagctggtggaaaagagcttcgagacagacaccaacctgaacttccagatcctgtacgagatcctgctgggcaaggccaccctgtacgccgtgctggtgtctgccctggtgctgatggctatggtcaagcggaaggacagccgggga

SEQ ID NO: 5120 - DNA, 1878 bp, synthetic construct
  source 1..1878: mol_type = other DNA
atggccttaccagtgaccgccttgctcctgccgctggccttgctgctccacgccgccaggccggacgtggtcatgacacagagccctctgagcctgcctgtgacacttggacagcctgccagcatcagctgtagaagcagccagagcctgctgcacagcagcggcaatacctacctggaatggtatcagcagaggcccggacagagccccagacctctgatctacaagatcagcacccggttcagcggcgtgcccgatagattttctggctctggcagcggcaccgacttcaccctgaagattagcagagtggaagccgaggacgtgggcgtgtactactgcttccaaggcagccacgtgccatacacctttggcggcggaacaaaggtggaaatcaagagactcgaggacctgaagaacgtgttcccacctgaggtggccgtgttcgagcctagcgaggccgagatcagccacacccagaaagccaccctcgtgtgcctggctaccggcttctaccccgaccatgtggaactgtcttggtgggtcaacggcaaagaggtgcacagcggcgtgtgtaccgacccccagccactgaaagaacagcccgccctgaacgacagccggtactgcctgagcagcagactgagagtgtccgccaccttctggcagaacccccggaaccacttcagatgccaggtgcagttctacggcctgagcgagaacgacgagtggacccaggacagagccaagcccgtgacccagatcgtgtctgccgaagcctggggcagagccgattgcggctttaccagcgagagctaccagcagggcgtgctgagcgccaccaacctgagcgtgatcggcttcagaatcctgctgctgaaagtggccggctttaacctgctgatgaccctgcggctgtggtccagcagggccaagcgatctggatctggagcaacaaacttctcactactcaaacaagcaggtgacgtggaggagaatcccgggcctactagtatggactggatttggcgcatccttttccttgtcggcgctgctaccggcgcgcattccttcgaacaagttcagctggttcagagcggagccgaagtgaagaaacctggggcctctgtgaaggtgtcctgcaaagcctctggcctgaccatcgaggactactacatgcactgggtccgacaggcccctggacaaggacttgaatggatgggctggatcgaccccgagaacggcgatacagagtacggccctaagttccagggcagagtgaccatgaccagagacaccagcatcaacaccgcctacatggaactgagccggctgagatccgatgacaccgccgtgtactattgcgccgtgcacaatgcccactacggcacttggtttgcctattggggccagggcacactggtcaccgttagctctacgcgtatccagaaccctgatcctgccgtgtaccagctgcgggatagcaagagcagcgacaagagcgtgtgtctgttcaccgacttcgacagccagaccaacgtgtcccagagcaaggactccgacgtgtacatcaccgataagtgcgtgctggacatgcggagcatggacttcaagagcaactccgccgtggcctggtccaacaagtccgatttcgcctgcgccaacgccttcaacaacagcattatccccgaggacacattcttcccaagccccgagagcagctgcgacgtgaagctggtggaaaagagcttcgagacagacaccaacctgaacttccagatcctgtacgagatcctgctgggcaaggccaccctgtacgccgtgctggtgtctgccctggtgctgatggctatggtcaagcggaaggacagccgggga

SEQ ID NO: 5121 - DNA, 1854 bp, synthetic construct
  source 1..1854: mol_type = other DNA
atggccttaccagtgaccgccttgctcctgccgctggccttgctgctccacgccgccaggccggacatccagatgacacagagccctagcagcctgtctgccagcgtgggagacagagtgaccatcacctgtagagccagcgagaacatctacagcaacctggcctggtatcagcagaagcctggcaaggcccctaagctgctgatctacgccgccaccaatctggctgatggcgtgccaagcagattttccggctctggcagcggcaccgatttcaccctgacaatatccagcctccagcctgaggacttcgccacctactactgccagcacttttggggcacccctacattcggccagggcaccaaggtggaaatcaagagaacagttctcgaggacctgaagaacgtgttcccacctgaggtggccgtgttcgagcctagcgaggccgagatcagccacacccagaaagccaccctcgtgtgcctggctaccggcttctaccccgaccatgtggaactgtcttggtgggtcaacggcaaagaggtgcacagcggcgtgtgtaccgacccccagccactgaaagaacagcccgccctgaacgacagccggtactgcctgagcagcagactgagagtgtccgccaccttctggcagaacccccggaaccacttcagatgccaggtgcagttctacggcctgagcgagaacgacgagtggacccaggacagagccaagcccgtgacccagatcgtgtctgccgaagcctggggcagagccgattgcggctttaccagcgagagctaccagcagggcgtgctgagcgccaccaacctgagcgtgatcggcttcagaatcctgctgctgaaagtggccggctttaacctgctgatgaccctgcggctgtggtccagcagggccaagcgatctggatctggagcaacaaacttctcactactcaaacaagcaggtgacgtggaggagaatcccgggcctactagtatggactggatttggcgcatccttttccttgtcggcgctgctaccggcgcgcattccttcgaagaagtgcagctggttgaatcaggtggcggcctggttcaacctggcggatctctgagactgagctgtgccgcctctggcttcagcctgacaaattacggcgtgcactgggtccgacaggcccctggaaaaggactggaatgggtgtccgtgatttggagcggcggcagcaccgattacaacgccgccttcatcagccggttcaccatcagcgccgacaccagcaagaataccgcctacctccagatgaactccctgagagccgaggacaccgccgtgtactattgcgccagagaactgatccacgctatggacaactggggccagggaaccctggtcacagtctcttctacgcgtatccagaaccctgatcctgccgtgtaccagctgcgggatagcaagagcagcgacaagagcgtgtgtctgttcaccgacttcgacagccagaccaacgtgtcccagagcaaggactccgacgtgtacatcaccgataagtgcgtgctggacatgcggagcatggacttcaagagcaactccgccgtggcctggtccaacaagtccgatttcgcctgcgccaacgccttcaacaacagcattatccccgaggacacattcttcccaagccccgagagcagctgcgacgtgaagctggtggaaaagagcttcgagacagacaccaacctgaacttccagatcctgtacgagatcctgctgggcaaggccaccctgtacgccgtgctggtgtctgccctggtgctgatggctatggtcaagcggaaggacagccgggga

SEQ ID NO: 5122 - DNA, 1875 bp, synthetic construct
  source 1..1875: mol_type = other DNA
atggccttaccagtgaccgccttgctcctgccgctggccttgctgctccacgccgccaggccggacttcgtgatgacacagagccctctgagcctgcctgtgacacctggcgaacctgccagcatcagctgtagaagcagccagagcatcgtgcacagcaacggcaacacctacctggaatggtatctccagaagcctggacagagcccacagctgctgatctacaaggtgtccaacagattcagcggcgtgcccgacagattttctggcagcggctctggcaccgacttcaccctgaagattagcagagtggaagccgaggacgtgggcgtgtactactgcttccaaggctctcacgtgcccctgacctttggacagggcaccaagctggaaatcaagagactcgaggacctgaagaacgtgttcccacctgaggtggccgtgttcgagcctagcgaggccgagatcagccacacccagaaagccaccctcgtgtgcctggctaccggcttctaccccgaccatgtggaactgtcttggtgggtcaacggcaaagaggtgcacagcggcgtgtgtaccgacccccagccactgaaagaacagcccgccctgaacgacagccggtactgcctgagcagcagactgagagtgtccgccaccttctggcagaacccccggaaccacttcagatgccaggtgcagttctacggcctgagcgagaacgacgagtggacccaggacagagccaagcccgtgacccagatcgtgtctgccgaagcctggggcagagccgattgcggctttaccagcgagagctaccagcagggcgtgctgagcgccaccaacctgagcgtgatcggcttcagaatcctgctgctgaaagtggccggctttaacctgctgatgaccctgcggctgtggtccagcagggccaagcgatctggatctggagcaacaaacttctcactactcaaacaagcaggtgacgtggaggagaatcccgggcctactagtatggactggatttggcgcatccttttccttgtcggcgctgctaccggcgcgcattccttcgaagaagtgcagctggttgaaagcggagccgaagtgaagaaacctggggcctctgtgaaggtgtcctgcaaggccagcggctacacctttaccagctactggattcactgggtccgacaggcccctggacaaggacttgagtggatgggcgagaacgacccctccaacggcaggaccaactacaacgagaagttcaagaaccgcgtgaccctgaccgtggacaccagcatctctaccgcctacatggaactgagccggctgagatccgatgacaccgccgtgtactattgcgccagaggacccaactacttttacagcatggactactggggccagggcacaatggtcaccgttagctctacgcgtatccagaaccctgatcctgccgtgtaccagctgcgggatagcaagagcagcgacaagagcgtgtgtctgttcaccgacttcgacagccagaccaacgtgtcccagagcaaggactccgacgtgtacatcaccgataagtgcgtgctggacatgcggagcatggacttcaagagcaactccgccgtggcctggtccaacaagtccgatttcgcctgcgccaacgccttcaacaacagcattatccccgaggacacattcttcccaagccccgagagcagctgcgacgtgaagctggtggaaaagagcttcgagacagacaccaacctgaacttccagatcctgtacgagatcctgctgggcaaggccaccctgtacgccgtgctggtgtctgccctggtgctgatggctatggtcaagcggaaggacagccgggga

SEQ ID NO: 5123 - DNA, 1854 bp, synthetic construct
  source 1..1854: mol_type = other DNA
atggccttaccagtgaccgccttgctcctgccgctggccttgctgctccacgccgccaggccggacatccagctgactcagagccctagctttctgagcgccagcgtgggcgacagagtgaccatcacatgtagcgccagatccagcatcagcttcatgtactggtatcagcagaagcccggcaaggcccctaagctgctgatctacgacaccagcaatctggcctctggcgtgcccagcagattttctggaagcggcagcggcaccgagttcaccctgacaatctctagcctggaagccgaggatgccgccacctactattgccagcagtggtccagctatcccctgacatttggacagggcaccaagctggaaatcaaactcgaggacctgaagaacgtgttcccacctgaggtggccgtgttcgagcctagcgaggccgagatcagccacacccagaaagccaccctcgtgtgcctggctaccggcttctaccccgaccatgtggaactgtcttggtgggtcaacggcaaagaggtgcacagcggcgtgtgtaccgacccccagccactgaaagaacagcccgccctgaacgacagccggtactgcctgagcagcagactgagagtgtccgccaccttctggcagaacccccggaaccacttcagatgccaggtgcagttctacggcctgagcgagaacgacgagtggacccaggacagagccaagcccgtgacccagatcgtgtctgccgaagcctggggcagagccgattgcggctttaccagcgagagctaccagcagggcgtgctgagcgccaccaacctgagcgtgatcggcttcagaatcctgctgctgaaagtggccggctttaacctgctgatgaccctgcggctgtggtccagcagggccaagcgatctggatctggagcaacaaacttctcactactcaaacaagcaggtgacgtggaggagaatcccgggcctactagtatggactggatttggcgcatccttttccttgtcggcgctgctaccggcgcgcattccttcgaacaggttcagctggttcagtctggggccgaagtgaagaaacctggggcctctgtgaaggtgtcctgcaaggcttccggctacacctttaccggctcttggatgaactgggtccgacaggctcctggacagggactcgaatggatcggcagaatctatcctggcgacggcgagacaaactacaacggcaagttcaaggaccgcgtgacaatcaccgccgacaagagcacaagcaccgcctacatggaactgagcagcctgcggagcgaagataccgccgtgtactactgcgcccggatctacggcaacaacgtgtacttcgatgtgtggggccagggcacaaccgtgacagtctcttctacgcgtatccagaaccctgatcctgccgtgtaccagctgcgggatagcaagagcagcgacaagagcgtgtgtctgttcaccgacttcgacagccagaccaacgtgtcccagagcaaggactccgacgtgtacatcaccgataagtgcgtgctggacatgcggagcatggacttcaagagcaactccgccgtggcctggtccaacaagtccgatttcgcctgcgccaacgccttcaacaacagcattatccccgaggacacattcttcccaagccccgagagcagctgcgacgtgaagctggtggaaaagagcttcgagacagacaccaacctgaacttccagatcctgtacgagatcctgctgggcaaggccaccctgtacgccgtgctggtgtctgccctggtgctgatggctatggtcaagcggaaggacagccgggga

SEQ ID NO: 5124 - DNA, 1878 bp, synthetic construct
  source 1..1878: mol_type = other DNA
atggccttaccagtgaccgccttgctcctgccgctggccttgctgctccacgccgccaggccgcagctggtgctgacacagtctccaagcgcctctgccagcctgggatctagcgtgaagctgacctgtacactgagcagcggccacaagaccgacaccatcgactggtatcagcagcagcctggcaaggcccctagatacctgatgaagctggaaggcagcggcagctacaacaaaggctctggcgtgcccgatagattcagcggcagttcttctggcgctgattggtatctgaccatcagcagcctccagagcgaggacgaggccgattactactgcggcacagactaccccggcaactacctgtttggcggcggaacacagctgacagtgcttggcctcgaggacctgaagaacgtgttcccacctgaggtggccgtgttcgagcctagcgaggccgagatcagccacacccagaaagccaccctcgtgtgcctggctaccggcttctaccccgaccatgtggaactgtcttggtgggtcaacggcaaagaggtgcacagcggcgtgtgtaccgacccccagccactgaaagaacagcccgccctgaacgacagccggtactgcctgagcagcagactgagagtgtccgccaccttctggcagaacccccggaaccacttcagatgccaggtgcagttctacggcctgagcgagaacgacgagtggacccaggacagagccaagcccgtgacccagatcgtgtctgccgaagcctggggcagagccgattgcggctttaccagcgagagctaccagcagggcgtgctgagcgccaccaacctgagcgtgatcggcttcagaatcctgctgctgaaagtggccggctttaacctgctgatgaccctgcggctgtggtccagcagggccaagcgatctggatctggagcaacaaacttctcactactcaaacaagcaggtgacgtggaggagaatcccgggcctactagtatggactggatttggcgcatccttttccttgtcggcgctgctaccggcgcgcattccttcgaacaagaacagctggttgaaagcggcggaggactggttcaacctggcggttctctgagactgagctgtgccgccagcggcttcaccttcagcgactactacatgagctggatcagacaggccccaggcaaaggactggaatgggtcgccacaatctaccccagcagcggcaagacctactacgccgattctgccaagggcagactgaccatctccagcgacaacgccaaggacagcctgtacctccagatgaacagcctgagagccgaggacaccgccgtgtactactgcaccagagatagctacgccgacgacgccgctctgtttgacatttggggccagggcaccaccgtgaccgtttcttctacgcgtatccagaaccctgatcctgccgtgtaccagctgcgggatagcaagagcagcgacaagagcgtgtgtctgttcaccgacttcgacagccagaccaacgtgtcccagagcaaggactccgacgtgtacatcaccgataagtgcgtgctggacatgcggagcatggacttcaagagcaactccgccgtggcctggtccaacaagtccgatttcgcctgcgccaacgccttcaacaacagcattatccccgaggacacattcttcccaagccccgagagcagctgcgacgtgaagctggtggaaaagagcttcgagacagacaccaacctgaacttccagatcctgtacgagatcctgctgggcaaggccaccctgtacgccgtgctggtgtctgccctggtgctgatggctatggtcaagcggaaggacagccgggga

SEQ ID NO: 5125 - DNA, 1854 bp, synthetic construct; identical to SEQ ID NO: 5121
  source 1..1854: mol_type = other DNA

SEQ ID NO: 5126 - DNA, 1875 bp, synthetic construct; identical to SEQ ID NO: 5122
  source 1..1875: mol_type = other DNA

SEQ ID NO: 5127 - DNA, 1854 bp, synthetic construct; identical to SEQ ID NO: 5123
  source 1..1854: mol_type = other DNA

SEQ ID NO: 5128 - DNA, 1878 bp, synthetic construct; identical to SEQ ID NO: 5124
  source 1..1878: mol_type = other DNA

SEQ ID NO: 5129 - DNA, 1875 bp, synthetic construct
  source 1..1875: mol_type = other DNA
atggccttaccagtgaccgccttgctcctgccgctggccttgctgctccacgccgccaggccggatatccagctcactcaaagcccctctagtctctctgcctcagtgggggatcgggtcagttttacttgtcaagcttcacaggatatcaacaacttccttaattggtatcagcagaagccaggaaaagcacccaagctgctcatctatgatgcctcaaatttggagacgggtgttcccagtcgattctctgggtcagggtccgggaccgactttacgtttacgatctcctctctgcagcccgaagacatcgccacatactattgtcaacagtacggcaacttgcctttcacatttgggggcgggactaaggttgaaatcaagaggctcgaggacctgaagaacgtgttcccacctgaggtggccgtgttcgagcctagcgaggccgagatcagccacacccagaaagccaccctcgtgtgcctggctaccggcttctaccccgaccatgtggaactgtcttggtgggtcaacggcaaagaggtgcacagcggcgtgtgtaccgacccccagccactgaaagaacagcccgccctgaacgacagccggtactgcctgagcagcagactgagagtgtccgccaccttctggcagaacccccggaaccacttcagatgccaggtgcagttctacggcctgagcgagaacgacgagtggacccaggacagagccaagcccgtgacccagatcgtgtctgccgaagcctggggcagagccgattgcggctttaccagcgagagctaccagcagggcgtgctgagcgccaccaacctgagcgtgatcggcttcagaatcctgctgctgaaagtggccggctttaacctgctgatgaccctgcggctgtggtccagcagggccaagcgatctggatctggagcaacaaacttctcactactcaaacaagcaggtgacgtggaggagaatcccgggcctactagtatggactggatttggcgcatccttttccttgtcggcgctgctaccggcgcgcattccttcgaacaggtacagctgcaggaatctgggcccggacttgtcaagccaagtcagacactttctcttacatgtaccgtgagcggcggaagtataagcagtggaggcttttactggtcttggatacggcagcacccaggcaaaggcttggagtggattggatacattcatcattcaggatctacacactataatccatcccttaagtcccgggtcaccattagcattgatacgtctaagaatctgttcagtctcaggctgtcctccgtcactgctgccgacacagccgtgtactactgcgcctccttggtttactgcggaggcgactgttatagcggctttgattattgggggcaggggaccctcgtaaccgtgagctctacgcgtatccagaaccctgatcctgccgtgtaccagctgcgggatagcaagagcagcgacaagagcgtgtgtctgttcaccgacttcgacagccagaccaacgtgtcccagagcaaggactccgacgtgtacatcaccgataagtgcgtgctggacatgcggagcatggacttcaagagcaactccgccgtggcctggtccaacaagtccgatttcgcctgcgccaacgccttcaacaacagcattatccccgaggacacattcttcccaagccccgagagcagctgcgacgtgaagctggtggaaaagagcttcgagacagacaccaacctgaacttccagatcctgtacgagatcctgctgggcaaggccaccctgtacgccgtgctggtgtctgccctggtgctgatggctatggtcaagcggaaggacagccgggga

SEQ ID NO: 5130 - DNA, 1863 bp, synthetic construct
  source 1..1863: mol_type = other DNA
atggccttaccagtgaccgccttgctcctgccgctggccttgctgctccacgccgccaggccggacattcagatgacacagagccctagcagcctgagcgcctctgtgggagacagagtgaccatcacatgcaagagcagccagagcgtgctgtactccagcaatcagaagaactacctggcctggttccagcagaagcctggcaaggctcctaagctgctgatctactgggccagcaccagagaaagcggcgtgccaagcagattttctggcagcggctctggcaccgacttcaccctgacaatatccagcctccagcctgaggacttcgccacctacttttgccaccagtacctgagcagctacacattcggacagggcaccaaggtggaaatcaagcggctcgaggacctgaagaacgtgttcccacctgaggtggccgtgttcgagcctagcgaggccgagatcagccacacccagaaagccaccctcgtgtgcctggctaccggcttctaccccgaccatgtggaactgtcttggtgggtcaacggcaaagaggtgcacagcggcgtgtgtaccgacccccagccactgaaagaacagcccgccctgaacgacagccggtactgcctgagcagcagactgagagtgtccgccaccttctggcagaacccccggaaccacttcagatgccaggtgcagttctacggcctgagcgagaacgacgagtggacccaggacagagccaagcccgtgacccagatcgtgtctgccgaagcctggggcagagccgattgcggctttaccagcgagagctaccagcagggcgtgctgagcgccaccaacctgagcgtgatcggcttcagaatcctgctgctgaaagtggccggctttaacctgctgatgaccctgcggctgtggtccagcagggccaagcgatctggatctggagcaacaaacttctcactactcaaacaagcaggtgacgtggaggagaatcccgggcctactagtatggactggatttggcgcatccttttccttgtcggcgctgctaccggcgcgcattccttcgaagaggtgcagctggttgaatctggcggaggactggttcagcctggcggatctctgagactgtcttgtgccgccagcggctacaccttcaccacctattggatgcactgggtccgacaggcccctggcaaaggacttgagtgggtcggatatatcaggcccagcaccggctacacagagtacaaccagaagttcaaggaccgcttcaccatcagcgccgacaccagcaagaataccgcctacctccagatgaacagcctgagagccgaggacaccgccgtgtactactgtgccagatccagatggctgctggactattggggccagggcacactggttacagtttctacgcgtatccagaaccctgatcctgccgtgtaccagctgcgggatagcaagagcagcgacaagagcgtgtgtctgttcaccgacttcgacagccagaccaacgtgtcccagagcaaggactccgacgtgtacatcaccgataagtgcgtgctggacatgcggagcatggacttcaagagcaactccgccgtggcctggtccaacaagtccgatttcgcctgcgccaacgccttcaacaacagcattatccccgaggacacattcttcccaagccccgagagcagctgcgacgtgaagctggtggaaaagagcttcgagacagacaccaacctgaacttccagatcctgtacgagatcctgctgggcaaggccaccctgtacgccgtgctggtgtctgccctggtgctgatggctatggtcaagcggaaggacagccgggga

SEQ ID NO: 5131 - DNA, 1854 bp, synthetic construct
  source 1..1854: mol_type = other DNA
atggccttaccagtgaccgccttgctcctgccgctggccttgctgctccacgccgccaggccggacatccagatgacacagagccctagcagcctgtctgccagcgtgggagacagagtgaccatcacctgtagagccagccaggacatcagcaactacctgaactggtatcagcagaagcccggcaaggcccctaagctgctgatctactacaccagcagactgcacagcggcgtgcccagcagattttctggctctggcagcggcaccgacttcaccctgacaatatctagcctccagcctgaggacttcgccacctactattgccagcagggcaacaccctgccttacacatttggacagggcaccaaggtggaaatcaagagactcgaggacctgaagaacgtgttcccacctgaggtggccgtgttcgagcctagcgaggccgagatcagccacacccagaaagccaccctcgtgtgcctggctaccggcttctaccccgaccatgtggaactgtcttggtgggtcaacggcaaagaggtgcacagcggcgtgtgtaccgacccccagccactgaaagaacagcccgccctgaacgacagccggtactgcctgagcagcagactgagagtgtccgccaccttctggcagaacccccggaaccacttcagatgccaggtgcagttctacggcctgagcgagaacgacgagtggacccaggacagagccaagcccgtgacccagatcgtgtctgccgaagcctggggcagagccgattgcggctttaccagcgagagctaccagcagggcgtgctgagcgccaccaacctgagcgtgatcggcttcagaatcctgctgctgaaagtggccggctttaacctgctgatgaccctgcggctgtggtccagcagggccaagcgatctggatctggagcaacaaacttctcactactcaaacaagcaggtgacgtggaggagaatcccgggcctactagtatggactggatttggcgcatccttttccttgtcggcgctgctaccggcgcgcattccttcgaagaagtgcagctggttgaatcaggtggcggcctggttcaacctggcggatctctgagactgagctgtgccgccagcggcttcaccttcagcgactactttatgagctgggtccgacaggcccctggcaaaggacttgaatgggtcgccaccatcagcaatggcggcacctacacttactaccccgacagcgtgaagggcagattcaccatctccagagacaacagcaagaacaccctgtacctccagatgaactccctgagagccgaggacaccgccgtgtactactgcgccagattcgacggctacatcttcgactattggggccagggcaccctggtcacagtctcttctacgcgtatccagaaccctgatcctgccgtgtaccagctgcgggatagcaagagcagcgacaagagcgtgtgtctgttcaccgacttcgacagccagaccaacgtgtcccagagcaaggactccgacgtgtacatcaccgataagtgcgtgctggacatgcggagcatggacttcaagagcaactccgccgtggcctggtccaacaagtccgatttcgcctgcgccaacgccttcaacaacagcattatccccgaggacacattcttcccaagccccgagagcagctgcgacgtgaagctggtggaaaagagcttcgagacagacaccaacctgaacttccagatcctgtacgagatcctgctgggcaaggccaccctgtacgccgtgctggtgtctgccctggtgctgatggctatggtcaagcggaaggacagccgggga

SEQ ID NO: 5132 - DNA, 1869 bp, synthetic construct
  source 1..1869: mol_type = other DNA
atggccttaccagtgaccgccttgctcctgccgctggccttgctgctccacgccgccaggccggacatccagatgacacagactacatcctccctgtctgcctctctgggagacagagtcaccatcagttgcagggcaagtcaggacattagtaagtacctgaactggtatcagcagaaaccagatggaactgttaaactcctgatctaccatacatcaagattacactcaggagtcccatcaaggttcagtggcagtgggtctggaacagattattctctcaccattagcaacctggagcaagaagatattgccacttacttttgccaacagggtaatacgcttccgtacacgttcggaggggggaccaagctggagatcacactcgagatccagaaccctgatcctgccgtgtaccagctgcgggatagcaagagcagcgacaagagcgtgtgtctgttcaccgacttcgacagccagaccaacgtgtcccagagcaaggactccgacgtgtacatcaccgataagtgcgtgctggacatgcggagcatggacttcaagagcaactccgccgtggcctggtccaacaagtccgatttcgcctgcgccaacgccttcaacaacagcattatccccgaggacacattcttcccaagccccgagagcagctgcgacgtgaagctggtggaaaagagcttcgagacagacaccaacctgaacttccagatcctgtacgagatcctgctgggcaaggccaccctgtacgccgtgctggtgtctgccctggtgctgatggctatggtcaagcggaaggacagccggggacgcgccaagagaagcggatctggcgtgaagcagaccctgaatttcgacctgctgaagctggctggcgacgtggaatccaacccaggccctactagtatggactggatttggcgcatccttttccttgtcggcgctgctaccggcgcgcattccttcgaagtgaaactgcaggagtcaggacctggcctggtggcgccctcacagagcctgtccgtcacatgcactgtctcaggggtctcattacccgactatggtgtaagctggattcgccagcctccacgaaagggtctggagtggctgggagtaatatggggtagtgaaaccacatactataattcagctctcaaatccagactgaccatcatcaaggacaactccaagagccaagttttcttaaaaatgaacagtctgcaaactgatgacacagccatttactactgtgccaaacattattactacggtggtagctatgctatggactactggggccaaggaacctcagtcaccgtctcctcaacgcgtgaggacctgaagaacgtgttcccacctgaggtggccgtgttcgagcctagcgaggccgagatcagccacacccagaaagccaccctcgtgtgcctggctaccggcttctaccccgaccatgtggaactgtcttggtgggtcaacggcaaagaggtgcacagcggcgtgtgtaccgacccccagccactgaaagaacagcccgccctgaacgacagccggtactgcctgagcagcagactgagagtgtccgccaccttctggcagaacccccggaaccacttcagatgccaggtgcagttctacggcctgagcgagaacgacgagtggacccaggacagagccaagcccgtgacccagatcgtgtctgccgaagcctggggcagagccgattgcggctttaccagcgagagctaccagcagggcgtgctgagcgccaccaacctgagcgtgatcggcttcagaatcctgctgctgaaagtggccggctttaacctgctgatgaccctgcggctgtggtccagc

SEQ ID NO: 5133 - DNA, 1872 bp, synthetic construct
  source 1..1872: mol_type = other DNA
atggccttaccagtgaccgccttgctcctgccgctggccttgctgctccacgccgccaggccggagatcgtgatgacccagagccctgccaccctgtctctgagccctggcgaaagagccaccctgagctgtagagccagccaggacatcagcaagtacctgaactggtatcagcagaagcccggccaggcccccagactgctgatctaccacaccagcagactgcacagcggcatccccgccagattttctggctctggcagcggcaccgactacaccctgacaatcagcagcctccagcccgaggacttcgccgtgtacttctgtcagcaaggcaacaccctgccctacaccttcggccagggcaccaagctggaaatcaagctcgagatccagaaccctgatcctgccgtgtaccagctgcgggatagcaagagcagcgacaagagcgtgtgtctgttcaccgacttcgacagccagaccaacgtgtcccagagcaaggactccgacgtgtacatcaccgataagtgcgtgctggacatgcggagcatggacttcaagagcaactccgccgtggcctggtccaacaagtccgatttcgcctgcgccaacgccttcaacaacagcattatccccgaggacacattcttcccaagccccgagagcagctgcgacgtgaagctggtggaaaagagcttcgagacagacaccaacctgaacttccagatcctgtacgagatcctgctgggcaaggccaccctgtacgccgtgctggtgtctgccctggtgctgatggctatggtcaagcggaaggacagccggggacgcgccaagagaagcggatctggcgtgaagcagaccctgaatttcgacctgctgaagctggctggcgacgtggaatccaacccaggccctactagtatggactggatttggcgcatccttttccttgtcggcgctgctaccggcgcgcattccttcgaacaggtgcaactccaggaatctggccctggcctcgtgaagcccagcgagacactgagcctgacctgtaccgtgtccggcgtgtccctgcctgactatggcgtgtcctggatcagacagccccctggcaagggcctggaatggatcggagtgatttggggcagcgaaaccacctactacaacagctccctgaagtccagagtgaccatctccaaggacaactccaagaaccaggtgtccctgaagctgagcagcgtgacagccgccgacaccgccgtgtattactgcgccaagcactactactacggcggcagctacgctatggactactggggccagggaaccctcgtgaccgtgtctagtacgcgtgaggacctgaagaacgtgttcccacctgaggtggccgtgttcgagcctagcgaggccgagatcagccacacccagaaagccaccctcgtgtgcctggctaccggcttctaccccgaccatgtggaactgtcttggtgggtcaacggcaaagaggtgcacagcggcgtgtgtaccgacccccagccactgaaagaacagcccgccctgaacgacagccggtactgcctgagcagcagactgagagtgtccgccaccttctggcagaacccccggaaccacttcagatgccaggtgcagttctacggcctgagcgagaacgacgagtggacccaggacagagccaagcccgtgacccagatcgtgtctgccgaagcctggggcagagccgattgcggctttaccagcgagagctaccagcagggcgtgctgagcgccaccaacctgagcgtgatcggcttcagaatcctgctgctgaaagtggccggctttaacctgctgatgaccctgcggctgtggtccagc

SEQ ID NO: 5134 - DNA, 1875 bp, synthetic construct
  source 1..1875: mol_type = other DNA
atggccttaccagtgaccgccttgctcctgccgctggccttgctgctccacgccgccaggccggacgagatcgtgctgacacagagccccgccaccctgtcactgtctccaggcgaaagagccaccctgagctgtagcgccagcagcagcgtgtcctacatgcactggtatcagcagaagcccggccaggcccccagactgctgatctacgataccagcaagctggcctccggcatccccgccagattttctggcagcggctccggcaccgacttcaccctgacaatcagcagcctggaacccgaggacgtggccgtgtactactgttttcaaggcagcgtgtaccccttcaccttcggccagggcaccaagctggaaatcaagagactcgagatccagaaccctgatcctgccgtgtaccagctgcgggatagcaagagcagcgacaagagcgtgtgtctgttcaccgacttcgacagccagaccaacgtgtcccagagcaaggactccgacgtgtacatcaccgataagtgcgtgctggacatgcggagcatggacttcaagagcaactccgccgtggcctggtccaacaagtccgatttcgcctgcgccaacgccttcaacaacagcattatccccgaggacacattcttcccaagccccgagagcagctgcgacgtgaagctggtggaaaagagcttcgagacagacaccaacctgaacttccagatcctgtacgagatcctgctgggcaaggccaccctgtacgccgtgctggtgtctgccctggtgctgatggctatggtcaagcggaaggacagccggggacgcgccaagagaagcggatctggcgtgaagcagaccctgaatttcgacctgctgaagctggctggcgacgtggaatccaacccaggccctactagtatggactggatttggcgcatccttttccttgtcggcgctgctaccggcgcgcattccttcgaacaggtgcagctccaggaatctggccctggcctcgtgaagcctagccagaccctgagcctgacctgtaccgtgtctggcggcagcatcagcacaagcggcatgggcgtgggctggatcagacagcaccctggcaagggcctggaatggatcggccacatttggtgggacgacgacaagcggtacaaccccgccctgaagtccagagtgaccatcagcgtggacaccagcaagaaccagttcagcctgaagctgagcagcgtgacagccgccgataccgccgtgtattattgcgcccggatggaactgtggtcctactacttcgactactggggccagggaaccctcgtgaccgtgtctagtacgcgtgaggacctgaagaacgtgttcccacctgaggtggccgtgttcgagcctagcgaggccgagatcagccacacccagaaagccaccctcgtgtgcctggctaccggcttctaccccgaccatgtggaactgtcttggtgggtcaacggcaaagaggtgcacagcggcgtgtgtaccgacccccagccactgaaagaacagcccgccctgaacgacagccggtactgcctgagcagcagactgagagtgtccgccaccttctggcagaacccccggaaccacttcagatgccaggtgcagttctacggcctgagcgagaacgacgagtggacccaggacagagccaagcccgtgacccagatcgtgtctgccgaagcctggggcagagccgattgcggctttaccagcgagagctaccagcagggcgtgctgagcgccaccaacctgagcgtgatcggcttcagaatcctgctgctgaaagtggccggctttaacctgctgatgaccctgcggctgtggtccagc

SEQ ID NO: 5135 - DNA, 1869 bp, synthetic construct
  source 1..1869: mol_type = other DNA
atggccttaccagtgaccgccttgctcctgccgctggccttgctgctccacgccgccaggccggactacatccacgtgacacagagccctagcagcctgtccgtgtccatcggcgatagagtgaccatcaactgccagacctctcaaggcgtgggcagcgacctgcactggtatcagcacaaacctggcagagcccctaagctgctgatccaccatgccagctctgtggaagatggcgtgcccagcagattttccggcaccggatttcacaccagcttcaacctgacaatcaacgacctccaggccgacgacatcggcacctactactgtcaagtgctccagagcttcggcagaggcagcagactggatacaaaactcgagatccagaaccctgatcctgccgtgtaccagctgcgggatagcaagagcagcgacaagagcgtgtgtctgttcaccgacttcgacagccagaccaacgtgtcccagagcaaggactccgacgtgtacatcaccgataagtgcgtgctggacatgcggagcatggacttcaagagcaactccgccgtggcctggtccaacaagtccgatttcgcctgcgccaacgccttcaacaacagcattatccccgaggacacattcttcccaagccccgagagcagctgcgacgtgaagctggtggaaaagagcttcgagacagacaccaacctgaacttccagatcctgtacgagatcctgctgggcaaggccaccctgtacgccgtgctggtgtctgccctggtgctgatggctatggtcaagcggaaggacagccggggacgcgccaagagaagcggatctggcgtgaagcagaccctgaatttcgacctgctgaagctggctggcgacgtggaatccaacccaggccctactagtatggactggatttggcgcatccttttccttgtcggcgctgctaccggcgcgcattccttcgaaagggcacacctggtgcagtctggcaccgccatgaagaaacctggcgcttccgtcagagtgtcctgtcagacaagcggctacaccttcacagcccacatcctgttctggttcagacaggccccaggcagaggactggaatgggtcggatggatcaagccccagtacggggccgtgaatttcggcggaggcttcagagacagagtgaccctgaccagggacgtgtaccgggaaatcgcctacatggacatccggggcctgaagcctgatgacaccgccgtgtactactgcgccagggatagaagctacggcgacagctcttgggctctcgatgcttggggacagggcacaacagtggtggtgtctgctacgcgtgaggacctgaagaacgtgttcccacctgaggtggccgtgttcgagcctagcgaggccgagatcagccacacccagaaagccaccctcgtgtgcctggctaccggcttctaccccgaccatgtggaactgtcttggtgggtcaacggcaaagaggtgcacagcggcgtgtgtaccgacccccagccactgaaagaacagcccgccctgaacgacagccggtactgcctgagcagcagactgagagtgtccgccaccttctggcagaacccccggaaccacttcagatgccaggtgcagttctacggcctgagcgagaacgacgagtggacccaggacagagccaagcccgtgacccagatcgtgtctgccgaagcctggggcagagccgattgcggctttaccagcgagagctaccagcagggcgtgctgagcgccaccaacctgagcgtgatcggcttcagaatcctgctgctgaaagtggccggctttaacctgctgatgaccctgcggctgtggtccagc

SEQ ID NO: 5136 - DNA, 1899 bp, synthetic construct
  source 1..1899: mol_type = other DNA
atggccttaccagtgaccgccttgctcctgccgctggccttgctgctccacgccgccaggccggacgtgcagatgatccagacccccgatagcctggccgtgtccctgggacagagagccaccatctcttgcagagccagcgagagcgtggacaactacggcatcagcttcatgcactggtatcagcagaagcccggccagagccccaagctgctgatctacagagcctccaacctggaaagcggcatccccgccagattttccggcagcggcagcagaaccgacttcaccctgaccatcaaccccgtggaaaccgacgacgtggcaacctactactgccagcagaacaacaaggacccccccacctttggcggaggcaccaagctggaaatcaagctcgagatccagaaccctgatcctgccgtgtaccagctgcgggatagcaagagcagcgacaagagcgtgtgtctgttcaccgacttcgacagccagaccaacgtgtcccagagcaaggactccgacgtgtacatcaccgataagtgcgtgctggacatgcggagcatggacttcaagagcaactccgccgtggcctggtccaacaagtccgatttcgcctgcgccaacgccttcaacaacagcattatccccgaggacacattcttcccaagccccgagagcagctgcgacgtgaagctggtggaaaagagcttcgagacagacaccaacctgaacttccagatcctgtacgagatcctgctgggcaaggccaccctgtacgccgtgctggtgtctgccctggtgctgatggctatggtcaagcggaaggacagccggggacgcgccaagagaagcggatctggcgtgaagcagaccctgaatttcgacctgctgaagctggctggcgacgtggaatccaacccaggccctactagtatggactggatttggcgcatccttttccttgtcggcgctgctaccggcgcgcattccttcgaagggggaggcggctctcaggtgcaactccagcagtctggcgctgagcttgtgaagcctggggccagcgtgaagattagctgcaaggccagcggctacgccttcagcagctactggatgaactgggtcaagcagcggcctggcaagggcctggaatggatcggccaaatctaccccggcgacggcgacaccacctacaacggcaagttcaagggcaaggccaccctgacagccgacaagagcagcagcaccgtgtacatgcaactgaacagcctgaccagcgaggacagcgccgtgtacttctgcgtgcggtactactacggcagctccggctacttcgactattggggccagggcaccacactgaccgtgtcctctacgcgtgaggacctgaagaacgtgttcccacctgaggtggccgtgttcgagcctagcgaggccgagatcagccacacccagaaagccaccctcgtgtgcctggctaccggcttctaccccgaccatgtggaactgtcttggtgggtcaacggcaaagaggtgcacagcggcgtgtgtaccgacccccagccactgaaagaacagcccgccctgaacgacagccggtactgcctgagcagcagactgagagtgtccgccaccttctggcagaacccccggaaccacttcagatgccaggtgcagttctacggcctgagcgagaacgacgagtggacccaggacagagccaagcccgtgacccagatcgtgtctgccgaagcctggggcagagccgattgcggctttaccagcgagagctaccagcagggcgtgctgagcgccaccaacctgagcgtgatcggcttcagaatcctgctgctgaaagtggccggctttaacctgctgatgaccctgcggctgtggtccagc

SEQ ID NO: 5137 - DNA, 1872 bp, synthetic construct
  source 1..1872: mol_type = other DNA
atggccttaccagtgaccgccttgctcctgccgctggccttgctgctccacgccgccaggccggacgtgcagatgatccagacccccagcagcctgtctgccagcctgggcgatagagtgaccatcagctgtcgggccagccaggacatcggcaactacctgaactggtatcagcagaaacccgacggcaccgtgaagctgctgatctactacaccagcagactgcacagcggcgtgcccagcagattttctggcagcggctctggcaccgagtacagcctgaccatctccaacctggaacaggaagatattgctacctacttctgtcagcaaggcagcgccctgccccctacatttggcggcggaacaaagctggaaatcaacctcgagatccagaaccctgatcctgccgtgtaccagctgcgggatagcaagagcagcgacaagagcgtgtgtctgttcaccgacttcgacagccagaccaacgtgtcccagagcaaggactccgacgtgtacatcaccgataagtgcgtgctggacatgcggagcatggacttcaagagcaactccgccgtggcctggtccaacaagtccgatttcgcctgcgccaacgccttcaacaacagcattatccccgaggacacattcttcccaagccccgagagcagctgcgacgtgaagctggtggaaaagagcttcgagacagacaccaacctgaacttccagatcctgtacgagatcctgctgggcaaggccaccctgtacgccgtgctggtgtctgccctggtgctgatggctatggtcaagcggaaggacagccggggacgcgccaagagaagcggatctggcgtgaagcagaccctgaatttcgacctgctgaagctggctggcgacgtggaatccaacccaggccctactagtatggactggatttggcgcatccttttccttgtcggcgctgctaccggcgcgcattccttcgaagctctccagctccagcagtctggcgcagaactcgtgcggcctggcgcttctgtgaccctgagctgtaaagccagcggctacaccttcaccgactacgagatgcactgggtcaagcagacccctgtgcacggcctggaatggatcggagccatcgaccctgagacaggcggcaccgcctacaaccagaagttcgagggcaaggccatcctgaccgccgacaagagcagcagcacagcctacatggaactgcggagcctgacctccgaggacagccccgtgtactactgtgccagacggcggtactacggcagcagctccttcgactattggggccagggcaccaccctgaccgtgtctagtacgcgtgaggacctgaagaacgtgttcccacctgaggtggccgtgttcgagcctagcgaggccgagatcagccacacccagaaagccaccctcgtgtgcctggctaccggcttctaccccgaccatgtggaactgtcttggtgggtcaacggcaaagaggtgcacagcggcgtgtgtaccgacccccagccactgaaagaacagcccgccctgaacgacagccggtactgcctgagcagcagactgagagtgtccgccaccttctggcagaacccccggaaccacttcagatgccaggtgcagttctacggcctgagcgagaacgacgagtggacccaggacagagccaagcccgtgacccagatcgtgtctgccgaagcctggggcagagccgattgcggctttaccagcgagagctaccagcagggcgtgctgagcgccaccaacctgagcgtgatcggcttcagaatcctgctgctgaaagtggccggctttaacctgctgatgaccctgcggctgtggtccagc

SEQ ID NO: 5138 - DNA, 1884 bp, synthetic construct
  source 1..1884: mol_type = other DNA
atggccttaccagtgaccgccttgctcctgccgctggccttgctgctccacgccgccaggccggacatcgtcctgacccagtccccagccagcctggcggtgtccctgggtcaacgagctaccatttcctgcagagcctctaagtccgtatccacttccggctatagttacctgcattggtaccaacagaaaccagggcagccacccaagctgctcatctatctggcctcaaacctggagtccggcgtgcccgccagattctccggaagtgggagcggcaccgactttacattgaacatccacccagtcgaagaggaagatgctgccacttattactgtcagcactccagggagctgccatttacatttggctctggcacaaaactggagatcaaactcgagatccagaaccctgatcctgccgtgtaccagctgcgggatagcaagagcagcgacaagagcgtgtgtctgttcaccgacttcgacagccagaccaacgtgtcccagagcaaggactccgacgtgtacatcaccgataagtgcgtgctggacatgcggagcatggacttcaagagcaactccgccgtggcctggtccaacaagtccgatttcgcctgcgccaacgccttcaacaacagcattatccccgaggacacattcttcccaagccccgagagcagctgcgacgtgaagctggtggaaaagagcttcgagacagacaccaacctgaacttccagatcctgtacgagatcctgctgggcaaggccaccctgtacgccgtgctggtgtctgccctggtgctgatggctatggtcaagcggaaggacagccggggacgcgccaagagaagcggatctggcgtgaagcagaccctgaatttcgacctgctgaagctggctggcgacgtggaatccaacccaggccctactagtatggactggatttggcgcatccttttccttgtcggcgctgctaccggcgcgcattccttcgaacaggttcagctggtcgagtccgggggaggtctggtacagccgggtggcagcctcaagctgtcatgtgccgcatctggttttgactttagcaggtattggatgagctgggtccgccaggccccgggcaagggacttgagtggattggagaaataaaccctacttccagcacaatcaacttcacaccttctttgaaagataaggtttttatctctcgggataacgctaaaaacacactgtacttgcagatgtctaaggtgcgaagcgaagacaccgccctctattattgcgcccggggtaattactaccgctatggggatgcgatggactattgggggcaaggtacctccgtcacggtctcaacgcgtgaggacctgaagaacgtgttcccacctgaggtggccgtgttcgagcctagcgaggccgagatcagccacacccagaaagccaccctcgtgtgcctggctaccggcttctaccccgaccatgtggaactgtcttggtgggtcaacggcaaagaggtgcacagcggcgtgtgtaccgacccccagccactgaaagaacagcccgccctgaacgacagccggtactgcctgagcagcagactgagagtgtccgccaccttctggcagaacccccggaaccacttcagatgccaggtgcagttctacggcctgagcgagaacgacgagtggacccaggacagagccaagcccgtgacccagatcgtgtctgccgaagcctggggcagagccgattgcggctttaccagcgagagctaccagcagggcgtgctgagcgccaccaacctgagcgtgatcggcttcagaatcctgctgctgaaagtggccggctttaacctgctgatgaccctgcggctgtggtccagc

SEQ ID NO: 5139 - DNA, 1878 bp, synthetic construct
  source 1..1878: mol_type = other DNA
atggccttaccagtgaccgccttgctcctgccgctggccttgctgctccacgccgccaggccggacatccagatgacccagagccctagctcactgagcgccagcgtgggcgacagggtgaccattacctgctccgccagccaggacatcagcaactacctgaactggtaccagcagaagcccggcaaggcccccaagctgctgatctactacacctccaacctgcactccggcgtgcccagcaggttcagcggaagcggcagcggcaccgatttcaccctgaccatctccagcctgcagcccgaggacttcgccacctactactgccagcagtacaggaagctcccctggactttcggccagggcaccaaactggagatcaagcgtctcgagatccagaaccctgatcctgccgtgtaccagctgcgggatagcaagagcagcgacaagagcgtgtgtctgttcaccgacttcgacagccagaccaacgtgtcccagagcaaggactccgacgtgtacatcaccgataagtgcgtgctggacatgcggagcatggacttcaagagcaactccgccgtggcctggtccaacaagtccgatttcgcctgcgccaacgccttcaacaacagcattatccccgaggacacattcttcccaagccccgagagcagctgcgacgtgaagctggtggaaaagagcttcgagacagacaccaacctgaacttccagatcctgtacgagatcctgctgggcaaggccaccctgtacgccgtgctggtgtctgccctggtgctgatggctatggtcaagcggaaggacagccggggacgcgccaagagaagcggatctggcgtgaagcagaccctgaatttcgacctgctgaagctggctggcgacgtggaatccaacccaggccctactagtatggactggatttggcgcatccttttccttgtcggcgctgctaccggcgcgcattccttcgaacaggtgcagctggtccagagcggcgccgaagtgaagaagcccggcagctccgtgaaagtgagctgcaaggccagcggcggcaccttcagcaactactggatgcactgggtgaggcaggcccccggacagggcctggagtggatgggcgccacctacaggggccacagcgacacctactacaaccagaagttcaagggccgggtgaccatcaccgccgacaagagcaccagcaccgcctacatggaactgagcagcctcaggagcgaggacaccgctgtgtattactgcgccaggggcgccatctacgacggctacgacgtgctggacaactggggccagggcacactggtgaccgtgtccagcacgcgtgaggacctgaagaacgtgttcccacctgaggtggccgtgttcgagcctagcgaggccgagatcagccacacccagaaagccaccctcgtgtgcctggctaccggcttctaccccgaccatgtggaactgtcttggtgggtcaacggcaaagaggtgcacagcggcgtgtgtaccgacccccagccactgaaagaacagcccgccctgaacgacagccggtactgcctgagcagcagactgagagtgtccgccaccttctggcagaacccccggaaccacttcagatgccaggtgcagttctacggcctgagcgagaacgacgagtggacccaggacagagccaagcccgtgacccagatcgtgtctgccgaagcctggggcagagccgattgcggctttaccagcgagagctaccagcagggcgtgctgagcgccaccaacctgagcgtgatcggcttcagaatcctgctgctgaaagtggccggctttaacctgctgatgaccctgcggctgtggtccagc

SEQ ID NO: 5140 - DNA, 1878 bp, synthetic construct
  source 1..1878: mol_type = other DNA
atggccttaccagtgaccgccttgctcctgccgctggccttgctgctccacgccgccaggccggacatcgtgctgacacagagccctgccaccctgtctctgagccctggcgatagagccaccatcagctgtagagccagcgagagcgtgaccatcctgggcagccacctgatctactggtatcagcagaagcccggccagccccccagactgctgattcagctggcctccaatgtgcagaccggcgtgccagccagattttccggcagcggcagcagaaccgacttcaccctgaccatcagcagcgtggaacccgaggacttcgccgtgtactactgcctccagagccggaccatccccagaacattcggccagggcaccaagctggaaatcaagagactcgagatccagaaccctgatcctgccgtgtaccagctgcgggatagcaagagcagcgacaagagcgtgtgtctgttcaccgacttcgacagccagaccaacgtgtcccagagcaaggactccgacgtgtacatcaccgataagtgcgtgctggacatgcggagcatggacttcaagagcaactccgccgtggcctggtccaacaagtccgatttcgcctgcgccaacgccttcaacaacagcattatccccgaggacacattcttcccaagccccgagagcagctgcgacgtgaagctggtggaaaagagcttcgagacagacaccaacctgaacttccagatcctgtacgagatcctgctgggcaaggccaccctgtacgccgtgctggtgtctgccctggtgctgatggctatggtcaagcggaaggacagccggggacgcgccaagagaagcggatctggcgtgaagcagaccctgaatttcgacctgctgaagctggctggcgacgtggaatccaacccaggccctactagtatggactggatttggcgcatccttttccttgtcggcgctgctaccggcgcgcattccttcgaacaggtgcagctggtgcagtctggccccgaagtgaagaaacccggcgagtccgtgaagatcagctgcaaggccagcggctacaccttccggcactacagcatgaactgggtcaagcaggccccaggccagggcctgaagtggatgggcagaatcaacaccgagagcggcgtgcccatctacgccgacgacttcaagggccggttcagcttcaccgtggacaccagcgccagcaccgcctacctggaaatctccagcctgaccagcgaggataccgccgtgtatttctgctccaacgactacctgtacagcctggatttctggggccagggaaccaccctgacagtgtcctctacgcgtgaggacctgaagaacgtgttcccacctgaggtggccgtgttcgagcctagcgaggccgagatcagccacacccagaaagccaccctcgtgtgcctggctaccggcttctaccccgaccatgtggaactgtcttggtgggtcaacggcaaagaggtgcacagcggcgtgtgtaccgacccccagccactgaaagaacagcccgccctgaacgacagccggtactgcctgagcagcagactgagagtgtccgccaccttctggcagaacccccggaaccacttcagatgccaggtgcagttctacggcctgagcgagaacgacgagtggacccaggacagagccaagcccgtgacccagatcgtgtctgccgaagcctggggcagagccgattgcggctttaccagcgagagctaccagcagggcgtgctgagcgccaccaacctgagcgtgatcggcttcagaatcctgctgctgaaagtggccggctttaacctgctgatgaccctgcggctgtggtccagc

SEQ ID NO: 5141 - DNA, 1881 bp, synthetic construct
  source 1..1881: mol_type = other DNA
atggccttaccagtgaccgccttgctcctgccgctggccttgctgctccacgccgccaggccgcagtctgtgctgacacagcctcctagtgtgtctggcgctcctggacagagagtgaccatcagctgtacaggcagcagcagcaatatcggagccggctttgacgtgcactggtatcagcagctgcctggcacagcccctaaactgctgatctacggcaacagcaacagacccagcggcgtgcccgatagattttccggctctaagagcggcacaagcgccagcctggctattactggactccaggccgaggacgaggccgactactactgtcagagctacgacagcagcctgagcggctacgttttcggcaccggcaccaaagtgacagtgcttggtctcgagatccagaaccctgatcctgccgtgtaccagctgcgggatagcaagagcagcgacaagagcgtgtgtctgttcaccgacttcgacagccagaccaacgtgtcccagagcaaggactccgacgtgtacatcaccgataagtgcgtgctggacatgcggagcatggacttcaagagcaactccgccgtggcctggtccaacaagtccgatttcgcctgcgccaacgccttcaacaacagcattatccccgaggacacattcttcccaagccccgagagcagctgcgacgtgaagctggtggaaaagagcttcgagacagacaccaacctgaacttccagatcctgtacgagatcctgctgggcaaggccaccctgtacgccgtgctggtgtctgccctggtgctgatggctatggtcaagcggaaggacagccggggacgcgccaagagaagcggatctggcgtgaagcagaccctgaatttcgacctgctgaagctggctggcgacgtggaatccaacccaggccctactagtatggactggatttggcgcatccttttccttgtcggcgctgctaccggcgcgcattccttcgaacaagttcagctggttcagagcggagccgaagtgaagaaacctggggcctctgtgaaggtgtcctgcaaggcttccggctacacctttaccgattactacatgcactgggtccgacaggctcccggccaaagacttgaatggatgggctggatcaaccccaacagcggcggcacaaattacgcccagaagttccaggaccggatcaccgtgaccagagacaccagctccaacaccggctacatggaactgacccggctgagatccgatgacaccgccgtgtactactgcgctagaagcccttactccggcgtgctggataagtggggacagggcacactggtcaccgtgtcatctacgcgtgaggacctgaagaacgtgttcccacctgaggtggccgtgttcgagcctagcgaggccgagatcagccacacccagaaagccaccctcgtgtgcctggctaccggcttctaccccgaccatgtggaactgtcttggtgggtcaacggcaaagaggtgcacagcggcgtgtgtaccgacccccagccactgaaagaacagcccgccctgaacgacagccggtactgcctgagcagcagactgagagtgtccgccaccttctggcagaacccccggaaccacttcagatgccaggtgcagttctacggcctgagcgagaacgacgagtggacccaggacagagccaagcccgtgacccagatcgtgtctgccgaagcctggggcagagccgattgcggctttaccagcgagagctaccagcagggcgtgctgagcgccaccaacctgagcgtgatcggcttcagaatcctgctgctgaaagtggccggctttaacctgctgatgaccctgcggctgtggtccagc

SEQ ID NO: 5142 - DNA, 1872 bp, synthetic construct
  source 1..1872: mol_type = other DNA
atggccttaccagtgaccgccttgctcctgccgctggccttgctgctccacgccgccaggccgcaggctgttctgacacagcctccatctgcctctggcacacctggacagagagtgaccatctcctgtagcggcagcagcagcaacatcggcagctacaccgtgtcctggtatcagcagctccctggaacagcccctaagttcctgatctacagcaacaaccagcggcctagcggcgtgcccgatagattttctggcagcaagagcggcacaagcgccagcctggctatttctggactccagtctgaggacgaggccgactactattgtgccgcctgggacgatagcctgaacggctatgtgtttggcaccggcaccaaagtgacagtgcttggtctcgagatccagaaccctgatcctgccgtgtaccagctgcgggatagcaagagcagcgacaagagcgtgtgtctgttcaccgacttcgacagccagaccaacgtgtcccagagcaaggactccgacgtgtacatcaccgataagtgcgtgctggacatgcggagcatggacttcaagagcaactccgccgtggcctggtccaacaagtccgatttcgcctgcgccaacgccttcaacaacagcattatccccgaggacacattcttcccaagccccgagagcagctgcgacgtgaagctggtggaaaagagcttcgagacagacaccaacctgaacttccagatcctgtacgagatcctgctgggcaaggccaccctgtacgccgtgctggtgtctgccctggtgctgatggctatggtcaagcggaaggacagccggggacgcgccaagagaagcggatctggcgtgaagcagaccctgaatttcgacctgctgaagctggctggcgacgtggaatccaacccaggccctactagtatggactggatttggcgcatccttttccttgtcggcgctgctaccggcgcgcattccttcgaagttcaactggttcagagcggagccgaagtgaagaagcctggcgagagcctgaagattagctgcaaaggcagcggctacgacttcaccacctactggatcggctgggtccgacagatgcctggcaaaggactggaatggatgggcatcatctaccccggcgacagcgacaccagatacagccctagcgttagaggccgcgtgaccatcagcgccgacaagtctatcaacaccgcctacctccagtggtccagcctggaagcctctgacaccgccatgtactactgcgccagaatgtggaccttcagccaggatggatggggccagggaacactggtcacagtgtcatctacgcgtgaggacctgaagaacgtgttcccacctgaggtggccgtgttcgagcctagcgaggccgagatcagccacacccagaaagccaccctcgtgtgcctggctaccggcttctaccccgaccatgtggaactgtcttggtgggtcaacggcaaagaggtgcacagcggcgtgtgtaccgacccccagccactgaaagaacagcccgccctgaacgacagccggtactgcctgagcagcagactgagagtgtccgccaccttctggcagaacccccggaaccacttcagatgccaggtgcagttctacggcctgagcgagaacgacgagtggacccaggacagagccaagcccgtgacccagatcgtgtctgccgaagcctggggcagagccgattgcggctttaccagcgagagctaccagcagggcgtgctgagcgccaccaacctgagcgtgatcggcttcagaatcctgctgctgaaagtggccggctttaacctgctgatgaccctgcggctgtggtccagc

SEQ ID NO: 5143 - DNA, 1881 bp, synthetic construct
  source 1..1881: mol_type = other DNA
atggccttaccagtgaccgccttgctcctgccgctggccttgctgctccacgccgccaggccggacatcgtgatgacccagagccccgatagcctggccgtgtctctgggagagagagccaccatcaactgcaagagcagccagagcatcctgtacagcagcaaccagaagaactacctggcctggtatcagcagaagcccggccagagccctaagctgctgatctactgggccagcaccagagaaagcggcgtgcccgatagattcagcggcagcggctctggcaccgacttcaccctgaccatcagttctcttcaggccgaggacgtggccgtgtactactgccaccagtacatcagctcctacaccttcggccagggcaccaagctggaaatcaagctcgagatccagaaccctgatcctgccgtgtaccagctgcgggatagcaagagcagcgacaagagcgtgtgtctgttcaccgacttcgacagccagaccaacgtgtcccagagcaaggactccgacgtgtacatcaccgataagtgcgtgctggacatgcggagcatggacttcaagagcaactccgccgtggcctggtccaacaagtccgatttcgcctgcgccaacgccttcaacaacagcattatccccgaggacacattcttcccaagccccgagagcagctgcgacgtgaagctggtggaaaagagcttcgagacagacaccaacctgaacttccagatcctgtacgagatcctgctgggcaaggccaccctgtacgccgtgctggtgtctgccctggtgctgatggctatggtcaagcggaaggacagccggggacgcgccaagagaagcggatctggcgtgaagcagaccctgaatttcgacctgctgaagctggctggcgacgtggaatccaacccaggccctactagtatggactggatttggcgcatccttttccttgtcggcgctgctaccggcgcgcattccttcgaacaggtgcagctggtgcagtctggcgctgaagtgaagaaacctggggccagcgtgaaggtgtcctgcaaggccagcggctacacctttgccagccagtggatgcactggatgagacaggcccctggacagggcctggaatggatcggctggatcaaccccggcaacgtgaacaccaagtacaacgagaagttcaagggcagagccaccctgacagtggacaccagcaccaacaccgcctacatggaactgagcagcctgcggagcgaggacaccgccgtgtattattgcgccagaagcacctggtacagacccctggattattggggccagggaacccttgtgaccgtgtcctctacgcgtgaggacctgaagaacgtgttcccacctgaggtggccgtgttcgagcctagcgaggccgagatcagccacacccagaaagccaccctcgtgtgcctggctaccggcttctaccccgaccatgtggaactgtcttggtgggtcaacggcaaagaggtgcacagcggcgtgtgtaccgacccccagccactgaaagaacagcccgccctgaacgacagccggtactgcctgagcagcagactgagagtgtccgccaccttctggcagaacccccggaaccacttcagatgccaggtgcagttctacggcctgagcgagaacgacgagtggacccaggacagagccaagcccgtgacccagatcgtgtctgccgaagcctggggcagagccgattgcggctttaccagcgagagctaccagcagggcgtgctgagcgccaccaacctgagcgtgatcggcttcagaatcctgctgctgaaagtggccggctttaacctgctgatgaccctgcggctgtggtccagc

SEQ ID NO: 5144 - DNA, 1881 bp, synthetic construct
  source 1..1881: mol_type = other DNA
atggccttaccagtgaccgccttgctcctgccgctggccttgctgctccacgccgccaggccggaccacatcgtgctgacccagagccctagcagcctgtctgccagcctgggcgacagagtgaccatcagctgtagagccagccaggacatcagcacctacctgaactggtatcagcagaaacccgacggcaccgtgaagctgctgatcttctacaccagcagactgcacgccggggtgcccagcagattttctggcagcggctctggcacccaccacagcctgaccatctccaacctggaacaggaagatattgctacctacttctgtcagcaaggcaacagcctgcccttcaccttcggcagcggcaccaagctggaaatcaagagactcgagatccagaaccctgatcctgccgtgtaccagctgcgggatagcaagagcagcgacaagagcgtgtgtctgttcaccgacttcgacagccagaccaacgtgtcccagagcaaggactccgacgtgtacatcaccgataagtgcgtgctggacatgcggagcatggacttcaagagcaactccgccgtggcctggtccaacaagtccgatttcgcctgcgccaacgccttcaacaacagcattatccccgaggacacattcttcccaagccccgagagcagctgcgacgtgaagctggtggaaaagagcttcgagacagacaccaacctgaacttccagatcctgtacgagatcctgctgggcaaggccaccctgtacgccgtgctggtgtctgccctggtgctgatggctatggtcaagcggaaggacagccggggacgcgccaagagaagcggatctggcgtgaagcagaccctgaatttcgacctgctgaagctggctggcgacgtggaatccaacccaggccctactagtatggactggatttggcgcatccttttccttgtcggcgctgctaccggcgcgcattccttcgaacaggtgcagctgaaagagagcggccctgagctggaaaagcctggggccagcgtgaagattagctgcaaggccagcggctacagcttcaccgcctacagcatgaactgggtcaagcagaacaacggcatgagcctggaatggatcggcagcatcgacccctactacggcgacaccaaatacgcccagaagttcaagggcaaggccaccctgaccgtggataaggccagcagcaccgcctacctccagctgaagtctctgaccagcgaggacagcgccgtgtactactgcgccagacggatgattaccaccggcgactggtacttcgacgtgtggggagccggaaccaccgtgacagtgtctagcacgcgtgaggacctgaagaacgtgttcccacctgaggtggccgtgttcgagcctagcgaggccgagatcagccacacccagaaagccaccctcgtgtgcctggctaccggcttctaccccgaccatgtggaactgtcttggtgggtcaacggcaaagaggtgcacagcggcgtgtgtaccgacccccagccactgaaagaacagcccgccctgaacgacagccggtactgcctgagcagcagactgagagtgtccgccaccttctggcagaacccccggaaccacttcagatgccaggtgcagttctacggcctgagcgagaacgacgagtggacccaggacagagccaagcccgtgacccagatcgtgtctgccgaagcctggggcagagccgattgcggctttaccagcgagagctaccagcagggcgtgctgagcgccaccaacctgagcgtgatcggcttcagaatcctgctgctgaaagtggccggctttaacctgctgatgaccctgcggctgtggtccagc

SEQ ID NO: 5145 - DNA, 1881 bp, synthetic construct; identical to SEQ ID NO: 5144
  source 1..1881: mol_type = other DNA

SEQ ID NO: 5146 - DNA, 1881 bp, synthetic construct
  source 1..1881: mol_type = other DNA
atggccttaccagtgaccgccttgctcctgccgctggccttgctgctccacgccgccaggccggacgagatcgtgctgacacagagccctgccaccctgtctctgagccctggcgaaagagccaccctgagctgtagagccagccagagcgtgtccagctacctggcctggtatcagcagaagcccggccaggctccccggctgctgatctacgatgccagcaatagagccaccggcatccccgccagattttccggctctggcagcggcaccgacttcaccctgaccatcagctccctggaacccgaggacttcgccgtgtactactgccagcagcggagcaactggcccatcacattcggccagggcacccggctggaaatcaaactcgagatccagaaccctgatcctgccgtgtaccagctgcgggatagcaagagcagcgacaagagcgtgtgtctgttcaccgacttcgacagccagaccaacgtgtcccagagcaaggactccgacgtgtacatcaccgataagtgcgtgctggacatgcggagcatggacttcaagagcaactccgccgtggcctggtccaacaagtccgatttcgcctgcgccaacgccttcaacaacagcattatccccgaggacacattcttcccaagccccgagagcagctgcgacgtgaagctggtggaaaagagcttcgagacagacaccaacctgaacttccagatcctgtacgagatcctgctgggcaaggccaccctgtacgccgtgctggtgtctgccctggtgctgatggctatggtcaagcggaaggacagccggggacgcgccaagagaagcggatctggcgtgaagcagaccctgaatttcgacctgctgaagctggctggcgacgtggaatccaacccaggccctactagtatggactggatttggcgcatccttttccttgtcggcgctgctaccggcgcgcattccttcgaagaagtgcagctggtggaatcaggcggcggactggtgcagcctggcagaagcctgagactgagctgtgccgccagcggcttcaccttcaacgactacgccatgcactgggtgcgccaggcccctggaaaaggactggaatgggtgtccacaatcagctggaacagcggcagcatcggctacgccgatagcgtgaagggccggttcaccatcagccgggacaacgccaagaagtccctgtacctccagatgaacagcctgcgggccgaggacacagccctgtactattgcgccaaggacatccagtacggcaactactactacggcatggacgtgtggggccagggaaccaccgtgaccgtgtcatctacgcgtgaggacctgaagaacgtgttcccacctgaggtggccgtgttcgagcctagcgaggccgagatcagccacacccagaaagccaccctcgtgtgcctggctaccggcttctaccccgaccatgtggaactgtcttggtgggtcaacggcaaagaggtgcacagcggcgtgtgtaccgacccccagccactgaaagaacagcccgccctgaacgacagccggtactgcctgagcagcagactgagagtgtccgccaccttctggcagaacccccggaaccacttcagatgccaggtgcagttctacggcctgagcgagaacgacgagtggacccaggacagagccaagcccgtgacccagatcgtgtctgccgaagcctggggcagagccgattgcggctttaccagcgagagctaccagcagggcgtgctgagcgccaccaacctgagcgtgatcggcttcagaatcctgctgctgaaagtggccggctttaacctgctgatgaccctgcggctgtggtccagc

SEQ ID NO: 5147 - DNA, 1887 bp, synthetic construct
  source 1..1887: mol_type = other DNA
atggccttaccagtgaccgccttgctcctgccgctggccttgctgctccacgccgccaggccggacatcgtgatgacccagacccccctgagcctgcctgtgacacctggcgagcctgccagcatctcctgcagaagcagcaagagcctgctgcacagcaacggcatcacctacctgtactggtatctgcagaaacccggccagagcccccaactgctgatctaccagatgagcaacctggtgtccggcgtgcccgacagattttctggcagcggctccggcaccgacttcaccctgaagatcagccgggtggaagccgaggacgtgggcgtgtactactgcgcccagaacctggaactgccctacacctttggcggcggaacaaaggtggaaatcaagcggctcgagatccagaaccctgatcctgccgtgtaccagctgcgggatagcaagagcagcgacaagagcgtgtgtctgttcaccgacttcgacagccagaccaacgtgtcccagagcaaggactccgacgtgtacatcaccgataagtgcgtgctggacatgcggagcatggacttcaagagcaactccgccgtggcctggtccaacaagtccgatttcgcctgcgccaacgccttcaacaacagcattatccccgaggacacattcttcccaagccccgagagcagctgcgacgtgaagctggtggaaaagagcttcgagacagacaccaacctgaacttccagatcctgtacgagatcctgctgggcaaggccaccctgtacgccgtgctggtgtctgccctggtgctgatggctatggtcaagcggaaggacagccggggacgcgccaagagaagcggatctggcgtgaagcagaccctgaatttcgacctgctgaagctggctggcgacgtggaatccaacccaggccctactagtatggactggatttggcgcatccttttccttgtcggcgctgctaccggcgcgcattccttcgaacaggtgcaactggtgcagagcggagccgaagtgaaaaagcccggcagcagcgtgaaggtgtcctgcaaggccagcggctacgccttcagctactcctggatcaactgggtgcgccaggcccctggacagggcctggaatggatgggcagaatcttccccggcgacggcgacaccgactacaacggcaagttcaagggcagagtgaccatcaccgccgacaagagcaccagcaccgcctacatggaactgagcagcctgcggagcgaggataccgccgtgtactattgtgccagaaacgtgttcgacggctactggctggtgtactggggccagggaacacttgtgaccgtgtccagcacgcgtgaggacctgaagaacgtgttcccacctgaggtggccgtgttcgagcctagcgaggccgagatcagccacacccagaaagccaccctcgtgtgcctggctaccggcttctaccccgaccatgtggaactgtcttggtgggtcaacggcaaagaggtgcacagcggcgtgtgtaccgacccccagccactgaaagaacagcccgccctgaacgacagccggtactgcctgagcagcagactgagagtgtccgccaccttctggcagaacccccggaaccacttcagatgccaggtgcagttctacggcctgagcgagaacgacgagtggacccaggacagagccaagcccgtgacccagatcgtgtctgccgaagcctggggcagagccgattgcggctttaccagcgagagctaccagcagggcgtgctgagcgccaccaacctgagcgtgatcggcttcagaatcctgctgctgaaagtggccggctttaacctgctgatgaccctgcggctgtggtccagc

SEQ ID NO: 5148 - DNA, 1890 bp, synthetic construct
  source 1..1890: mol_type = other DNA
atggccttaccagtgaccgccttgctcctgccgctggccttgctgctccacgccgccaggccggacatccagatgacccagagccccagcagcctgtctgccagcgtgggcgacagagtgaccatcacctgtcggagcagccagagcatcgtgcactccgtgggcaacaccttcctggaatggtatcagcagaagcccggcaaggcccccaagctgctgatctacaaggtgtccaacagattcagcggcgtgcccagcaggtttagcggctctggcagcggcaccgacttcaccctgaccatctctagcctccagcccgaggacttcgccacctactactgttttcaaggcagccagttcccctacaccttcggccagggaacaaaggtggaaatcaagcggctcgagatccagaaccctgatcctgccgtgtaccagctgcgggatagcaagagcagcgacaagagcgtgtgtctgttcaccgacttcgacagccagaccaacgtgtcccagagcaaggactccgacgtgtacatcaccgataagtgcgtgctggacatgcggagcatggacttcaagagcaactccgccgtggcctggtccaacaagtccgatttcgcctgcgccaacgccttcaacaacagcattatccccgaggacacattcttcccaagccccgagagcagctgcgacgtgaagctggtggaaaagagcttcgagacagacaccaacctgaacttccagatcctgtacgagatcctgctgggcaaggccaccctgtacgccgtgctggtgtctgccctggtgctgatggctatggtcaagcggaaggacagccggggacgcgccaagagaagcggatctggcgtgaagcagaccctgaatttcgacctgctgaagctggctggcgacgtggaatccaacccaggccctactagtatggactggatttggcgcatccttttccttgtcggcgctgctaccggcgcgcattccttcgaagaagtgcaactggtggaaagcggaggcggcctggtgcagcctggcggatctctgagactgagctgtgccgccagcggctacgagttcagccggtcctggatgaactgggtgcgccaggcccctggcaagggactggaatgggtgggaagaatctaccccggcgacggcgacaccaactacagcggcaagttcaagggccggttcaccatcagcgccgacaccagcaagaacaccgcctacctccagatgaacagcctgcgggccgaggataccgccgtgtactactgtgccagagatggcagctcctgggactggtacttcgacgtgtggggacagggaacccttgtgaccgtgtccagcacgcgtgaggacctgaagaacgtgttcccacctgaggtggccgtgttcgagcctagcgaggccgagatcagccacacccagaaagccaccctcgtgtgcctggctaccggcttctaccccgaccatgtggaactgtcttggtgggtcaacggcaaagaggtgcacagcggcgtgtgtaccgacccccagccactgaaagaacagcccgccctgaacgacagccggtactgcctgagcagcagactgagagtgtccgccaccttctggcagaacccccggaaccacttcagatgccaggtgcagttctacggcctgagcgagaacgacgagtggacccaggacagagccaagcccgtgacccagatcgtgtctgccgaagcctggggcagagccgattgcggctttaccagcgagagctaccagcagggcgtgctgagcgccaccaacctgagcgtgatcggcttcagaatcctgctgctgaaagtggccggctttaacctgctgatgaccctgcggctgtggtccagc

SEQ ID NO: 5149 - DNA, 1884 bp, synthetic construct
  source 1..1884: mol_type = other DNA
atggccttaccagtgaccgccttgctcctgccgctggccttgctgctccacgccgccaggccggacatccagatgacccagagccccagcagcctgtctgccagcgtgggcgacagagtgaccatcacctgtagagccagccagaccatctggtcctacctgaactggtatcagcagaggcccggcaaggcccccaacctgctgatctatgccgccagctctctccagagcggcgtgcccagcagattttccggcagaggcagcggcaccgacttcaccctgaccatcagttccttgcaggccgaggacttcgccacctactactgccagcagagctacagcatcccccagattttcggccagggcaccaagctggaaatcaagctcgagatccagaaccctgatcctgccgtgtaccagctgcgggatagcaagagcagcgacaagagcgtgtgtctgttcaccgacttcgacagccagaccaacgtgtcccagagcaaggactccgacgtgtacatcaccgataagtgcgtgctggacatgcggagcatggacttcaagagcaactccgccgtggcctggtccaacaagtccgatttcgcctgcgccaacgccttcaacaacagcattatccccgaggacacattcttcccaagccccgagagcagctgcgacgtgaagctggtggaaaagagcttcgagacagacaccaacctgaacttccagatcctgtacgagatcctgctgggcaaggccaccctgtacgccgtgctggtgtctgccctggtgctgatggctatggtcaagcggaaggacagccggggacgcgccaagagaagcggatctggcgtgaagcagaccctgaatttcgacctgctgaagctggctggcgacgtggaatccaacccaggccctactagtatggactggatttggcgcatccttttccttgtcggcgctgctaccggcgcgcattccttcgaacaggtgcagctccagcagtctggacccggcctcgtgaagcctagccagacactgagcctgacctgcgccatcagcggcgatagcgtgtccagcaatagcgccgcctggaactggatcagacagtccccctctcggggcctggaatggctgggccggacctactaccgcagcaagtggtacaacgactacgccgtgtccgtgaagtcccggatcaccatcaaccccgacaccagcaagaaccagttctccttgcaactgaacagcgtgacccccgaggacaccgccgtgtactactgcgccagagaagtgaccggcgacctggaagatgccttcgacatctggggccagggaacaatggtcacagtgtccagcacgcgtgaggacctgaagaacgtgttcccacctgaggtggccgtgttcgagcctagcgaggccgagatcagccacacccagaaagccaccctcgtgtgcctggctaccggcttctaccccgaccatgtggaactgtcttggtgggtcaacggcaaagaggtgcacagcggcgtgtgtaccgacccccagccactgaaagaacagcccgccctgaacgacagccggtactgcctgagcagcagactgagagtgtccgccaccttctggcagaacccccggaaccacttcagatgccaggtgcagttctacggcctgagcgagaacgacgagtggacccaggacagagccaagcccgtgacccagatcgtgtctgccgaagcctggggcagagccgattgcggctttaccagcgagagctaccagcagggcgtgctgagcgccaccaacctgagcgtgatcggcttcagaatcctgctgctgaaagtggccggctttaacctgctgatgaccctgcggctgtggtccagc

SEQ ID NO: 5150 - DNA, 1863 bp, synthetic construct
  source 1..1863: mol_type = other DNA
atggccttaccagtgaccgccttgctcctgccgctggccttgctgctccacgccgccaggccggacatccagatgacccagagccccgccaccatcgagaacacaagcctgtctgccagcgtgggcgacagagtgaccatcacctgtagagccagccagggcatcagctcttggctgacctggtatcagcagaagcccgagaaggcccccaagagcctgatctacgccgccagctctctgcagtctggcgtgcccagcagattttccggcagcggctctggcaccgacttcaccctgacaatcagcagcctgcagcccgaggacttcgccacctactactgccagcagtacgacagctaccccatcaccttcggccagggcacccggctggaaatcaagctcgagatccagaaccctgatcctgccgtgtaccagctgcgggatagcaagagcagcgacaagagcgtgtgtctgttcaccgacttcgacagccagaccaacgtgtcccagagcaaggactccgacgtgtacatcaccgataagtgcgtgctggacatgcggagcatggacttcaagagcaactccgccgtggcctggtccaacaagtccgatttcgcctgcgccaacgccttcaacaacagcattatccccgaggacacattcttcccaagccccgagagcagctgcgacgtgaagctggtggaaaagagcttcgagacagacaccaacctgaacttccagatcctgtacgagatcctgctgggcaaggccaccctgtacgccgtgctggtgtctgccctggtgctgatggctatggtcaagcggaaggacagccggggacgcgccaagagaagcggatctggcgtgaagcagaccctgaatttcgacctgctgaagctggctggcgacgtggaatccaacccaggccctactagtatggactggatttggcgcatccttttccttgtcggcgctgctaccggcgcgcattccttcgaacaggtgcaactgcagcagtggggagccggactgctgaagcctagcgagacactgagcctgacctgcgccgtgtacggcggcagcttcagcgcctactattggagctggatcagacagccccctggcaagggcctggaatggatcggcgacatcaatcacggcggaggcaccaactacaaccccagcctgaagtcccgcgtgaccatctccgtggacaccagcaagaaccagttctccctgaagctgaacagcgtgacagccgccgacacagccgtgtactactgtgccagcctgaccgcctattggggccagggatctcttgtgaccgtgtccagcacgcgtgaggacctgaagaacgtgttcccacctgaggtggccgtgttcgagcctagcgaggccgagatcagccacacccagaaagccaccctcgtgtgcctggctaccggcttctaccccgaccatgtggaactgtcttggtgggtcaacggcaaagaggtgcacagcggcgtgtgtaccgacccccagccactgaaagaacagcccgccctgaacgacagccggtactgcctgagcagcagactgagagtgtccgccaccttctggcagaacccccggaaccacttcagatgccaggtgcagttctacggcctgagcgagaacgacgagtggacccaggacagagccaagcccgtgacccagatcgtgtctgccgaagcctggggcagagccgattgcggctttaccagcgagagctaccagcagggcgtgctgagcgccaccaacctgagcgtgatcggcttcagaatcctgctgctgaaagtggccggctttaacctgctgatgaccctgcggctgtggtccagc

SEQ ID NO: 5151 - DNA, 1878 bp, synthetic construct
  source 1..1878: mol_type = other DNA
atggccttaccagtgaccgccttgctcctgccgctggccttgctgctccacgccgccaggccggacgagatcgtgctgacccagagccctgatagcctggccgtgtctctgggcgagagagccaccatcaactgcaaggccagccagagcgtggacttcgacggcgacagctacctgaactggtatcagcagaagcccggccagccccccaaggtgctgatctatgccgccagcacactgcagagcggcgtgcccagcagattttctggcagcggctccggcaccgacttcaccctgaccatcaacagcctggaagccgaggacgccgccacctactactgccagcagagcaacgaggacccctggacctttggcggcggaacaaaggtggaaatcaagctcgagatccagaaccctgatcctgccgtgtaccagctgcgggatagcaagagcagcgacaagagcgtgtgtctgttcaccgacttcgacagccagaccaacgtgtcccagagcaaggactccgacgtgtacatcaccgataagtgcgtgctggacatgcggagcatggacttcaagagcaactccgccgtggcctggtccaacaagtccgatttcgcctgcgccaacgccttcaacaacagcattatccccgaggacacattcttcccaagccccgagagcagctgcgacgtgaagctggtggaaaagagcttcgagacagacaccaacctgaacttccagatcctgtacgagatcctgctgggcaaggccaccctgtacgccgtgctggtgtctgccctggtgctgatggctatggtcaagcggaaggacagccggggacgcgccaagagaagcggatctggcgtgaagcagaccctgaatttcgacctgctgaagctggctggcgacgtggaatccaacccaggccctactagtatggactggatttggcgcatccttttccttgtcggcgctgctaccggcgcgcattccttcgaacaggtgcaactggtgcagtccggcgctgaagtgaagaaacctggggccagcgtgaaggtgtcctgcaaggtgtccggctacacctttaccgactactacattacctgggtgcgccaggcccctggacaggccctggaatggatgggctggatctaccccggcagcggcaacaccaagtacagccagaagttccagggcagattcgtgttcagcgtggacaccagcgccagcaccgcctacctgcaactgtctagcctgaaggccgaagataccgccgtgtactactgcgccaactacggcaactattggttcgcctattggggccagggaacccttgtgaccgtgtcctctacgcgtgaggacctgaagaacgtgttcccacctgaggtggccgtgttcgagcctagcgaggccgagatcagccacacccagaaagccaccctcgtgtgcctggctaccggcttctaccccgaccatgtggaactgtcttggtgggtcaacggcaaagaggtgcacagcggcgtgtgtaccgacccccagccactgaaagaacagcccgccctgaacgacagccggtactgcctgagcagcagactgagagtgtccgccaccttctggcagaacccccggaaccacttcagatgccaggtgcagttctacggcctgagcgagaacgacgagtggacccaggacagagccaagcccgtgacccagatcgtgtctgccgaagcctggggcagagccgattgcggctttaccagcgagagctaccagcagggcgtgctgagcgccaccaacctgagcgtgatcggcttcagaatcctgctgctgaaagtggccggctttaacctgctgatgaccctgcggctgtggtccagc

SEQ ID NO: 5152 - DNA, 1869 bp, synthetic construct
  source 1..1869: mol_type = other DNA
atggccttaccagtgaccgccttgctcctgccgctggccttgctgctccacgccgccaggccggacatccagatgacccagagccccagcagcctgtctgccagcgtgggcgacagagtgaccatcacctgtagagccagccagggcatcagctcttggctggcctggtatcagcagaagcccgagaaggcccccaagagcctgatctacgccgcctctagtctccagagcggcgtgcccagcagattttctggcagcggctccggcaccgacttcaccctgacaatcagctccctccagcccgaggacttcgccacctactactgccagcagtacaacagctaccctcccacctttggcggaggcaccaaggtggaaatcaagctcgagatccagaaccctgatcctgccgtgtaccagctgcgggatagcaagagcagcgacaagagcgtgtgtctgttcaccgacttcgacagccagaccaacgtgtcccagagcaaggactccgacgtgtacatcaccgataagtgcgtgctggacatgcggagcatggacttcaagagcaactccgccgtggcctggtccaacaagtccgatttcgcctgcgccaacgccttcaacaacagcattatccccgaggacacattcttcccaagccccgagagcagctgcgacgtgaagctggtggaaaagagcttcgagacagacaccaacctgaacttccagatcctgtacgagatcctgctgggcaaggccaccctgtacgccgtgctggtgtctgccctggtgctgatggctatggtcaagcggaaggacagccggggacgcgccaagagaagcggatctggcgtgaagcagaccctgaatttcgacctgctgaagctggctggcgacgtggaatccaacccaggccctactagtatggactggatttggcgcatccttttccttgtcggcgctgctaccggcgcgcattccttcgaagaagtgcaactggtgcagtctggcggagggctggtgcatcctgggggaagcctgagactgagctgtgccggctctggcttcgccttcagcagcagcaccatgcactggatcagacaggcccctggcaagggcctggaatggatcagcctgatcggaagcggagggggcatctactacggcgacagcgtgaagggccggttcaccatcagccgggacaacgccaagaacagcctgtacctccagatgaactccctgcgggccgaggacatggccgtgtactattgtgtgcggggctacttcgactgggtggactacttcgattactggggccagggcaccctcgtgaccgtgtcatctacgcgtgaggacctgaagaacgtgttcccacctgaggtggccgtgttcgagcctagcgaggccgagatcagccacacccagaaagccaccctcgtgtgcctggctaccggcttctaccccgaccatgtggaactgtcttggtgggtcaacggcaaagaggtgcacagcggcgtgtgtaccgacccccagccactgaaagaacagcccgccctgaacgacagccggtactgcctgagcagcagactgagagtgtccgccaccttctggcagaacccccggaaccacttcagatgccaggtgcagttctacggcctgagcgagaacgacgagtggacccaggacagagccaagcccgtgacccagatcgtgtctgccgaagcctggggcagagccgattgcggctttaccagcgagagctaccagcagggcgtgctgagcgccaccaacctgagcgtgatcggcttcagaatcctgctgctgaaagtggccggctttaacctgctgatgaccctgcggctgtggtccagc

SEQ ID NO: 5153 - DNA, 1899 bp, synthetic construct
  source 1..1899: mol_type = other DNA
atggccttaccagtgaccgccttgctcctgccgctggccttgctgctccacgccgccaggccggacgacatcgtgatgacacagtcaccagatagcctcaccgtctccctgggggagcggaccaccattaattgtaaatccagccaaagcgtgctggactcaagcaagaacaagaatagcctcgcctggtatcagcagaagcccggtcagcctccaaagctgctgctttcttgggcctccaccagagagtccgggattcctgataggtttagtggttcaggctccggcacagattttactctgaccattgattctctccagccagaggattctgcaacttattactgccagcaaagcgcccactttcctataacttttggccagggaacccgacttgaaatcaagctcgagatccagaaccctgatcctgccgtgtaccagctgcgggatagcaagagcagcgacaagagcgtgtgtctgttcaccgacttcgacagccagaccaacgtgtcccagagcaaggactccgacgtgtacatcaccgataagtgcgtgctggacatgcggagcatggacttcaagagcaactccgccgtggcctggtccaacaagtccgatttcgcctgcgccaacgccttcaacaacagcattatccccgaggacacattcttcccaagccccgagagcagctgcgacgtgaagctggtggaaaagagcttcgagacagacaccaacctgaacttccagatcctgtacgagatcctgctgggcaaggccaccctgtacgccgtgctggtgtctgccctggtgctgatggctatggtcaagcggaaggacagccggggacgcgccaagagaagcggatctggcgtgaagcagaccctgaatttcgacctgctgaagctggctggcgacgtggaatccaacccaggccctactagtatggactggatttggcgcatccttttccttgtcggcgctgctaccggcgcgcattccttcgaacaggtgcagctggtgcagagcggtgccgaagtgaagaaaccaggtgcatccgttaaagtttcatgtaaggctagtggatataccttcaccaattacggaatgaactgggtgaaacaggcccctggccagggactgaagtggatggggtggattaacacctacaccggggagccgacttatgcagacgactttaaggggcgggtcacgatgacctccgacacctccaccagtaccgcctacctggagctgcacaaccttaggtcagacgataccgccgtgtattactgtgcccgatggtcttggtccgacggatactatgtctacttcgactattggggccaggggaccacagttaccgtgtcctctacgcgtgaggacctgaagaacgtgttcccacctgaggtggccgtgttcgagcctagcgaggccgagatcagccacacccagaaagccaccctcgtgtgcctggctaccggcttctaccccgaccatgtggaactgtcttggtgggtcaacggcaaagaggtgcacagcggcgtgtgtaccgacccccagccactgaaagaacagcccgccctgaacgacagccggtactgcctgagcagcagactgagagtgtccgccaccttctggcagaacccccggaaccacttcagatgccaggtgcagttctacggcctgagcgagaacgacgagtggacccaggacagagccaagcccgtgacccagatcgtgtctgccgaagcctggggcagagccgattgcggctttaccagcgagagctaccagcagggcgtgctgagcgccaccaacctgagcgtgatcggcttcagaatcctgctgctgaaagtggccggctttaacctgctgatgaccctgcggctgtggtccagc

SEQ ID NO: 5154 - DNA, 1887 bp, synthetic construct
  source 1..1887: mol_type = other DNA
atggccttaccagtgaccgccttgctcctgccgctggccttgctgctccacgccgccaggccggacgagatcgtgctgacacagagccctggaagcctggccgtgtctcctggcgagcgcgtgacaatgagctgcaagagcagccagagcgtgttcttcagcagctcccagaagaactacctggcctggtatcagcagatccccggccagagccccagactgctgatctactgggccagcaccagagaaagcggcgtgcccgatagattcaccggcagcggctctggcaccgacttcaccctgacaatcagcagcgtgcagcccgaggacctggctatctactactgccaccagtacctgagcagccggaccttcggccagggcaccaagctggaaatcaagagactcgagatccagaaccctgatcctgccgtgtaccagctgcgggatagcaagagcagcgacaagagcgtgtgtctgttcaccgacttcgacagccagaccaacgtgtcccagagcaaggactccgacgtgtacatcaccgataagtgcgtgctggacatgcggagcatggacttcaagagcaactccgccgtggcctggtccaacaagtccgatttcgcctgcgccaacgccttcaacaacagcattatccccgaggacacattcttcccaagccccgagagcagctgcgacgtgaagctggtggaaaagagcttcgagacagacaccaacctgaacttccagatcctgtacgagatcctgctgggcaaggccaccctgtacgccgtgctggtgtctgccctggtgctgatggctatggtcaagcggaaggacagccggggacgcgccaagagaagcggatctggcgtgaagcagaccctgaatttcgacctgctgaagctggctggcgacgtggaatccaacccaggccctactagtatggactggatttggcgcatccttttccttgtcggcgctgctaccggcgcgcattccttcgaacaggtgcaactgcagcagcctggcgctgaggtcgtgaagccaggcgcttccgtgaagatgtcctgcaaggccagcggctacaccttcaccagctactacatccactggatcaagcagacccctggacagggcctggaatgggtgggagtgatctaccccggcaacgacgacatcagctacaaccagaagttccagggcaaggccaccctgaccgccgacaagtctagcaccaccgcctacatgcaactgtccagcctgaccagcgaggacagcgccgtgtactactgcgccagagaagtgcggctgcggtacttcgatgtgtggggccagggaaccaccgtgaccgtgtcatctacgcgtgaggacctgaagaacgtgttcccacctgaggtggccgtgttcgagcctagcgaggccgagatcagccacacccagaaagccaccctcgtgtgcctggctaccggcttctaccccgaccatgtggaactgtcttggtgggtcaacggcaaagaggtgcacagcggcgtgtgtaccgacccccagccactgaaagaacagcccgccctgaacgacagccggtactgcctgagcagcagactgagagtgtccgccaccttctggcagaacccccggaaccacttcagatgccaggtgcagttctacggcctgagcgagaacgacgagtggacccaggacagagccaagcccgtgacccagatcgtgtctgccgaagcctggggcagagccgattgcggctttaccagcgagagctaccagcagggcgtgctgagcgccaccaacctgagcgtgatcggcttcagaatcctgctgctgaaagtggccggctttaacctgctgatgaccctgcggctgtggtccagc

SEQ ID NO: 5155 - DNA, 1899 bp, synthetic construct
  source 1..1899: mol_type = other DNA
atggccttaccagtgaccgccttgctcctgccgctggccttgctgctccacgccgccaggccggatgtgctgctgacccagagccctctgagcctgcctgtgacactgggacagcctgccagcatctcctgtcggagcagccagaccatcgtgcacagcaacggcaacacctacctggaatggttccagcagcggccaggccagagccccagactgctgatctaccaggtgtccaacagattcagcggcgtgcccgacagattctccggcagcggctctggcaccgacttcaccctgaagatcagccgggtggaagccgaggacgtgggcgtgtactactgttttcaaggcagccacgtgccccggacctttggcggaggaacaaaggtggaaatcaagagagccctcgagatccagaaccctgatcctgccgtgtaccagctgcgggatagcaagagcagcgacaagagcgtgtgtctgttcaccgacttcgacagccagaccaacgtgtcccagagcaaggactccgacgtgtacatcaccgataagtgcgtgctggacatgcggagcatggacttcaagagcaactccgccgtggcctggtccaacaagtccgatttcgcctgcgccaacgccttcaacaacagcattatccccgaggacacattcttcccaagccccgagagcagctgcgacgtgaagctggtggaaaagagcttcgagacagacaccaacctgaacttccagatcctgtacgagatcctgctgggcaaggccaccctgtacgccgtgctggtgtctgccctggtgctgatggctatggtcaagcggaaggacagccggggacgcgccaagagaagcggatctggcgtgaagcagaccctgaatttcgacctgctgaagctggctggcgacgtggaatccaacccaggccctactagtatggactggatttggcgcatccttttccttgtcggcgctgctaccggcgcgcattccttcgaacagatccaactggtgcagagcggcagcgagctgaagaaacctggggccagcgtgaaggtgtcctgcaaggccagcggctacacctttaccaactacggcatgaactgggtgcgccaggcccctggacagggcctgaaatggatgggctggatcaacaccaacaccggcgagcctaagtacgccgaagagttcaagggcagattcgccctgagcctggacaccagcgtgtccacagcctacctccagatcaacagcctgaaggccgaggataccgccgtgtacttctgcgccagaggctacggcaactacgccagaggggcttggctggcctattggggccagggaacactcgtgaccgtgtcctctacgcgtgaggacctgaagaacgtgttcccacctgaggtggccgtgttcgagcctagcgaggccgagatcagccacacccagaaagccaccctcgtgtgcctggctaccggcttctaccccgaccatgtggaactgtcttggtgggtcaacggcaaagaggtgcacagcggcgtgtgtaccgacccccagccactgaaagaacagcccgccctgaacgacagccggtactgcctgagcagcagactgagagtgtccgccaccttctggcagaacccccggaaccacttcagatgccaggtgcagttctacggcctgagcgagaacgacgagtggacccaggacagagccaagcccgtgacccagatcgtgtctgccgaagcctggggcagagccgattgcggctttaccagcgagagctaccagcagggcgtgctgagcgccaccaacctgagcgtgatcggcttcagaatcctgctgctgaaagtggccggctttaacctgctgatgaccctgcggctgtggtccagc

SEQ ID NO: 5156 - DNA, 1854 bp, synthetic construct
  source 1..1854: mol_type = other DNA
atggccttaccagtgaccgccttgctcctgccgctggccttgctgctccacgccgccaggccggacgagatcgtgctgacacagagccctgccacactctctctgagccctggcgaaagagccaccctgagctgtagcgccagcagcagcatcaactacatctactggctccagcagaagcccggccaggcccccagaatcctgatctacctgaccagcaacctggcctccggcgtgccagccagattttctggcagcggctccggcaccgacttcaccctgacaatcagcagcctggaacccgaggacttcgccgtgtactactgcctccagtggtccagcaaccccctgacctttggcggaggcaccaaggtggaaatcaagctcgagatccagaaccctgatcctgccgtgtaccagctgcgggatagcaagagcagcgacaagagcgtgtgtctgttcaccgacttcgacagccagaccaacgtgtcccagagcaaggactccgacgtgtacatcaccgataagtgcgtgctggacatgcggagcatggacttcaagagcaactccgccgtggcctggtccaacaagtccgatttcgcctgcgccaacgccttcaacaacagcattatccccgaggacacattcttcccaagccccgagagcagctgcgacgtgaagctggtggaaaagagcttcgagacagacaccaacctgaacttccagatcctgtacgagatcctgctgggcaaggccaccctgtacgccgtgctggtgtctgccctggtgctgatggctatggtcaagcggaaggacagccggggacgcgccaagagaagcggatctggcgtgaagcagaccctgaatttcgacctgctgaagctggctggcgacgtggaatccaacccaggccctactagtatggactggatttggcgcatccttttccttgtcggcgctgctaccggcgcgcattccttcgaagaagtgcaactggtggaaagcgggggaggacttgtgaagcctggcggctctctgagactgagctgtgccgcctctggcttcaccttcagcagctacgacatgagctgggtgcgccaggctcctggcaagggactggaatgggtgtccaccatcagcagcggcggcagctacacctactacctggacagcatcaagggccggttcaccatctccagagacaacgccaagaacagcctgtacctccagatgaactccctgcgggccgaggacacagccgtgtattattgcgccagacagggcctggattactggggcagaggcacccttgtgaccgtgtcctctacgcgtgaggacctgaagaacgtgttcccacctgaggtggccgtgttcgagcctagcgaggccgagatcagccacacccagaaagccaccctcgtgtgcctggctaccggcttctaccccgaccatgtggaactgtcttggtgggtcaacggcaaagaggtgcacagcggcgtgtgtaccgacccccagccactgaaagaacagcccgccctgaacgacagccggtactgcctgagcagcagactgagagtgtccgccaccttctggcagaacccccggaaccacttcagatgccaggtgcagttctacggcctgagcgagaacgacgagtggacccaggacagagccaagcccgtgacccagatcgtgtctgccgaagcctggggcagagccgattgcggctttaccagcgagagctaccagcagggcgtgctgagcgccaccaacctgagcgtgatcggcttcagaatcctgctgctgaaagtggccggctttaacctgctgatgaccctgcggctgtggtccagc

SEQ ID NO: 5157 - DNA, 1881 bp, synthetic construct
  source 1..1881: mol_type = other DNA
atggccttaccagtgaccgccttgctcctgccgctggccttgctgctccacgccgccaggccggacatcgtgatgacccagagccccgatagcctggccgtgtctctgggagagagagccaccatcaactgccgggccagcaagagcgtgtccaccagcggctacagcttcatgcactggtatcagcagaagcccggccagccccccaagctgctgatctacctggcctccaacctggaaagcggcgtgcccgatagattcagcggcagcggctctggcaccgacttcaccctgaccatcagttctcttcaggccgaggacgtggccgtgtactactgccagcacagcagagaggtgccctggacattcggccagggcacaaaggtggaaatcaagcggctcgagatccagaaccctgatcctgccgtgtaccagctgcgggatagcaagagcagcgacaagagcgtgtgtctgttcaccgacttcgacagccagaccaacgtgtcccagagcaaggactccgacgtgtacatcaccgataagtgcgtgctggacatgcggagcatggacttcaagagcaactccgccgtggcctggtccaacaagtccgatttcgcctgcgccaacgccttcaacaacagcattatccccgaggacacattcttcccaagccccgagagcagctgcgacgtgaagctggtggaaaagagcttcgagacagacaccaacctgaacttccagatcctgtacgagatcctgctgggcaaggccaccctgtacgccgtgctggtgtctgccctggtgctgatggctatggtcaagcggaaggacagccggggacgcgccaagagaagcggatctggcgtgaagcagaccctgaatttcgacctgctgaagctggctggcgacgtggaatccaacccaggccctactagtatggactggatttggcgcatccttttccttgtcggcgctgctaccggcgcgcattccttcgaacaggtgcagctggtgcagtctggggccgaagtgaagaaacctggggccagcgtgaaggtgtcctgcaaggccagcggatacacctttaccaactacggcatgaactgggtgcgccaggcccctggacagggcctggaatggatgggctggatcaacacctacaccggcgagcccacatacgccgacgccttcaagggcagattcgccttcagcctggacaccagcacctccaccgcctacctccagatcaacagcctgcggagcgacgacaccgccgtgtattattgcgccagagattacggcgactacgggatggactattggggccagggaaccaccgtgaccgtgtcctctacgcgtgaggacctgaagaacgtgttcccacctgaggtggccgtgttcgagcctagcgaggccgagatcagccacacccagaaagccaccctcgtgtgcctggctaccggcttctaccccgaccatgtggaactgtcttggtgggtcaacggcaaagaggtgcacagcggcgtgtgtaccgacccccagccactgaaagaacagcccgccctgaacgacagccggtactgcctgagcagcagactgagagtgtccgccaccttctggcagaacccccggaaccacttcagatgccaggtgcagttctacggcctgagcgagaacgacgagtggacccaggacagagccaagcccgtgacccagatcgtgtctgccgaagcctggggcagagccgattgcggctttaccagcgagagctaccagcagggcgtgctgagcgccaccaacctgagcgtgatcggcttcagaatcctgctgctgaaagtggccggctttaacctgctgatgaccctgcggctgtggtccagc

SEQ ID NO: 5158 - DNA, 1869 bp, synthetic construct
  source 1..1869: mol_type = other DNA
atggccttaccagtgaccgccttgctcctgccgctggccttgctgctccacgccgccaggccggacatcgtgatgacccagacccccctgaccctgagcgtgacaatcggacagcctgccagcatctcctgcaagagcagccagagcctgctggacagcgacggcaagacctacctgaactggctgctgcagaggccaggccagagccccgagagactgatctacctggtgtccaagctggactccggcgtgcccgatagattcacaggcagcggctccggcaccgacttcaccctgaagatcagccgggtggaagccgaggacctgggcgtgtactgttgttggcagggcacccacttcccttacaccttcggcggagggaccaaggtggaaatcaagggcctcgagatccagaaccctgatcctgccgtgtaccagctgcgggatagcaagagcagcgacaagagcgtgtgtctgttcaccgacttcgacagccagaccaacgtgtcccagagcaaggactccgacgtgtacatcaccgataagtgcgtgctggacatgcggagcatggacttcaagagcaactccgccgtggcctggtccaacaagtccgatttcgcctgcgccaacgccttcaacaacagcattatccccgaggacacattcttcccaagccccgagagcagctgcgacgtgaagctggtggaaaagagcttcgagacagacaccaacctgaacttccagatcctgtacgagatcctgctgggcaaggccaccctgtacgccgtgctggtgtctgccctggtgctgatggctatggtcaagcggaaggacagccggggacgcgccaagagaagcggatctggcgtgaagcagaccctgaatttcgacctgctgaagctggctggcgacgtggaatccaacccaggccctactagtatggactggatttggcgcatccttttccttgtcggcgctgctaccggcgcgcattccttcgaacaggtgcaactgcagcagcctggcgctgaacttgtgcggccaggcgcctctgtgaagctgagctgtaaagccagcggctacaccttcaccagctactggatgaactgggtcaagcagcgcccaggccagggcctggaatggatcggaatgatcgaccccagcgacagcgagacacactacaaccacatcttcaaggacaaggccaccctgaccgtggacaagtccagcagcacagcctacctgcaactgtccagcctgaccagcgaggacagcgccgtgtactactgcgcccggaacctgtatctgtggggccagggaacaagcgtgaccgtgtctagcacgcgtgaggacctgaagaacgtgttcccacctgaggtggccgtgttcgagcctagcgaggccgagatcagccacacccagaaagccaccctcgtgtgcctggctaccggcttctaccccgaccatgtggaactgtcttggtgggtcaacggcaaagaggtgcacagcggcgtgtgtaccgacccccagccactgaaagaacagcccgccctgaacgacagccggtactgcctgagcagcagactgagagtgtccgccaccttctggcagaacccccggaaccacttcagatgccaggtgcagttctacggcctgagcgagaacgacgagtggacccaggacagagccaagcccgtgacccagatcgtgtctgccgaagcctggggcagagccgattgcggctttaccagcgagagctaccagcagggcgtgctgagcgccaccaacctgagcgtgatcggcttcagaatcctgctgctgaaagtggccggctttaacctgctgatgaccctgcggctgtggtccagc

SEQ ID NO: 5159 - DNA, 1893 bp, synthetic construct
  source 1..1893: mol_type = other DNA
atggccttaccagtgaccgccttgctcctgccgctggccttgctgctccacgccgccaggccggacatcgtgatgacccagagccccgatagcctggccgtgtctctgggagagagagccaccatcaactgcgagagcagccagagcctgctgaacagcggcaaccagaagaactacctgacctggtatcagcagaagcccggccagccccccaagcccctgatctattgggccagcaccagagaaagcggcgtgcccgatagattcagcggcagcggaagcggcaccgacttcaccctgaccatcagttctcttcaggccgaggacgtggccgtgtactactgccagaacgactacagctacccctacaccttcggccagggcaccaagctggaaatcaagagactcgagatccagaaccctgatcctgccgtgtaccagctgcgggatagcaagagcagcgacaagagcgtgtgtctgttcaccgacttcgacagccagaccaacgtgtcccagagcaaggactccgacgtgtacatcaccgataagtgcgtgctggacatgcggagcatggacttcaagagcaactccgccgtggcctggtccaacaagtccgatttcgcctgcgccaacgccttcaacaacagcattatccccgaggacacattcttcccaagccccgagagcagctgcgacgtgaagctggtggaaaagagcttcgagacagacaccaacctgaacttccagatcctgtacgagatcctgctgggcaaggccaccctgtacgccgtgctggtgtctgccctggtgctgatggctatggtcaagcggaaggacagccggggacgcgccaagagaagcggatctggcgtgaagcagaccctgaatttcgacctgctgaagctggctggcgacgtggaatccaacccaggccctactagtatggactggatttggcgcatccttttccttgtcggcgctgctaccggcgcgcattccttcgaagaagtgcagctggtgcagtctggggccgaagtgaagaagcctggcgagagcctgaagatcagctgcaagggcagcggctacagcttcaccgactactacatgaagtgggccagacagatgcccggcaagggcctggaatggatgggcgacatcatccccagcaacggggccaccttctacaaccagaaattcaagggccaagtgaccatctccgccgacaagagcatcagcaccacctacctccagtggtccagcctgaaggccagcgacaccgccatgtactattgcgccagaagccatctgctgcgggccagttggttcgcctattggggccagggaacaatggtcacagtgtccagcacgcgtgaggacctgaagaacgtgttcccacctgaggtggccgtgttcgagcctagcgaggccgagatcagccacacccagaaagccaccctcgtgtgcctggctaccggcttctaccccgaccatgtggaactgtcttggtgggtcaacggcaaagaggtgcacagcggcgtgtgtaccgacccccagccactgaaagaacagcccgccctgaacgacagccggtactgcctgagcagcagactgagagtgtccgccaccttctggcagaacccccggaaccacttcagatgccaggtgcagttctacggcctgagcgagaacgacgagtggacccaggacagagccaagcccgtgacccagatcgtgtctgccgaagcctggggcagagccgattgcggctttaccagcgagagctaccagcagggcgtgctgagcgccaccaacctgagcgtgatcggcttcagaatcctgctgctgaaagtggccggctttaacctgctgatgaccctgcggctgtggtccagc

SEQ ID NO: 5160 - DNA, 1878 bp, synthetic construct
  source 1..1878: mol_type = other DNA
atggccttaccagtgaccgccttgctcctgccgctggccttgctgctccacgccgccaggccggacatccagatgacccagtctaccagttccctgagtgcatccctcggagacagggtgacgatcagttgcagcgcaagccaagggatcaataactatctgaactggtatcagcagaaaccggacggaacagtcgaactcctgatttattacaccagcacccttcagagtggcgtcccttcccggttcagtggctccggaagcgggaccgattactccctgaccatttctaatctggagccagaggacataggaacgtattattgccagcagtatagtaaactgccacgaacttttggaggggggacgaaactggagatcaaactcgagatccagaaccctgatcctgccgtgtaccagctgcgggatagcaagagcagcgacaagagcgtgtgtctgttcaccgacttcgacagccagaccaacgtgtcccagagcaaggactccgacgtgtacatcaccgataagtgcgtgctggacatgcggagcatggacttcaagagcaactccgccgtggcctggtccaacaagtccgatttcgcctgcgccaacgccttcaacaacagcattatccccgaggacacattcttcccaagccccgagagcagctgcgacgtgaagctggtggaaaagagcttcgagacagacaccaacctgaacttccagatcctgtacgagatcctgctgggcaaggccaccctgtacgccgtgctggtgtctgccctggtgctgatggctatggtcaagcggaaggacagccggggacgcgccaagagaagcggatctggcgtgaagcagaccctgaatttcgacctgctgaagctggctggcgacgtggaatccaacccaggccctactagtatggactggatttggcgcatccttttccttgtcggcgctgctaccggcgcgcattccttcgaacaggtgcaactccagcagtccggaagcgagcttatgatgccaggggcatcagtgaagatcagctgcaaggctactggctacaccttctctaattactggatagagtgggttaaacaaaggccagggcacggcctggaatggatcggcgagatcctgcctgggacaggccgaaccatttataacgagaagttcaaaggcaaggctactttcaccgcagatataagctctaatacagtgcaaatgcagctctcttccctgacaagtgaggatagtgccgtgtattattgcgcacgaagagattactatggaaatttttattacgctatggattattggggtcaaggaacaagtgtgaccgttagcagcacgcgtgaggacctgaagaacgtgttcccacctgaggtggccgtgttcgagcctagcgaggccgagatcagccacacccagaaagccaccctcgtgtgcctggctaccggcttctaccccgaccatgtggaactgtcttggtgggtcaacggcaaagaggtgcacagcggcgtgtgtaccgacccccagccactgaaagaacagcccgccctgaacgacagccggtactgcctgagcagcagactgagagtgtccgccaccttctggcagaacccccggaaccacttcagatgccaggtgcagttctacggcctgagcgagaacgacgagtggacccaggacagagccaagcccgtgacccagatcgtgtctgccgaagcctggggcagagccgattgcggctttaccagcgagagctaccagcagggcgtgctgagcgccaccaacctgagcgtgatcggcttcagaatcctgctgctgaaagtggccggctttaacctgctgatgaccctgcggctgtggtccagc

SEQ ID NO: 5161 - DNA, 1863 bp, synthetic construct
  source 1..1863: mol_type = other DNA
atggccttaccagtgaccgccttgctcctgccgctggccttgctgctccacgccgccaggccggacatccagatgacccagagccctgccagcctgtccgtgtctgtgggcgagacagtgaccatcacctgtcgggccagcgagaacatctacagcaacctggcctggtatcagcagaagcagggcaagagcccccaactgctggtgtacgccgccaccaatctggccgatggcgtgcccagcagattttccggctctggcagcggcacccagtacagcctgaagatcaacagcctccagagcgaggacttcggcagctactactgccagcacttctggggcacctggacctttggaggaggcaccaccctggaaatcaagctcgagatccagaaccctgatcctgccgtgtaccagctgcgggatagcaagagcagcgacaagagcgtgtgtctgttcaccgacttcgacagccagaccaacgtgtcccagagcaaggactccgacgtgtacatcaccgataagtgcgtgctggacatgcggagcatggacttcaagagcaactccgccgtggcctggtccaacaagtccgatttcgcctgcgccaacgccttcaacaacagcattatccccgaggacacattcttcccaagccccgagagcagctgcgacgtgaagctggtggaaaagagcttcgagacagacaccaacctgaacttccagatcctgtacgagatcctgctgggcaaggccaccctgtacgccgtgctggtgtctgccctggtgctgatggctatggtcaagcggaaggacagccggggacgcgccaagagaagcggatctggcgtgaagcagaccctgaatttcgacctgctgaagctggctggcgacgtggaatccaacccaggccctactagtatggactggatttggcgcatccttttccttgtcggcgctgctaccggcgcgcattccttcgaagaagtgcaactccagcagagcggccctgagcttgtgaagcctggcgcttccgtgaagatgagctgcaaggccagcggctacaccttcaccgactactacatgaagtggatgaagcagagccacggcaagtccctggaatggatcggcgacatcaaccccaacaacggcggcaccacctacaaccagaagttcaagggcaaggccaccctgaccgtggacaagagcagcagcaccgcctacatgcaactgaacagcctgaccagcgaggacagcgccgtgtactactgcgccagagactacggctacggctatttcgactactggggccagggcacaaccctgacagtgtcctctacgcgtgaggacctgaagaacgtgttcccacctgaggtggccgtgttcgagcctagcgaggccgagatcagccacacccagaaagccaccctcgtgtgcctggctaccggcttctaccccgaccatgtggaactgtcttggtgggtcaacggcaaagaggtgcacagcggcgtgtgtaccgacccccagccactgaaagaacagcccgccctgaacgacagccggtactgcctgagcagcagactgagagtgtccgccaccttctggcagaacccccggaaccacttcagatgccaggtgcagttctacggcctgagcgagaacgacgagtggacccaggacagagccaagcccgtgacccagatcgtgtctgccgaagcctggggcagagccgattgcggctttaccagcgagagctaccagcagggcgtgctgagcgccaccaacctgagcgtgatcggcttcagaatcctgctgctgaaagtggccggctttaacctgctgatgaccctgcggctgtggtccagc

SEQ ID NO: 5162 - DNA, 1872 bp, synthetic construct
  source 1..1872: mol_type = other DNA
atggccttaccagtgaccgccttgctcctgccgctggccttgctgctccacgccgccaggccggagatcgtgctgacacagagccctggcaccctgagcctgtctccaggcgaaagagccacactgagctgtcgggcctctcagagcgtgggaggctacctggcttggtatcagcagaagccaggccaggcccccagactgctgatctacgacgccagcaatcgggccacaggcatccccgccagattttctggcagcggctccggcaccgacttcaccctgacaatcagcagcctggaacccgaggacttcgccgtgtactactgccagcagcggaacaactggccccccatgtacacattcggccagggcaccaagctggaaatcaagagactcgagatccagaaccctgatcctgccgtgtaccagctgcgggatagcaagagcagcgacaagagcgtgtgtctgttcaccgacttcgacagccagaccaacgtgtcccagagcaaggactccgacgtgtacatcaccgataagtgcgtgctggacatgcggagcatggacttcaagagcaactccgccgtggcctggtccaacaagtccgatttcgcctgcgccaacgccttcaacaacagcattatccccgaggacacattcttcccaagccccgagagcagctgcgacgtgaagctggtggaaaagagcttcgagacagacaccaacctgaacttccagatcctgtacgagatcctgctgggcaaggccaccctgtacgccgtgctggtgtctgccctggtgctgatggctatggtcaagcggaaggacagccggggacgcgccaagagaagcggatctggcgtgaagcagaccctgaatttcgacctgctgaagctggctggcgacgtggaatccaacccaggccctactagtatggactggatttggcgcatccttttccttgtcggcgctgctaccggcgcgcattccttcgaacaggtgcaactggtgcagagcggagccgaagtgaagaaacccggcagcagcgtgaaggtgtcctgcaaggcttccggcggcaccttcagcagctacgccatttcttgggtgcgccaggctcctggacagggcctggaatggatgggcggcatcatccctatcctgggcaccgccaactacgcccagaaattccagggcagagtgaccatcaccgccgacgagagcaccagcaccgcctacatggaactgagcagcctgcggagcgaggacacagccgtgtattattgcgccagatggggcggaggggccttcgacatttggggccagggaacaatggtcaccgtgtccagcacgcgtgaggacctgaagaacgtgttcccacctgaggtggccgtgttcgagcctagcgaggccgagatcagccacacccagaaagccaccctcgtgtgcctggctaccggcttctaccccgaccatgtggaactgtcttggtgggtcaacggcaaagaggtgcacagcggcgtgtgtaccgacccccagccactgaaagaacagcccgccctgaacgacagccggtactgcctgagcagcagactgagagtgtccgccaccttctggcagaacccccggaaccacttcagatgccaggtgcagttctacggcctgagcgagaacgacgagtggacccaggacagagccaagcccgtgacccagatcgtgtctgccgaagcctggggcagagccgattgcggctttaccagcgagagctaccagcagggcgtgctgagcgccaccaacctgagcgtgatcggcttcagaatcctgctgctgaaagtggccggctttaacctgctgatgaccctgcggctgtggtccagc

SEQ ID NO: 5163 - DNA, 1857 bp, synthetic construct
  source 1..1857: mol_type = other DNA
atggccttaccagtgaccgccttgctcctgccgctggccttgctgctccacgccgccaggccgcagatcgtgctgacacagagccctgccctgatgagcgccagccctggcgagaaagtgaccatgacctgtagcgccagcagcagcgtgcgctacatgtactggtatcagcagaagcccagaagcagccccaagccctggattcacctgaccagcaatctggcctctggcgtgcccgctagattttccggctctggcagcggcaccagctacagcctgaccatcagcagcatggaagccgaggacgccgccacctactactgccagcagtggtccagccaccccttcacatttggctccggcaccaagctggaaatcaagctcgagatccagaaccctgatcctgccgtgtaccagctgcgggatagcaagagcagcgacaagagcgtgtgtctgttcaccgacttcgacagccagaccaacgtgtcccagagcaaggactccgacgtgtacatcaccgataagtgcgtgctggacatgcggagcatggacttcaagagcaactccgccgtggcctggtccaacaagtccgatttcgcctgcgccaacgccttcaacaacagcattatccccgaggacacattcttcccaagccccgagagcagctgcgacgtgaagctggtggaaaagagcttcgagacagacaccaacctgaacttccagatcctgtacgagatcctgctgggcaaggccaccctgtacgccgtgctggtgtctgccctggtgctgatggctatggtcaagcggaaggacagccggggacgcgccaagagaagcggatctggcgtgaagcagaccctgaatttcgacctgctgaagctggctggcgacgtggaatccaacccaggccctactagtatggactggatttggcgcatccttttccttgtcggcgctgctaccggcgcgcattccttcgaagatgtgcaactccaggaaagcggccctggccttgtgaagcctagccagagcctgtccctgacctgtaccgtgaccggcttcagcatcaccagcgactactcttggaactggatcagacagttccctggcaacaaactggaatggatgggctacatcagctactccggccacacctcctacaaccccagcctggaaagccggatctccatcaccagagacaccagcaagaaccagttcttcttgcaactgaacagcgtgaccaccgaggataccgccacatattactgtaccagaggcaactgggacgtggtgtactggggccagggcacacttgtgaccgtgtctgctacgcgtgaggacctgaagaacgtgttcccacctgaggtggccgtgttcgagcctagcgaggccgagatcagccacacccagaaagccaccctcgtgtgcctggctaccggcttctaccccgaccatgtggaactgtcttggtgggtcaacggcaaagaggtgcacagcggcgtgtgtaccgacccccagccactgaaagaacagcccgccctgaacgacagccggtactgcctgagcagcagactgagagtgtccgccaccttctggcagaacccccggaaccacttcagatgccaggtgcagttctacggcctgagcgagaacgacgagtggacccaggacagagccaagcccgtgacccagatcgtgtctgccgaagcctggggcagagccgattgcggctttaccagcgagagctaccagcagggcgtgctgagcgccaccaacctgagcgtgatcggcttcagaatcctgctgctgaaagtggccggctttaacctgctgatgaccctgcggctgtggtccagc

SEQ ID NO: 5164 - DNA, 1887 bp, synthetic construct
  source 1..1887: mol_type = other DNA
atggccttaccagtgaccgccttgctcctgccgctggccttgctgctccacgccgccaggccggacgtcgtgatgacccagagccctctgagcctgcctgtgacactgggacagcctgccagcatctcctgtcggagcagccagagcatcgtgcacagcgacggcaacacctacctggaatggtatcagcagcggccaggccagagccccagacggctgatctacaaggtgtccaacagattcagcggcgtgcccgacagattctccggcagcggctctggcaccgacttcaccctgaagatcagcagagtggaagccgaggacgtgggcgtgtactactgttttcaaggcagccacgccccctggacctttggcggaggaacaaaggtggaaatcaagctcgagatccagaaccctgatcctgccgtgtaccagctgcgggatagcaagagcagcgacaagagcgtgtgtctgttcaccgacttcgacagccagaccaacgtgtcccagagcaaggactccgacgtgtacatcaccgataagtgcgtgctggacatgcggagcatggacttcaagagcaactccgccgtggcctggtccaacaagtccgatttcgcctgcgccaacgccttcaacaacagcattatccccgaggacacattcttcccaagccccgagagcagctgcgacgtgaagctggtggaaaagagcttcgagacagacaccaacctgaacttccagatcctgtacgagatcctgctgggcaaggccaccctgtacgccgtgctggtgtctgccctggtgctgatggctatggtcaagcggaaggacagccggggacgcgccaagagaagcggatctggcgtgaagcagaccctgaatttcgacctgctgaagctggctggcgacgtggaatccaacccaggccctactagtatggactggatttggcgcatccttttccttgtcggcgctgctaccggcgcgcattccttcgaagaagtgcaactggtggaatcaggcggcggactggtgcagcctggcggatctctgagactgagctgtgccgccagcggcttcaccttcagcagctacggaatgcactgggtgcgccaggcccctggcaaaggactggaatgggtggcctacatcaccaccagaagcagcaccatctactacgccgacagcgtgaagggccggttcaccatctccagagacaacgccaagaacagcctgtacctccagatgaactccctgcgggccgaggacaccgccgtgtactattgcaccagagagcccctgaccggctactacgctatggactattggggccagggcaccagcgtgaccgtgtctagtacgcgtgaggacctgaagaacgtgttcccacctgaggtggccgtgttcgagcctagcgaggccgagatcagccacacccagaaagccaccctcgtgtgcctggctaccggcttctaccccgaccatgtggaactgtcttggtgggtcaacggcaaagaggtgcacagcggcgtgtgtaccgacccccagccactgaaagaacagcccgccctgaacgacagccggtactgcctgagcagcagactgagagtgtccgccaccttctggcagaacccccggaaccacttcagatgccaggtgcagttctacggcctgagcgagaacgacgagtggacccaggacagagccaagcccgtgacccagatcgtgtctgccgaagcctggggcagagccgattgcggctttaccagcgagagctaccagcagggcgtgctgagcgccaccaacctgagcgtgatcggcttcagaatcctgctgctgaaagtggccggctttaacctgctgatgaccctgcggctgtggtccagc

SEQ ID NO: 5165 - DNA, 1863 bp, synthetic construct
  source 1..1863: mol_type = other DNA
atggccttaccagtgaccgccttgctcctgccgctggccttgctgctccacgccgccaggccggacatccagatgacccagagccccagcagcctgtctgccagcgtgggcgacagagtgaccatcacctgtagagccagccagagcatcagcctgtggctgaactggtatcagcagaagcccggcaaggcccccaagctgctgatctacgccgccagcacactccagagcggcgtgccaagcagattttccggcagcggctccggcaccgacttcaccctgacaatcagctccctccagcccgaggacttcgccacctactactgccagcagtactacaccagcccctacaccttcggccagggcaccaaggtggaaatcaagagactcgagatccagaaccctgatcctgccgtgtaccagctgcgggatagcaagagcagcgacaagagcgtgtgtctgttcaccgacttcgacagccagaccaacgtgtcccagagcaaggactccgacgtgtacatcaccgataagtgcgtgctggacatgcggagcatggacttcaagagcaactccgccgtggcctggtccaacaagtccgatttcgcctgcgccaacgccttcaacaacagcattatccccgaggacacattcttcccaagccccgagagcagctgcgacgtgaagctggtggaaaagagcttcgagacagacaccaacctgaacttccagatcctgtacgagatcctgctgggcaaggccaccctgtacgccgtgctggtgtctgccctggtgctgatggctatggtcaagcggaaggacagccggggacgcgccaagagaagcggatctggcgtgaagcagaccctgaatttcgacctgctgaagctggctggcgacgtggaatccaacccaggccctactagtatggactggatttggcgcatccttttccttgtcggcgctgctaccggcgcgcattccttcgaacaggtgcaactgctggaatctggcggcggactggtgcagcctggcggatctctgagactgagctgtgccgccagcggcttcaccttcagcagctacgccatgagctgggtgcgccaggcccctggaaaaggactggaatgggtgtccgtgatccggtccagcggcagcagcacctattacgccgatagcgtgaagggccggttcaccatcagccgggacaacagcaagaacaccctgtacctccagatgaacagcctgcgggccgaggacaccgccgtgtactattgtgctaggggaggcggctacttcgactactggggccagggaacactcgtgaccgtgtcctctacgcgtgaggacctgaagaacgtgttcccacctgaggtggccgtgttcgagcctagcgaggccgagatcagccacacccagaaagccaccctcgtgtgcctggctaccggcttctaccccgaccatgtggaactgtcttggtgggtcaacggcaaagaggtgcacagcggcgtgtgtaccgacccccagccactgaaagaacagcccgccctgaacgacagccggtactgcctgagcagcagactgagagtgtccgccaccttctggcagaacccccggaaccacttcagatgccaggtgcagttctacggcctgagcgagaacgacgagtggacccaggacagagccaagcccgtgacccagatcgtgtctgccgaagcctggggcagagccgattgcggctttaccagcgagagctaccagcagggcgtgctgagcgccaccaacctgagcgtgatcggcttcagaatcctgctgctgaaagtggccggctttaacctgctgatgaccctgcggctgtggtccagc

SEQ ID NO: 5166 - DNA, 1872 bp, synthetic construct
  source 1..1872: mol_type = other DNA
atggccttaccagtgaccgccttgctcctgccgctggccttgctgctccacgccgccaggccggacatccagatgacccagagccccagcagcctgtctgccagcgtgggcgacagagtgaccatcacctgtagagccagccagagcatcagcagctacctgaactggtatcagcagaagcccggcaaggcccccaaactgctgatctacgccgtgtccacactccagagcggcgtgcccagcagattttctggcagcggctccggcaccgacttcaccctgacaatcagctccctccagcccgaggacttcgccacctactactgtcagcagagcggcaccttccctcccaccacatttggacagggcaccaaggtggaaatcaagagactcgagatccagaaccctgatcctgccgtgtaccagctgcgggatagcaagagcagcgacaagagcgtgtgtctgttcaccgacttcgacagccagaccaacgtgtcccagagcaaggactccgacgtgtacatcaccgataagtgcgtgctggacatgcggagcatggacttcaagagcaactccgccgtggcctggtccaacaagtccgatttcgcctgcgccaacgccttcaacaacagcattatccccgaggacacattcttcccaagccccgagagcagctgcgacgtgaagctggtggaaaagagcttcgagacagacaccaacctgaacttccagatcctgtacgagatcctgctgggcaaggccaccctgtacgccgtgctggtgtctgccctggtgctgatggctatggtcaagcggaaggacagccggggacgcgccaagagaagcggatctggcgtgaagcagaccctgaatttcgacctgctgaagctggctggcgacgtggaatccaacccaggccctactagtatggactggatttggcgcatccttttccttgtcggcgctgctaccggcgcgcattccttcgaacaggtgcaactgctggaatctggcggcggactggtgcagcctggcggatctctgagactgagctgtgccgccagcggcttcaccttcagcagccacggaatgcactgggtgcgccaggcccctggaaagggactggaatgggtgtccgtgatctccggcagcggcagcaataccggctacgccgatagcgtgaagggccggttcaccatcagccgggacaacagcaagaacaccctgtacctccagatgaacagcctgcgggccgaggacaccgccgtgtactattgtgccagacagtggggcagctacgccttcgattcttggggccagggcaccctcgtgaccgtgtcatctacgcgtgaggacctgaagaacgtgttcccacctgaggtggccgtgttcgagcctagcgaggccgagatcagccacacccagaaagccaccctcgtgtgcctggctaccggcttctaccccgaccatgtggaactgtcttggtgggtcaacggcaaagaggtgcacagcggcgtgtgtaccgacccccagccactgaaagaacagcccgccctgaacgacagccggtactgcctgagcagcagactgagagtgtccgccaccttctggcagaacccccggaaccacttcagatgccaggtgcagttctacggcctgagcgagaacgacgagtggacccaggacagagccaagcccgtgacccagatcgtgtctgccgaagcctggggcagagccgattgcggctttaccagcgagagctaccagcagggcgtgctgagcgccaccaacctgagcgtgatcggcttcagaatcctgctgctgaaagtggccggctttaacctgctgatgaccctgcggctgtggtccagc

SEQ ID NO: 5167 - DNA, 1902 bp, synthetic construct
  source 1..1902: mol_type = other DNA
atggccttaccagtgaccgccttgctcctgccgctggccttgctgctccacgccgccaggccggacatcgtgatgagccagagccctagcagcctggccgtgtccgtgggcgagaaagtgaccatgagctgcaagagcagccagtccctgctgcacagcagcaaccagaagaactacctggcctggtatcagcagaagcccggccagtcccccaaggtgctgatctactgggccagcaccagagaaagcggcgtgcccgatagattcaccggcagcggctctggcaccgacttcaccctgaccatcaccagcgtgaagtccgaggacctggctgtgtactactgccagcagtattacagctacccctggaccttcggcggaggcacccggctggaaatcaaaagactcgagatccagaaccctgatcctgccgtgtaccagctgcgggatagcaagagcagcgacaagagcgtgtgtctgttcaccgacttcgacagccagaccaacgtgtcccagagcaaggactccgacgtgtacatcaccgataagtgcgtgctggacatgcggagcatggacttcaagagcaactccgccgtggcctggtccaacaagtccgatttcgcctgcgccaacgccttcaacaacagcattatccccgaggacacattcttcccaagccccgagagcagctgcgacgtgaagctggtggaaaagagcttcgagacagacaccaacctgaacttccagatcctgtacgagatcctgctgggcaaggccaccctgtacgccgtgctggtgtctgccctggtgctgatggctatggtcaagcggaaggacagccggggacgcgccaagagaagcggatctggcgtgaagcagaccctgaatttcgacctgctgaagctggctggcgacgtggaatccaacccaggccctactagtatggactggatttggcgcatccttttccttgtcggcgctgctaccggcgcgcattccttcgaagaagtgcaactccagcagagcgtggccgagcttgtgaagcctggcgcttccgtgaagatgtcctgcaaggtgtccggctacaccctgacagaccacaccatccactggatgaagcagcggcctgagcagggcctggaatggatcggctacatctaccccagggacggcatcaccggctacaacgagaagttcaagggcaaggccacactgaccgccgacaccagcagcagcacagcctacatgcaactgaacagcctgaccagcgaggacagcgccgtgtacttctgtgccagatggggctacagctacagaaactacgcctactactacgactactggggccagggcacaaccctgaccgtgtctagtacgcgtgaggacctgaagaacgtgttcccacctgaggtggccgtgttcgagcctagcgaggccgagatcagccacacccagaaagccaccctcgtgtgcctggctaccggcttctaccccgaccatgtggaactgtcttggtgggtcaacggcaaagaggtgcacagcggcgtgtgtaccgacccccagccactgaaagaacagcccgccctgaacgacagccggtactgcctgagcagcagactgagagtgtccgccaccttctggcagaacccccggaaccacttcagatgccaggtgcagttctacggcctgagcgagaacgacgagtggacccaggacagagccaagcccgtgacccagatcgtgtctgccgaagcctggggcagagccgattgcggctttaccagcgagagctaccagcagggcgtgctgagcgccaccaacctgagcgtgatcggcttcagaatcctgctgctgaaagtggccggctttaacctgctgatgaccctgcggctgtggtccagc

SEQ ID NO: 5168 - DNA, 1893 bp, synthetic construct
  source 1..1893: mol_type = other DNA
atggccttaccagtgaccgccttgctcctgccgctggccttgctgctccacgccgccaggccggagatcgtgctgacacagagccctggcaccctgagcctgtctccaggcgaaagagccacactgagctgtcgggccagccagagcgtgtccagctcttacctggcctggtatcagcagaagcccggccaggctccccggctgctgatctacggaacaagcagcagagccaccggcatccccgacagattttctggcagcggctccggcaccgacttcaccctgacaatcagcagactggaacccgaggacttcgccgtgtactactgccagcagtacggcagcagccccttcacctttggcggaggcaccaaggtggaaatcaagagactcgagatccagaaccctgatcctgccgtgtaccagctgcgggatagcaagagcagcgacaagagcgtgtgtctgttcaccgacttcgacagccagaccaacgtgtcccagagcaaggactccgacgtgtacatcaccgataagtgcgtgctggacatgcggagcatggacttcaagagcaactccgccgtggcctggtccaacaagtccgatttcgcctgcgccaacgccttcaacaacagcattatccccgaggacacattcttcccaagccccgagagcagctgcgacgtgaagctggtggaaaagagcttcgagacagacaccaacctgaacttccagatcctgtacgagatcctgctgggcaaggccaccctgtacgccgtgctggtgtctgccctggtgctgatggctatggtcaagcggaaggacagccggggacgcgccaagagaagcggatctggcgtgaagcagaccctgaatttcgacctgctgaagctggctggcgacgtggaatccaacccaggccctactagtatggactggatttggcgcatccttttccttgtcggcgctgctaccggcgcgcattccttcgaacaggtgcaactccaggaatctggccccggactggctaagcccagcgagacactgagcctgacctgtaccgtgtccggcgacagcatcaccagctactactggtcctggatcagacagccccctggcaagggcctggaatggatcggctacatctactacagcggcagcaccaactacaaccccagcctgaagtccagagtgaccatcagcgtggacaccagcaagaaccagttctccctgaagctgagcagcgtgacagccgccgacaccgccgtgtattattgcgccagagatcagcggagaatcgccgctgccggcacccacttttacggcatggatgtgtggggccagggcaccaccgtgaccgtgtcatctacgcgtgaggacctgaagaacgtgttcccacctgaggtggccgtgttcgagcctagcgaggccgagatcagccacacccagaaagccaccctcgtgtgcctggctaccggcttctaccccgaccatgtggaactgtcttggtgggtcaacggcaaagaggtgcacagcggcgtgtgtaccgacccccagccactgaaagaacagcccgccctgaacgacagccggtactgcctgagcagcagactgagagtgtccgccaccttctggcagaacccccggaaccacttcagatgccaggtgcagttctacggcctgagcgagaacgacgagtggacccaggacagagccaagcccgtgacccagatcgtgtctgccgaagcctggggcagagccgattgcggctttaccagcgagagctaccagcagggcgtgctgagcgccaccaacctgagcgtgatcggcttcagaatcctgctgctgaaagtggccggctttaacctgctgatgaccctgcggctgtggtccagc

SEQ ID NO: 5169 - DNA, 1869 bp, synthetic construct
  source 1..1869: mol_type = other DNA
atggccttaccagtgaccgccttgctcctgccgctggccttgctgctccacgccgccaggccggacatcctgctgacccagagccccgtgatcctgtccgtgtctcctggcgagagagtgtccttcagctgtcgggccagccagagcatcggcaccaacatccactggtatcagcagcggaccaacggcagccccagactgctgattaagtacgccagcgagtccatcagcggcatccccagcagattttccggcagcggctccggcaccgacttcaccctgagcatcaacagcgtggaaagcgaggacattgccgactactactgccagcagaacaacaactggcccaccaccttcggagccggcaccaagctggaactgaagctcgagatccagaaccctgatcctgccgtgtaccagctgcgggatagcaagagcagcgacaagagcgtgtgtctgttcaccgacttcgacagccagaccaacgtgtcccagagcaaggactccgacgtgtacatcaccgataagtgcgtgctggacatgcggagcatggacttcaagagcaactccgccgtggcctggtccaacaagtccgatttcgcctgcgccaacgccttcaacaacagcattatccccgaggacacattcttcccaagccccgagagcagctgcgacgtgaagctggtggaaaagagcttcgagacagacaccaacctgaacttccagatcctgtacgagatcctgctgggcaaggccaccctgtacgccgtgctggtgtctgccctggtgctgatggctatggtcaagcggaaggacagccggggacgcgccaagagaagcggatctggcgtgaagcagaccctgaatttcgacctgctgaagctggctggcgacgtggaatccaacccaggccctactagtatggactggatttggcgcatccttttccttgtcggcgctgctaccggcgcgcattccttcgaacaggtgcagctgaagcagagcggacctggcctggtgcagcctagccagagcctgtccatcacctgtaccgtgtccggcttcagcctgaccaactacggcgtgcactgggtgcgccagagccctggaaaaggactggaatggctgggagtgatttggagcggcggcaacaccgactacaacacccccttcaccagcagactgtctatcaacaaggacaacagcaagagccaggtgttcttcaagatgaacagcctccagagcaacgacaccgccatctactactgtgctagagccctgacctactatgactacgagttcgcctactggggccagggcacactcgtgacagtgtctgctacgcgtgaggacctgaagaacgtgttcccacctgaggtggccgtgttcgagcctagcgaggccgagatcagccacacccagaaagccaccctcgtgtgcctggctaccggcttctaccccgaccatgtggaactgtcttggtgggtcaacggcaaagaggtgcacagcggcgtgtgtaccgacccccagccactgaaagaacagcccgccctgaacgacagccggtactgcctgagcagcagactgagagtgtccgccaccttctggcagaacccccggaaccacttcagatgccaggtgcagttctacggcctgagcgagaacgacgagtggacccaggacagagccaagcccgtgacccagatcgtgtctgccgaagcctggggcagagccgattgcggctttaccagcgagagctaccagcagggcgtgctgagcgccaccaacctgagcgtgatcggcttcagaatcctgctgctgaaagtggccggctttaacctgctgatgaccctgcggctgtggtccagc

SEQ ID NO: 5170 - DNA, 1848 bp, synthetic construct
  source 1..1848: mol_type = other DNA
atggccttaccagtgaccgccttgctcctgccgctggccttgctgctccacgccgccaggccgatgacccagagccccaagttcctgctggtgtctgccggcgacagagtgaccctgacatgcaaggccagccagagcgtgaacaacgacgtgtactggtatcagcaggaacccggccagtcccccaagctgctgatctactgggccagcaccagagaaagcggcgtgcccgatagattcaccggcagcggctctggcaccgacttcaccctgacaatcagcagcgtgcaggccgaggacctggccgtgtactactgcaagcagagctacaacctgtacaccttcggcggaggcaccaagctggaaatcaagagactcgagatccagaaccctgatcctgccgtgtaccagctgcgggatagcaagagcagcgacaagagcgtgtgtctgttcaccgacttcgacagccagaccaacgtgtcccagagcaaggactccgacgtgtacatcaccgataagtgcgtgctggacatgcggagcatggacttcaagagcaactccgccgtggcctggtccaacaagtccgatttcgcctgcgccaacgccttcaacaacagcattatccccgaggacacattcttcccaagccccgagagcagctgcgacgtgaagctggtggaaaagagcttcgagacagacaccaacctgaacttccagatcctgtacgagatcctgctgggcaaggccaccctgtacgccgtgctggtgtctgccctggtgctgatggctatggtcaagcggaaggacagccggggacgcgccaagagaagcggatctggcgtgaagcagaccctgaatttcgacctgctgaagctggctggcgacgtggaatccaacccaggccctactagtatggactggatttggcgcatccttttccttgtcggcgctgctaccggcgcgcattccttcgaagaatctggaagaggactggtgcagcctggcggcagcagaaagctgtcttgtgccgccagcggcttcaccttcagcaccagcggaatgcactgggtgcgccaggcccctgagaagggactggaatgggtggcctacatcagctccggcagcaccaccatctaccacgccgataccgtgaagggccggttcaccatcagccgggacaaccccaagaataccctgttcctccagatgaccagcctgcggagcgaggacaccgccatgtactattgctgcgccagaagcggccagttcggcaactacttcgactactggggccagggcaccaccctgaccgtgtcatctacgcgtgaggacctgaagaacgtgttcccacctgaggtggccgtgttcgagcctagcgaggccgagatcagccacacccagaaagccaccctcgtgtgcctggctaccggcttctaccccgaccatgtggaactgtcttggtgggtcaacggcaaagaggtgcacagcggcgtgtgtaccgacccccagccactgaaagaacagcccgccctgaacgacagccggtactgcctgagcagcagactgagagtgtccgccaccttctggcagaacccccggaaccacttcagatgccaggtgcagttctacggcctgagcgagaacgacgagtggacccaggacagagccaagcccgtgacccagatcgtgtctgccgaagcctggggcagagccgattgcggctttaccagcgagagctaccagcagggcgtgctgagcgccaccaacctgagcgtgatcggcttcagaatcctgctgctgaaagtggccggctttaacctgctgatgaccctgcggctgtggtccagc

SEQ ID NO: 5171 - DNA, 1863 bp, synthetic construct
  source 1..1863: mol_type = other DNA
atggccttaccagtgaccgccttgctcctgccgctggccttgctgctccacgccgccaggccgcagagcccatctagcctggctgtgtctgccggcgagaaagtgaccatgagctgcaagagcagccagagcctgctgaacagccggacccggaagaactacctggcctggtatcagcagaagcccggccagagccccaagctgctgatctactgggccagcaccagagaaagcggcgtgcccgatagattcaccggctctggcagcggcaccgacttcaccctgacaatcagcagcgtgcaggccgaggacctggccgtgtactactgcaagcagagcaacctgtacaccttcggcggaggcaccaagctggaaatcaagctcgagatccagaaccctgatcctgccgtgtaccagctgcgggatagcaagagcagcgacaagagcgtgtgtctgttcaccgacttcgacagccagaccaacgtgtcccagagcaaggactccgacgtgtacatcaccgataagtgcgtgctggacatgcggagcatggacttcaagagcaactccgccgtggcctggtccaacaagtccgatttcgcctgcgccaacgccttcaacaacagcattatccccgaggacacattcttcccaagccccgagagcagctgcgacgtgaagctggtggaaaagagcttcgagacagacaccaacctgaacttccagatcctgtacgagatcctgctgggcaaggccaccctgtacgccgtgctggtgtctgccctggtgctgatggctatggtcaagcggaaggacagccggggacgcgccaagagaagcggatctggcgtgaagcagaccctgaatttcgacctgctgaagctggctggcgacgtggaatccaacccaggccctactagtatggactggatttggcgcatccttttccttgtcggcgctgctaccggcgcgcattccttcgaacaggtgcagctggaagagtctggacccgagcttgtgaagcctggggccagcgtgaagctgtcctgtaaagccagcggctacaccttcaccgagtacatcatccactgggtcaagcagcggagcggccagggcctggaatggatcggctggttttaccctggctccggcagcatcaagtacaacgagaagttcaaggacaaggccaccctgaccgccgacaagtccagcagcaccgtgtacatggaactgagcggcctgaccagcgaggacagcgccgtgtatttctgcgccagacacgacggctacagctacttcgactattggggccagggcaccacactgaccgtgtcctctacgcgtgaggacctgaagaacgtgttcccacctgaggtggccgtgttcgagcctagcgaggccgagatcagccacacccagaaagccaccctcgtgtgcctggctaccggcttctaccccgaccatgtggaactgtcttggtgggtcaacggcaaagaggtgcacagcggcgtgtgtaccgacccccagccactgaaagaacagcccgccctgaacgacagccggtactgcctgagcagcagactgagagtgtccgccaccttctggcagaacccccggaaccacttcagatgccaggtgcagttctacggcctgagcgagaacgacgagtggacccaggacagagccaagcccgtgacccagatcgtgtctgccgaagcctggggcagagccgattgcggctttaccagcgagagctaccagcagggcgtgctgagcgccaccaacctgagcgtgatcggcttcagaatcctgctgctgaaagtggccggctttaacctgctgatgaccctgcggctgtggtccagc

SEQ ID NO: 5172 - DNA, 1872 bp, synthetic construct
  source 1..1872: mol_type = other DNA
atggccttaccagtgaccgccttgctcctgccgctggccttgctgctccacgccgccaggccggacatccagatgacccagagccccagcagcctgtctgcctctctgggcgagagagtgtccctgacctgtcgggccacacaggaactgagcggctacctgtcttggctgcagcagaagcccgacggcaccatcaagcggctgatctacgccgccagcaccctggatagcggcgtgcccaagagattcagcggcaacagaagcggcagcgactacagcctgaccatcagctccctggaaagcgaggacttcgccgactactactgcctgcagtacgccatctacccctacaccttcggcggaggcaccaagctggaaatcaagctcgagatccagaaccctgatcctgccgtgtaccagctgcgggatagcaagagcagcgacaagagcgtgtgtctgttcaccgacttcgacagccagaccaacgtgtcccagagcaaggactccgacgtgtacatcaccgataagtgcgtgctggacatgcggagcatggacttcaagagcaactccgccgtggcctggtccaacaagtccgatttcgcctgcgccaacgccttcaacaacagcattatccccgaggacacattcttcccaagccccgagagcagctgcgacgtgaagctggtggaaaagagcttcgagacagacaccaacctgaacttccagatcctgtacgagatcctgctgggcaaggccaccctgtacgccgtgctggtgtctgccctggtgctgatggctatggtcaagcggaaggacagccggggacgcgccaagagaagcggatctggcgtgaagcagaccctgaatttcgacctgctgaagctggctggcgacgtggaatccaacccaggccctactagtatggactggatttggcgcatccttttccttgtcggcgctgctaccggcgcgcattccttcgaagaggtgcaactgcagcagtctggccccgagcttgtgaagcctggcgcctccgtgaagatgagctgcaaggccagcggctacacctttaccagctacttcatccactgggtcaagcagaaacccggccagggcctggaatggatcggcttcatcaacccttacaacgacggcagcaagtacaacgagaagttcaagggcaaggccaccctgaccagcgacaagagcagcagcaccgcctacatggaactgtccagcctgacatccgaggacagcgccgtgtactactgcaccagggacgacggctactacggctacgccatggactactggggccagggaacaagcgtcaccgtgtcctctacgcgtgaggacctgaagaacgtgttcccacctgaggtggccgtgttcgagcctagcgaggccgagatcagccacacccagaaagccaccctcgtgtgcctggctaccggcttctaccccgaccatgtggaactgtcttggtgggtcaacggcaaagaggtgcacagcggcgtgtgtaccgacccccagccactgaaagaacagcccgccctgaacgacagccggtactgcctgagcagcagactgagagtgtccgccaccttctggcagaacccccggaaccacttcagatgccaggtgcagttctacggcctgagcgagaacgacgagtggacccaggacagagccaagcccgtgacccagatcgtgtctgccgaagcctggggcagagccgattgcggctttaccagcgagagctaccagcagggcgtgctgagcgccaccaacctgagcgtgatcggcttcagaatcctgctgctgaaagtggccggctttaacctgctgatgaccctgcggctgtggtccagc

SEQ ID NO: 5173 - DNA, 1887 bp, synthetic construct
  source 1..1887: mol_type = other DNA
atggccttaccagtgaccgccttgctcctgccgctggccttgctgctccacgccgccaggccggacaccatcgtgctgacacagagccctgcttccctggccgtgtccctgggacagagagccaccatctcttgcagagccagcgagagcgtggacagctacggcaacagcttcatgcactggtatcagcagaagcccggccagccccccaagctgctgatctacctggcctccaacctggaaagcggcgtgcccgccagattttctggcagcggcagcagaaccgacttcaccctgaccatcgaccccgtggaagccgatgatgccgccacctactactgccagcagaacaactacgacccctggaccttcggcggaggcaccaagctggaaatcaagctcgagatccagaaccctgatcctgccgtgtaccagctgcgggatagcaagagcagcgacaagagcgtgtgtctgttcaccgacttcgacagccagaccaacgtgtcccagagcaaggactccgacgtgtacatcaccgataagtgcgtgctggacatgcggagcatggacttcaagagcaactccgccgtggcctggtccaacaagtccgatttcgcctgcgccaacgccttcaacaacagcattatccccgaggacacattcttcccaagccccgagagcagctgcgacgtgaagctggtggaaaagagcttcgagacagacaccaacctgaacttccagatcctgtacgagatcctgctgggcaaggccaccctgtacgccgtgctggtgtctgccctggtgctgatggctatggtcaagcggaaggacagccggggacgcgccaagagaagcggatctggcgtgaagcagaccctgaatttcgacctgctgaagctggctggcgacgtggaatccaacccaggccctactagtatggactggatttggcgcatccttttccttgtcggcgctgctaccggcgcgcattccttcgaagaagtgcaactccagcagagcggccctgagcttgtgaagcctggcgcttccgtgaagatgagctgcaaggccagcggctacaccttcaccagctacgtgatgcactgggtcaagcagaaacctggacagggcctggaatggatcggctacatcaacccctacaacgacggcaccaagtacaacgagaagttcaagggcaaggccaccctgacaagcgacaccagcagcagcaccgcctacatggaactgaacagcctgaccagcgaggacagcgccgtgtacttctgcgccagacccatctacttcgacaacgactacttcgattactggggccagggcaccaccctgaaggtgtcctctacgcgtgaggacctgaagaacgtgttcccacctgaggtggccgtgttcgagcctagcgaggccgagatcagccacacccagaaagccaccctcgtgtgcctggctaccggcttctaccccgaccatgtggaactgtcttggtgggtcaacggcaaagaggtgcacagcggcgtgtgtaccgacccccagccactgaaagaacagcccgccctgaacgacagccggtactgcctgagcagcagactgagagtgtccgccaccttctggcagaacccccggaaccacttcagatgccaggtgcagttctacggcctgagcgagaacgacgagtggacccaggacagagccaagcccgtgacccagatcgtgtctgccgaagcctggggcagagccgattgcggctttaccagcgagagctaccagcagggcgtgctgagcgccaccaacctgagcgtgatcggcttcagaatcctgctgctgaaagtggccggctttaacctgctgatgaccctgcggctgtggtccagc

SEQ ID NO: 5174 - DNA, 1872 bp, synthetic construct
  source 1..1872: mol_type = other DNA
atggccttaccagtgaccgccttgctcctgccgctggccttgctgctccacgccgccaggccggacatccagatgacccagagccccagcagcctgtctgccagcgtgggcgacagagtgaccatcacatgcaaggccagccaggacgtgggaatcgccgtggcctggtatcagcagaaacccggcaaggtgcccaagctgctgatctactgggccagcaccagacacaccggcgtgcccgatagattttccggcagcggctccggcaccgacttcaccctgacaatcagctccctccagcccgaggacgtggcaacctactactgccagcagtacagcagctacccctacaccttcggccagggcaccaaggtggaaatcaagagactcgagatccagaaccctgatcctgccgtgtaccagctgcgggatagcaagagcagcgacaagagcgtgtgtctgttcaccgacttcgacagccagaccaacgtgtcccagagcaaggactccgacgtgtacatcaccgataagtgcgtgctggacatgcggagcatggacttcaagagcaactccgccgtggcctggtccaacaagtccgatttcgcctgcgccaacgccttcaacaacagcattatccccgaggacacattcttcccaagccccgagagcagctgcgacgtgaagctggtggaaaagagcttcgagacagacaccaacctgaacttccagatcctgtacgagatcctgctgggcaaggccaccctgtacgccgtgctggtgtctgccctggtgctgatggctatggtcaagcggaaggacagccggggacgcgccaagagaagcggatctggcgtgaagcagaccctgaatttcgacctgctgaagctggctggcgacgtggaatccaacccaggccctactagtatggactggatttggcgcatccttttccttgtcggcgctgctaccggcgcgcattccttcgaagaagtgcaactggtggaatcaggcggcggactggtgcagcctggcggatctctgagactgagctgtgccgccagcggcttcgacttcagccggtactggatgagctgggtgcgccaggcccctggcaaaggactggaatggatcggcgagatcaaccccgacagcagcaccatcaactacgcccccagcctgaaggacaagttcatcatcagccgggacaacgccaagaacagcctgtacctccagatgaactccctgcgggccgaggacaccgccgtgtactattgcgccagacccgacggcaactactggtacttcgacgtgtggggccagggaaccctcgtgaccgtgtcatctacgcgtgaggacctgaagaacgtgttcccacctgaggtggccgtgttcgagcctagcgaggccgagatcagccacacccagaaagccaccctcgtgtgcctggctaccggcttctaccccgaccatgtggaactgtcttggtgggtcaacggcaaagaggtgcacagcggcgtgtgtaccgacccccagccactgaaagaacagcccgccctgaacgacagccggtactgcctgagcagcagactgagagtgtccgccaccttctggcagaacccccggaaccacttcagatgccaggtgcagttctacggcctgagcgagaacgacgagtggacccaggacagagccaagcccgtgacccagatcgtgtctgccgaagcctggggcagagccgattgcggctttaccagcgagagctaccagcagggcgtgctgagcgccaccaacctgagcgtgatcggcttcagaatcctgctgctgaaagtggccggctttaacctgctgatgaccctgcggctgtggtccagc

SEQ ID NO: 5175 - DNA, 1872 bp, synthetic construct
  source 1..1872: mol_type = other DNA
atggccttaccagtgaccgccttgctcctgccgctggccttgctgctccacgccgccaggccggacatcgtgatgacccagagccagaagagcatgagcaccagcgtgggcgacagagtgagcatcacctgcaaggccagccaggacgtgatcaccggcgtggcctggtaccagcagaagcccggccagagccccaagctgctgatctacagcgccagctacagatacaccggcgtgcccgacagattcaccggcagcggcagcggcaccgacttcaccttcaccatcagcaacgtgcaggccgaggacctggccgtgtactactgccagcagcactacagcacccccctgaccttcggcgccggcaccaagctggagctgaagctcgagatccagaaccctgatcctgccgtgtaccagctgcgggatagcaagagcagcgacaagagcgtgtgtctgttcaccgacttcgacagccagaccaacgtgtcccagagcaaggactccgacgtgtacatcaccgataagtgcgtgctggacatgcggagcatggacttcaagagcaactccgccgtggcctggtccaacaagtccgatttcgcctgcgccaacgccttcaacaacagcattatccccgaggacacattcttcccaagccccgagagcagctgcgacgtgaagctggtggaaaagagcttcgagacagacaccaacctgaacttccagatcctgtacgagatcctgctgggcaaggccaccctgtacgccgtgctggtgtctgccctggtgctgatggctatggtcaagcggaaggacagccggggacgcgccaagagaagcggatctggcgtgaagcagaccctgaatttcgacctgctgaagctggctggcgacgtggaatccaacccaggccctactagtatggactggatttggcgcatccttttccttgtcggcgctgctaccggcgcgcattccttcgaacaggtgcagctgcagcagcccggcgccgagctggtgagacccggcgccagcgtgaagctgagctgcaaggccagcggctacagcttcaccacctactggatgaactgggtgaagcagagacccggccagggcctggagtggatcggcatgatccaccccagcgacagcgagaccagactgaaccagaagttcaaggacaaggccaccctgaccgtggacaagagcagcagcaccgcctacatgcagctgagcagccccaccagcgaggacagcgccgtgtactactgcgccagaagcaccatgatcgccaccagagccatggactactggggccagggcaccagcgtgaccgtgagcagcacgcgtgaggacctgaagaacgtgttcccacctgaggtggccgtgttcgagcctagcgaggccgagatcagccacacccagaaagccaccctcgtgtgcctggctaccggcttctaccccgaccatgtggaactgtcttggtgggtcaacggcaaagaggtgcacagcggcgtgtgtaccgacccccagccactgaaagaacagcccgccctgaacgacagccggtactgcctgagcagcagactgagagtgtccgccaccttctggcagaacccccggaaccacttcagatgccaggtgcagttctacggcctgagcgagaacgacgagtggacccaggacagagccaagcccgtgacccagatcgtgtctgccgaagcctggggcagagccgattgcggctttaccagcgagagctaccagcagggcgtgctgagcgccaccaacctgagcgtgatcggcttcagaatcctgctgctgaaagtggccggctttaacctgctgatgaccctgcggctgtggtccagc

SEQ ID NO: 5176 - DNA, 1890 bp, synthetic construct
  source 1..1890: mol_type = other DNA
atggccttaccagtgaccgccttgctcctgccgctggccttgctgctccacgccgccaggccgcagagcgtgctgacacagcctccatccgtgtctggcgctccaggccagagagtgaccatctcctgtaccggcagcggcagcaacatcggagccccctacgacgtgtcctggtatcagcaactgcctggcaccgcccccaagctgctgatctaccacaacaacaagcggcccagcggcgtgcccgatagattcagcggctctaagagcggcaccagcgccagcctggctatcactggactccaggccgaggacgaggccgactactactgtgccacagtggaagccggcctgagcggctctgtgtttggcggcggaacaaagctgaccgtgctgggagctctcgagatccagaaccctgatcctgccgtgtaccagctgcgggatagcaagagcagcgacaagagcgtgtgtctgttcaccgacttcgacagccagaccaacgtgtcccagagcaaggactccgacgtgtacatcaccgataagtgcgtgctggacatgcggagcatggacttcaagagcaactccgccgtggcctggtccaacaagtccgatttcgcctgcgccaacgccttcaacaacagcattatccccgaggacacattcttcccaagccccgagagcagctgcgacgtgaagctggtggaaaagagcttcgagacagacaccaacctgaacttccagatcctgtacgagatcctgctgggcaaggccaccctgtacgccgtgctggtgtctgccctggtgctgatggctatggtcaagcggaaggacagccggggacgcgccaagagaagcggatctggcgtgaagcagaccctgaatttcgacctgctgaagctggctggcgacgtggaatccaacccaggccctactagtatggactggatttggcgcatccttttccttgtcggcgctgctaccggcgcgcattccttcgaacaggtgcaactggtgcagagcggagccgaagtgaagaaacctggggccagcgtgaaggtgtcctgcaaggtgtccggctacaccctgaccgagctgagcattcactgggtgcgccaggcccctggcaagggactggaatggatgggcggcttcgaccccgaagagaacgagatcgtgtacgcccagcggttccagggcagagtgacaatgaccgaggacaccagcaccgacaccgcctacatggaactgagcagcctgcggagcgaggataccgccgtgtactactgcgccatcgtgggcagcttcagccctctgacactgggcctgtggggccagggaactatggtcaccgtgtccagcacgcgtgaggacctgaagaacgtgttcccacctgaggtggccgtgttcgagcctagcgaggccgagatcagccacacccagaaagccaccctcgtgtgcctggctaccggcttctaccccgaccatgtggaactgtcttggtgggtcaacggcaaagaggtgcacagcggcgtgtgtaccgacccccagccactgaaagaacagcccgccctgaacgacagccggtactgcctgagcagcagactgagagtgtccgccaccttctggcagaacccccggaaccacttcagatgccaggtgcagttctacggcctgagcgagaacgacgagtggacccaggacagagccaagcccgtgacccagatcgtgtctgccgaagcctggggcagagccgattgcggctttaccagcgagagctaccagcagggcgtgctgagcgccaccaacctgagcgtgatcggcttcagaatcctgctgctgaaagtggccggctttaacctgctgatgaccctgcggctgtggtccagc

SEQ ID NO: 5177 - DNA, 1890 bp, synthetic construct
  source 1..1890: mol_type = other DNA
atggccttaccagtgaccgccttgctcctgccgctggccttgctgctccacgccgccaggccgcagagcgtgctgacacagcctccatccgtgtctggcgctccaggccagagagtgaccatctcctgtaccggcagcggcagcaacatcggagccccctacgacgtgtcctggtatcagcaactgcctggcaccgcccccaagctgctgatctaccacaacaacaagcggcccagcggcgtgcccgatagattcagcggctctaagagcggcaccagcgccagcctggctatcactggactccaggccgaggacgaggccgactactactgccagagctacgacagcagcagcatcagcaccatcttcggcggaggcaccaagctgacagtgctgggagctctcgagatccagaaccctgatcctgccgtgtaccagctgcgggatagcaagagcagcgacaagagcgtgtgtctgttcaccgacttcgacagccagaccaacgtgtcccagagcaaggactccgacgtgtacatcaccgataagtgcgtgctggacatgcggagcatggacttcaagagcaactccgccgtggcctggtccaacaagtccgatttcgcctgcgccaacgccttcaacaacagcattatccccgaggacacattcttcccaagccccgagagcagctgcgacgtgaagctggtggaaaagagcttcgagacagacaccaacctgaacttccagatcctgtacgagatcctgctgggcaaggccaccctgtacgccgtgctggtgtctgccctggtgctgatggctatggtcaagcggaaggacagccggggacgcgccaagagaagcggatctggcgtgaagcagaccctgaatttcgacctgctgaagctggctggcgacgtggaatccaacccaggccctactagtatggactggatttggcgcatccttttccttgtcggcgctgctaccggcgcgcattccttcgaacaggtgcaactggtgcagagcggagccgaagtgaagaaacctggggccagcgtgaaggtgtcctgcaaggtgtccggctacaccctgaccgagctgagcattcactgggtgcgccaggcccctggcaagggactggaatggatgggcggcttcgaccccgaagagaacgagatcgtgtacgcccagcggttccagggcagagtgacaatgaccgaggacaccagcaccgacaccgcctacatggaactgagcagcctgcggagcgaggataccgccgtgtactactgtgccatcgtgggcagcttcagcggaatcgcctacagaccttggggccagggcacaatggtcaccgtgtctagcacgcgtgaggacctgaagaacgtgttcccacctgaggtggccgtgttcgagcctagcgaggccgagatcagccacacccagaaagccaccctcgtgtgcctggctaccggcttctaccccgaccatgtggaactgtcttggtgggtcaacggcaaagaggtgcacagcggcgtgtgtaccgacccccagccactgaaagaacagcccgccctgaacgacagccggtactgcctgagcagcagactgagagtgtccgccaccttctggcagaacccccggaaccacttcagatgccaggtgcagttctacggcctgagcgagaacgacgagtggacccaggacagagccaagcccgtgacccagatcgtgtctgccgaagcctggggcagagccgattgcggctttaccagcgagagctaccagcagggcgtgctgagcgccaccaacctgagcgtgatcggcttcagaatcctgctgctgaaagtggccggctttaacctgctgatgaccctgcggctgtggtccagc

SEQ ID NO: 5178 - DNA, 1854 bp, synthetic construct
  source 1..1854: mol_type = other DNA
atggccttaccagtgaccgccttgctcctgccgctggccttgctgctccacgccgccaggccggacatccagatgacccagagccccagcagcctgtctgccagcgtgggcgacagagtgaccatcacctgtagagccagccagggcatcagaaacaacctggcctggtatcagcagaagcccggcaaggcccccaagcggctgatctacgccgccagcaatctccagagcggcgtgcccagcagattcacaggctctggcagcggcaccgagttcaccctgatcgtgtctagcctccagcccgaggacttcgccacctactactgcctccagcaccacagctaccccctgacatctggcggaggcaccaaggtggaactcgagatccagaaccctgatcctgccgtgtaccagctgcgggatagcaagagcagcgacaagagcgtgtgtctgttcaccgacttcgacagccagaccaacgtgtcccagagcaaggactccgacgtgtacatcaccgataagtgcgtgctggacatgcggagcatggacttcaagagcaactccgccgtggcctggtccaacaagtccgatttcgcctgcgccaacgccttcaacaacagcattatccccgaggacacattcttcccaagccccgagagcagctgcgacgtgaagctggtggaaaagagcttcgagacagacaccaacctgaacttccagatcctgtacgagatcctgctgggcaaggccaccctgtacgccgtgctggtgtctgccctggtgctgatggctatggtcaagcggaaggacagccggggacgcgccaagagaagcggatctggcgtgaagcagaccctgaatttcgacctgctgaagctggctggcgacgtggaatccaacccaggccctactagtatggactggatttggcgcatccttttccttgtcggcgctgctaccggcgcgcattccttcgaagaggtgcaggtgctggaaagtggcggaggactggtgcagcctggcggctctctgagactgtcttgtgccgccagcggcttcaccttcagcagctacgccatgagctgggtgcgccaggcccctggaaaaggactggaatgggtgtccgccatcagcggctctggcgggtctaccaactacgccgatagcgtgaagggccggttcaccatcagccgggacaacagcaagaacaccctgtacctccagatgaacagcctgcgggccgaggacaccgccgtgtattattgtgccggcagcagcgggtggagcgagtattggggacagggcaccctcgtgaccgtgtcctctacgcgtgaggacctgaagaacgtgttcccacctgaggtggccgtgttcgagcctagcgaggccgagatcagccacacccagaaagccaccctcgtgtgcctggctaccggcttctaccccgaccatgtggaactgtcttggtgggtcaacggcaaagaggtgcacagcggcgtgtgtaccgacccccagccactgaaagaacagcccgccctgaacgacagccggtactgcctgagcagcagactgagagtgtccgccaccttctggcagaacccccggaaccacttcagatgccaggtgcagttctacggcctgagcgagaacgacgagtggacccaggacagagccaagcccgtgacccagatcgtgtctgccgaagcctggggcagagccgattgcggctttaccagcgagagctaccagcagggcgtgctgagcgccaccaacctgagcgtgatcggcttcagaatcctgctgctgaaagtggccggctttaacctgctgatgaccctgcggctgtggtccagc

SEQ ID NO: 5179 - DNA, 1872 bp, synthetic construct
  source 1..1872: mol_type = other DNA
atggccttaccagtgaccgccttgctcctgccgctggccttgctgctccacgccgccaggccggacgagatccagctggtgcagagcggagccgaagtgaagaagcctggcgagagcctgcggatcagctgcaagggcagcggcttcaacatcgaggactactacatccactgggtgcgccagatgcccggcaagggcctggaatggatgggcagaatcgaccccgagaacgacgagactaagtacggccccatcttccagggccacgtgaccatcagcgccgacaccagcatcaacaccgtgtacctccagtggtccagcctgaaggccagcgacaccgccatgtactactgcgcctttagaggcggcgtgtactggggccagggcaccacagtgacagtgtctagcctcgagatccagaaccctgatcctgccgtgtaccagctgcgggatagcaagagcagcgacaagagcgtgtgtctgttcaccgacttcgacagccagaccaacgtgtcccagagcaaggactccgacgtgtacatcaccgataagtgcgtgctggacatgcggagcatggacttcaagagcaactccgccgtggcctggtccaacaagtccgatttcgcctgcgccaacgccttcaacaacagcattatccccgaggacacattcttcccaagccccgagagcagctgcgacgtgaagctggtggaaaagagcttcgagacagacaccaacctgaacttccagatcctgtacgagatcctgctgggcaaggccaccctgtacgccgtgctggtgtctgccctggtgctgatggctatggtcaagcggaaggacagccggggacgcgccaagagaagcggatctggcgtgaagcagaccctgaatttcgacctgctgaagctggctggcgacgtggaatccaacccaggccctactagtatggactggatttggcgcatccttttccttgtcggcgctgctaccggcgcgcattccttcgaagatgtcgtgatgacccagagccccgacagcctggctgtgtctctgggagagagagccaccatcaactgcaagtccagccagtccctgctggacagcgacggcaagacctacctgaactggctccagcagaagcccggccagccccccaagagactgatctccctggtgtccaagctggactccggcgtgcccgatagattttccggctctggcagcggcaccgacttcaccctgacaatcagctcccttcaggccgaggacgtggccgtgtactattgctggcagggcacacacttccccggcacctttggcggaggcaccaaggtggaaatcaagacgcgtgaggacctgaagaacgtgttcccacctgaggtggccgtgttcgagcctagcgaggccgagatcagccacacccagaaagccaccctcgtgtgcctggctaccggcttctaccccgaccatgtggaactgtcttggtgggtcaacggcaaagaggtgcacagcggcgtgtgtaccgacccccagccactgaaagaacagcccgccctgaacgacagccggtactgcctgagcagcagactgagagtgtccgccaccttctggcagaacccccggaaccacttcagatgccaggtgcagttctacggcctgagcgagaacgacgagtggacccaggacagagccaagcccgtgacccagatcgtgtctgccgaagcctggggcagagccgattgcggctttaccagcgagagctaccagcagggcgtgctgagcgccaccaacctgagcgtgatcggcttcagaatcctgctgctgaaagtggccggctttaacctgctgatgaccctgcggctgtggtccagc

SEQ ID NO: 5180 - DNA, 1893 bp, synthetic construct
  source 1..1893: mol_type = other DNA
atggccttaccagtgaccgccttgctcctgccgctggccttgctgctccacgccgccaggccggacgagcttgtgatgacccagagccccagcagcctgacagtgacagccggcgagaaagtgaccatgagctgcaagagcagccagagcctgctgaacagcggcaaccagaagaactacctgacctggtatcagcagaagcccggccagccccccaagctgctgatctactgggccagcaccagagaaagcggcgtgcccgatagattcaccggctctggcagcggcaccgacttcaccctgacaatcagcagcgtgcaggccgaggacctggccgtgtactactgccagaacgactacagctaccccctgaccttcggagccggcaccaagctggaaatcaagctcgagatccagaaccctgatcctgccgtgtaccagctgcgggatagcaagagcagcgacaagagcgtgtgtctgttcaccgacttcgacagccagaccaacgtgtcccagagcaaggactccgacgtgtacatcaccgataagtgcgtgctggacatgcggagcatggacttcaagagcaactccgccgtggcctggtccaacaagtccgatttcgcctgcgccaacgccttcaacaacagcattatccccgaggacacattcttcccaagccccgagagcagctgcgacgtgaagctggtggaaaagagcttcgagacagacaccaacctgaacttccagatcctgtacgagatcctgctgggcaaggccaccctgtacgccgtgctggtgtctgccctggtgctgatggctatggtcaagcggaaggacagccggggacgcgccaagagaagcggatctggcgtgaagcagaccctgaatttcgacctgctgaagctggctggcgacgtggaatccaacccaggccctactagtatggactggatttggcgcatccttttccttgtcggcgctgctaccggcgcgcattccttcgaagaagtgcagctgctggaacagtctggcgccgaacttgtgcggcctggcaccagcgtgaagatcagctgtaaagccagcggctacgccttcaccaactactggctgggctgggtcaagcagaggcctggacacggcctggaatggatcggcgacatctttcccggctccggcaacatccactacaacgagaagttcaagggcaaggccaccctgaccgccgacaagtctagcagcaccgcctacatgcagctgtccagcctgacctttgaggacagcgccgtgtatttctgtgcccggctgcggaactgggacgagcccatggattattggggccagggcaccaccgtgaccgtgtctagtacgcgtgaggacctgaagaacgtgttcccacctgaggtggccgtgttcgagcctagcgaggccgagatcagccacacccagaaagccaccctcgtgtgcctggctaccggcttctaccccgaccatgtggaactgtcttggtgggtcaacggcaaagaggtgcacagcggcgtgtgtaccgacccccagccactgaaagaacagcccgccctgaacgacagccggtactgcctgagcagcagactgagagtgtccgccaccttctggcagaacccccggaaccacttcagatgccaggtgcagttctacggcctgagcgagaacgacgagtggacccaggacagagccaagcccgtgacccagatcgtgtctgccgaagcctggggcagagccgattgcggctttaccagcgagagctaccagcagggcgtgctgagcgccaccaacctgagcgtgatcggcttcagaatcctgctgctgaaagtggccggctttaacctgctgatgaccctgcggctgtggtccagc

SEQ ID NO: 5181 - DNA, 1896 bp, synthetic construct
  source 1..1896: mol_type = other DNA
atggccttaccagtgaccgccttgctcctgccgctggccttgctgctccacgccgccaggccggacgagctgcagatgacccagagccctagcagcctgtctgccagcgtgggcgacagagtgaccatcacctgtagagccagccagagcatcagcagctacctgaactggtatcagcagaagcccggccagccccccaaactgctgatctactgggccagcaccagagaaagcggcgtgcccgatagattcagcggcagcgagagcggcaccaactacaccctgaccatcagctccctgcagcccgaggacttcgccacctacttttgccagcagagcgacagcctgcccatcacctttggacagggcacccggctggacattcagctcgagatccagaaccctgatcctgccgtgtaccagctgcgggatagcaagagcagcgacaagagcgtgtgtctgttcaccgacttcgacagccagaccaacgtgtcccagagcaaggactccgacgtgtacatcaccgataagtgcgtgctggacatgcggagcatggacttcaagagcaactccgccgtggcctggtccaacaagtccgatttcgcctgcgccaacgccttcaacaacagcattatccccgaggacacattcttcccaagccccgagagcagctgcgacgtgaagctggtggaaaagagcttcgagacagacaccaacctgaacttccagatcctgtacgagatcctgctgggcaaggccaccctgtacgccgtgctggtgtctgccctggtgctgatggctatggtcaagcggaaggacagccggggacgcgccaagagaagcggatctggcgtgaagcagaccctgaatttcgacctgctgaagctggctggcgacgtggaatccaacccaggccctactagtatggactggatttggcgcatccttttccttgtcggcgctgctaccggcgcgcattccttcgaagaggtgcaactgctggaatctgggggcggagtggtgcagcctggcagaagcctgagactgagctgtgccgccagcggcttcaccttcagctcctacggaatgcactgggtgcgccaggcccctggcaaaggactggaatgggtggccgtgatctcctacgacggcagcaacaagtactacgccgacagcgtgaagggccggttcaccatcagccgggacaacagcaagaacaccctgtacctgcagatgaacagcctgcgggccgaggacaccgccgtgtactactgcgccaaggatatgggctggggcagcggctggcggccttactactactacggcatggacgtgtggggccagggcaccaccgtgacagtgtcatctacgcgtgaggacctgaagaacgtgttcccacctgaggtggccgtgttcgagcctagcgaggccgagatcagccacacccagaaagccaccctcgtgtgcctggctaccggcttctaccccgaccatgtggaactgtcttggtgggtcaacggcaaagaggtgcacagcggcgtgtgtaccgacccccagccactgaaagaacagcccgccctgaacgacagccggtactgcctgagcagcagactgagagtgtccgccaccttctggcagaacccccggaaccacttcagatgccaggtgcagttctacggcctgagcgagaacgacgagtggacccaggacagagccaagcccgtgacccagatcgtgtctgccgaagcctggggcagagccgattgcggctttaccagcgagagctaccagcagggcgtgctgagcgccaccaacctgagcgtgatcggcttcagaatcctgctgctgaaagtggccggctttaacctgctgatgaccctgcggctgtggtccagc

SEQ ID NO: 5182 - DNA, 1887 bp, synthetic construct
  source 1..1887: mol_type = other DNA
atggccttaccagtgaccgccttgctcctgccgctggccttgctgctccacgccgccaggccggacgacatccaaatgacacagagtccttctagtttgagtgcgagcgtgggggacagggtgaccattacctgcagggccagccagagcataagctcataccttaattggtaccagcaaaaaccaggtaaggcccctaagctcctgatctacgcggcctcttcacttcaatctggggtcccttcccgcttcagtggctccggcagcggcaccgacttcacgctcactatatcaagtctgcagcctgaggatctcgccacctattactgtcaacaaagttattccacccctttcacctttggaccgggcacgaaagtggatattaagctcgagatccagaaccctgatcctgccgtgtaccagctgcgggatagcaagagcagcgacaagagcgtgtgtctgttcaccgacttcgacagccagaccaacgtgtcccagagcaaggactccgacgtgtacatcaccgataagtgcgtgctggacatgcggagcatggacttcaagagcaactccgccgtggcctggtccaacaagtccgatttcgcctgcgccaacgccttcaacaacagcattatccccgaggacacattcttcccaagccccgagagcagctgcgacgtgaagctggtggaaaagagcttcgagacagacaccaacctgaacttccagatcctgtacgagatcctgctgggcaaggccaccctgtacgccgtgctggtgtctgccctggtgctgatggctatggtcaagcggaaggacagccggggacgcgccaagagaagcggatctggcgtgaagcagaccctgaatttcgacctgctgaagctggctggcgacgtggaatccaacccaggccctactagtatggactggatttggcgcatccttttccttgtcggcgctgctaccggcgcgcattccttcgaagtgcacgaggtccagcttgtgcagtccggggcagaggtcaagaagcctggttctagcgtaaaagtgagttgcaaagcctcaggtgggacattttcatcctacgcgatcagttgggttagacaggctcctggtcaagggctggaatggatgggcggaattattccaatcttcggaacagcgaattacgcgcagaagttccagggtagagtaaccatcactgctgacaagtccacctccaccgcatacatggaattgtctagtctccggagcgaggatacggcggtgtattattgtgctacgttcgccctgtttggcttccgcgaacaggctttcgacatctgggggcagggcacgacagtcacggttagtagtacgcgtgaggacctgaagaacgtgttcccacctgaggtggccgtgttcgagcctagcgaggccgagatcagccacacccagaaagccaccctcgtgtgcctggctaccggcttctaccccgaccatgtggaactgtcttggtgggtcaacggcaaagaggtgcacagcggcgtgtgtaccgacccccagccactgaaagaacagcccgccctgaacgacagccggtactgcctgagcagcagactgagagtgtccgccaccttctggcagaacccccggaaccacttcagatgccaggtgcagttctacggcctgagcgagaacgacgagtggacccaggacagagccaagcccgtgacccagatcgtgtctgccgaagcctggggcagagccgattgcggctttaccagcgagagctaccagcagggcgtgctgagcgccaccaacctgagcgtgatcggcttcagaatcctgctgctgaaagtggccggctttaacctgctgatgaccctgcggctgtggtccagc

SEQ ID NO: 5183 - DNA, 1881 bp, synthetic construct
  source 1..1881: mol_type = other DNA
atggccttaccagtgaccgccttgctcctgccgctggccttgctgctccacgccgccaggccggacatcgtgctgacccagagccctctgagcctggccgtgtctctgggacagcctgccatcatcagctgcaaggccagccagagcgtgtcctttgccggcacctctctgatgcactggtatcaccagaagcccggccagcagcccagactgctgatctacagagccagcaacctggaagccggcgtgcccgatagattttccggcagcggcagcaagaccgacttcaccctgaccatcagccccgtggaagccgaagatgccgccacctactactgccagcagagcagagagtacccctacaccttcggcggaggcaccaagctggaaatcaagaggctcgagatccagaaccctgatcctgccgtgtaccagctgcgggatagcaagagcagcgacaagagcgtgtgtctgttcaccgacttcgacagccagaccaacgtgtcccagagcaaggactccgacgtgtacatcaccgataagtgcgtgctggacatgcggagcatggacttcaagagcaactccgccgtggcctggtccaacaagtccgatttcgcctgcgccaacgccttcaacaacagcattatccccgaggacacattcttcccaagccccgagagcagctgcgacgtgaagctggtggaaaagagcttcgagacagacaccaacctgaacttccagatcctgtacgagatcctgctgggcaaggccaccctgtacgccgtgctggtgtctgccctggtgctgatggctatggtcaagcggaaggacagccggggacgcgccaagagaagcggatctggcgtgaagcagaccctgaatttcgacctgctgaagctggctggcgacgtggaatccaacccaggccctactagtatggactggatttggcgcatccttttccttgtcggcgctgctaccggcgcgcattccttcgaacaggtccaactggtgcagagcggagccgaggtcgtgaagcctggcgcttccgtgaagattagctgcaaagccagcggctacacctttaccggctactttatgaactgggtcaagcagagccctggccagagcctggaatggatcggcagaatccacccctacgacggcgacaccttctacaaccagaagttccagggcaaggccaccctgacagtggacaagagcagcaacaccgcccacatggaactgctgagcctgaccagcgaggacttcgccgtgtactactgcaccagatacgacggcagccgggctatggactattggggccagggcaccaccgtgaccgtgtctagtacgcgtgaggacctgaagaacgtgttcccacctgaggtggccgtgttcgagcctagcgaggccgagatcagccacacccagaaagccaccctcgtgtgcctggctaccggcttctaccccgaccatgtggaactgtcttggtgggtcaacggcaaagaggtgcacagcggcgtgtgtaccgacccccagccactgaaagaacagcccgccctgaacgacagccggtactgcctgagcagcagactgagagtgtccgccaccttctggcagaacccccggaaccacttcagatgccaggtgcagttctacggcctgagcgagaacgacgagtggacccaggacagagccaagcccgtgacccagatcgtgtctgccgaagcctggggcagagccgattgcggctttaccagcgagagctaccagcagggcgtgctgagcgccaccaacctgagcgtgatcggcttcagaatcctgctgctgaaagtggccggctttaacctgctgatgaccctgcggctgtggtccagc

SEQ ID NO: 5184 - DNA, 1872 bp, synthetic construct
  source 1..1872: mol_type = other DNA
atggccttaccagtgaccgccttgctcctgccgctggccttgctgctccacgccgccaggccggacgacgttgtgatgacccagacccccctgagcctgcctgtgacacctggcgaacctgccagcatcagctgtcggagcagccagagcctggtgcacagaaacggcaacacctacctgcactggtatctccagaagcccggccagagccccaagctgctgatccacaaggtgtccaacagattcagcggcgtgcccgacagattctccggcagcggctctggcaccgacttcaccctgaagatcagccgggtggaagccgaggacctgggcgtgtacttctgtagccagagcacccatgtgccccccctgacatttggagccggcaccaagctggaactgaagctcgagatccagaaccctgatcctgccgtgtaccagctgcgggatagcaagagcagcgacaagagcgtgtgtctgttcaccgacttcgacagccagaccaacgtgtcccagagcaaggactccgacgtgtacatcaccgataagtgcgtgctggacatgcggagcatggacttcaagagcaactccgccgtggcctggtccaacaagtccgatttcgcctgcgccaacgccttcaacaacagcattatccccgaggacacattcttcccaagccccgagagcagctgcgacgtgaagctggtggaaaagagcttcgagacagacaccaacctgaacttccagatcctgtacgagatcctgctgggcaaggccaccctgtacgccgtgctggtgtctgccctggtgctgatggctatggtcaagcggaaggacagccggggacgcgccaagagaagcggatctggcgtgaagcagaccctgaatttcgacctgctgaagctggctggcgacgtggaatccaacccaggccctactagtatggactggatttggcgcatccttttccttgtcggcgctgctaccggcgcgcattccttcgaagaagtgcagctggtgcagtctggcgctgaggtggaaaagcctggggccagcgtgaagattagctgcaaggccagcggcagcagcttcaccggctacaacatgaactgggtgcgccagaacatcggcaagagcctggaatggatcggagccatcgacccctactacggcggcaccagctacaaccagaagttcaagggcagagccaccctgaccgtggacaagagcaccagcaccgcctacatgcacctgaagtccctgcggagcgaggacaccgccgtgtactactgtgtgtccggcatggaatattggggccagggcaccagcgtgaccgtgtctagtacgcgtgaggacctgaagaacgtgttcccacctgaggtggccgtgttcgagcctagcgaggccgagatcagccacacccagaaagccaccctcgtgtgcctggctaccggcttctaccccgaccatgtggaactgtcttggtgggtcaacggcaaagaggtgcacagcggcgtgtgtaccgacccccagccactgaaagaacagcccgccctgaacgacagccggtactgcctgagcagcagactgagagtgtccgccaccttctggcagaacccccggaaccacttcagatgccaggtgcagttctacggcctgagcgagaacgacgagtggacccaggacagagccaagcccgtgacccagatcgtgtctgccgaagcctggggcagagccgattgcggctttaccagcgagagctaccagcagggcgtgctgagcgccaccaacctgagcgtgatcggcttcagaatcctgctgctgaaagtggccggctttaacctgctgatgaccctgcggctgtggtccagc

SEQ ID NO: 5185 - DNA, 1866 bp, synthetic construct
  source 1..1866: mol_type = other DNA
atggccttaccagtgaccgccttgctcctgccgctggccttgctgctccacgccgccaggccggacgagatcgtgatgacccagacccctgccaccctgtctgtgtctgccggcgagagagtgaccattacctgcaaggccagccagagcgtgtccaacgacgtgacctggtatcagcagaagcccggccaggcccccagactgctgatctacagcgccagcaacagatacagcggcgtgcccgccagattttccggcagcggctacggcaccgagttcaccttcaccatcagcagcgtgcagagcgaggacttcgccgtgtacttctgtcagcaagactacagcagcttcggccagggcaccaagctggaaatcaagaggctcgagatccagaaccctgatcctgccgtgtaccagctgcgggatagcaagagcagcgacaagagcgtgtgtctgttcaccgacttcgacagccagaccaacgtgtcccagagcaaggactccgacgtgtacatcaccgataagtgcgtgctggacatgcggagcatggacttcaagagcaactccgccgtggcctggtccaacaagtccgatttcgcctgcgccaacgccttcaacaacagcattatccccgaggacacattcttcccaagccccgagagcagctgcgacgtgaagctggtggaaaagagcttcgagacagacaccaacctgaacttccagatcctgtacgagatcctgctgggcaaggccaccctgtacgccgtgctggtgtctgccctggtgctgatggctatggtcaagcggaaggacagccggggacgcgccaagagaagcggatctggcgtgaagcagaccctgaatttcgacctgctgaagctggctggcgacgtggaatccaacccaggccctactagtatggactggatttggcgcatccttttccttgtcggcgctgctaccggcgcgcattccttcgaacaggtgcagctggtggaatctggacctggcgtggtgcagcctggcagaagcctgagaatcagctgtgccgtgtccggcttcagcgtgaccaactacggcgtgcactgggtgcgccagccacctggaaaaggactggaatggctgggcgtgatctgggctggcggcatcaccaactacaacagcgccttcatgtcccggctgaccatctccaaggacaacagcaagaacaccgtgtacctccagatgaacagcctgcgggccgaggacaccgccatgtactactgtgcttccagaggcggccactacggctacgccctggattattggggccagggaaccctcgtgaccgtgtcctctacgcgtgaggacctgaagaacgtgttcccacctgaggtggccgtgttcgagcctagcgaggccgagatcagccacacccagaaagccaccctcgtgtgcctggctaccggcttctaccccgaccatgtggaactgtcttggtgggtcaacggcaaagaggtgcacagcggcgtgtgtaccgacccccagccactgaaagaacagcccgccctgaacgacagccggtactgcctgagcagcagactgagagtgtccgccaccttctggcagaacccccggaaccacttcagatgccaggtgcagttctacggcctgagcgagaacgacgagtggacccaggacagagccaagcccgtgacccagatcgtgtctgccgaagcctggggcagagccgattgcggctttaccagcgagagctaccagcagggcgtgctgagcgccaccaacctgagcgtgatcggcttcagaatcctgctgctgaaagtggccggctttaacctgctgatgaccctgcggctgtggtccagc

SEQ ID NO: 5186 - DNA, 1872 bp, synthetic construct
  source 1..1872: mol_type = other DNA
atggccttaccagtgaccgccttgctcctgccgctggccttgctgctccacgccgccaggccggacatccagatgacccagaccgccagcagcctgcctgcctctctgggcgacagagtgaccatctcctgtagcgccagccaggacatcagcaactacctgaactggtatcagcagaaacccgacggcaccgtgaagctgctgatcttctacagcagcaacctgcacagcggcgtgcccagcagattttctggcggcggaagcggcaccgactacagcctgaccatcagcaatctggaacccgaggacattgccacctacttttgccaccagtacagcaagctgccctggacctttggcggaggcaccaagctggaaatcaagagactcgagatccagaaccctgatcctgccgtgtaccagctgcgggatagcaagagcagcgacaagagcgtgtgtctgttcaccgacttcgacagccagaccaacgtgtcccagagcaaggactccgacgtgtacatcaccgataagtgcgtgctggacatgcggagcatggacttcaagagcaactccgccgtggcctggtccaacaagtccgatttcgcctgcgccaacgccttcaacaacagcattatccccgaggacacattcttcccaagccccgagagcagctgcgacgtgaagctggtggaaaagagcttcgagacagacaccaacctgaacttccagatcctgtacgagatcctgctgggcaaggccaccctgtacgccgtgctggtgtctgccctggtgctgatggctatggtcaagcggaaggacagccggggacgcgccaagagaagcggatctggcgtgaagcagaccctgaatttcgacctgctgaagctggctggcgacgtggaatccaacccaggccctactagtatggactggatttggcgcatccttttccttgtcggcgctgctaccggcgcgcattccttcgaagaagtgaccctggtggaaagcggcggagacttcgtgaagcctggcggctctctgaaggtgtcctgtgccgccagcggcttcgcctttagccactacgccatgagctgggtgcgccagacccctgccaagagactggaatgggtggcctacatcagcagcggcggctccggcacctactactccgatagcgtgaagggccggttcaccatcagccgggacaacgccaagaacaccctgtacctccagatgcggagcctgcggagcgaggacagcgccatgtatttctgcaccagagtgaagctgggcacctattacttcgactcttggggccagggcaccaccctgaccgtgtcatctacgcgtgaggacctgaagaacgtgttcccacctgaggtggccgtgttcgagcctagcgaggccgagatcagccacacccagaaagccaccctcgtgtgcctggctaccggcttctaccccgaccatgtggaactgtcttggtgggtcaacggcaaagaggtgcacagcggcgtgtgtaccgacccccagccactgaaagaacagcccgccctgaacgacagccggtactgcctgagcagcagactgagagtgtccgccaccttctggcagaacccccggaaccacttcagatgccaggtgcagttctacggcctgagcgagaacgacgagtggacccaggacagagccaagcccgtgacccagatcgtgtctgccgaagcctggggcagagccgattgcggctttaccagcgagagctaccagcagggcgtgctgagcgccaccaacctgagcgtgatcggcttcagaatcctgctgctgaaagtggccggctttaacctgctgatgaccctgcggctgtggtccagc

SEQ ID NO: 5187 - DNA, 1878 bp, synthetic construct
  source 1..1878: mol_type = other DNA
atggccttaccagtgaccgccttgctcctgccgctggccttgctgctccacgccgccaggccgcagttcgtgctgacccagagcccttctgcctctgctgccctgggagcctctgccaagctgacctgtacactgagcagcgcccacaagacctacaccatcgactggtatcagcagcagaagggaaaggcccccagatacctgatccaagtgaagtccgacggcacctacacaaaggccaccggcgtgcccgatagattcagcggcagtagcagcggagccgatagatacctgattatccccagcgtgcaggccgacgacgaggccgattactactgcggcaccgattacaccggcggctacgtgttcggcggaggcacacaactgaccgtgacactcgagatccagaaccctgatcctgccgtgtaccagctgcgggatagcaagagcagcgacaagagcgtgtgtctgttcaccgacttcgacagccagaccaacgtgtcccagagcaaggactccgacgtgtacatcaccgataagtgcgtgctggacatgcggagcatggacttcaagagcaactccgccgtggcctggtccaacaagtccgatttcgcctgcgccaacgccttcaacaacagcattatccccgaggacacattcttcccaagccccgagagcagctgcgacgtgaagctggtggaaaagagcttcgagacagacaccaacctgaacttccagatcctgtacgagatcctgctgggcaaggccaccctgtacgccgtgctggtgtctgccctggtgctgatggctatggtcaagcggaaggacagccggggacgcgccaagagaagcggatctggcgtgaagcagaccctgaatttcgacctgctgaagctggctggcgacgtggaatccaacccaggccctactagtatggactggatttggcgcatccttttccttgtcggcgctgctaccggcgcgcattccttcgaagagcaactgaaagagtctggcggcggactgttcaagcccaccgataccctgaccctgacctgcaccgtgtccggcttcagcctgagctactacggcgtgaactgggtgcgccaggcccctggcaatggcctggaatggatcggcacaatcggcggcagcggcgacacctactatgcctcttgggccaagtccagaagcaccatcatcagaaacaccaacgagaacaccgtgaccctgaagatgaccagcctgacagccgccgacaccgccacctacttttgcgtcagatacgccaacatcggctacgagtatttcaacgtgtggggacccggcaccctcgtgaccgtgtcatctacgcgtgaggacctgaagaacgtgttcccacctgaggtggccgtgttcgagcctagcgaggccgagatcagccacacccagaaagccaccctcgtgtgcctggctaccggcttctaccccgaccatgtggaactgtcttggtgggtcaacggcaaagaggtgcacagcggcgtgtgtaccgacccccagccactgaaagaacagcccgccctgaacgacagccggtactgcctgagcagcagactgagagtgtccgccaccttctggcagaacccccggaaccacttcagatgccaggtgcagttctacggcctgagcgagaacgacgagtggacccaggacagagccaagcccgtgacccagatcgtgtctgccgaagcctggggcagagccgattgcggctttaccagcgagagctaccagcagggcgtgctgagcgccaccaacctgagcgtgatcggcttcagaatcctgctgctgaaagtggccggctttaacctgctgatgaccctgcggctgtggtccagc

SEQ ID NO: 5188 - DNA, 1893 bp, synthetic construct
  source 1..1893: mol_type = other DNA
atggccttaccagtgaccgccttgctcctgccgctggccttgctgctccacgccgccaggccgcagttcgtgctgacccagagcccttctgtgtctgccgccctgggagcctctgccaagctgacctgtacactgagcagcgcccacaagacctacaccatcgactggtatcagcagcagcagggcgaggcccccagatacctgatgcaagtgaagtccgacggcagctacaccaagggcaccggcgtgcccgatagattcagcggcagtagcagcggagccgatagatacctgattatccccagcgtgcaggccgacgacgaggccggatatgtgtgcggcgctgacgacaatggcggctacgtgttcggcggaggcacccaactgacagtgacactcgagatccagaaccctgatcctgccgtgtaccagctgcgggatagcaagagcagcgacaagagcgtgtgtctgttcaccgacttcgacagccagaccaacgtgtcccagagcaaggactccgacgtgtacatcaccgataagtgcgtgctggacatgcggagcatggacttcaagagcaactccgccgtggcctggtccaacaagtccgatttcgcctgcgccaacgccttcaacaacagcattatccccgaggacacattcttcccaagccccgagagcagctgcgacgtgaagctggtggaaaagagcttcgagacagacaccaacctgaacttccagatcctgtacgagatcctgctgggcaaggccaccctgtacgccgtgctggtgtctgccctggtgctgatggctatggtcaagcggaaggacagccggggacgcgccaagagaagcggatctggcgtgaagcagaccctgaatttcgacctgctgaagctggctggcgacgtggaatccaacccaggccctactagtatggactggatttggcgcatccttttccttgtcggcgctgctaccggcgcgcattccttcgaacagagcgtgaaagagtctgagggcggcctgttcaagcccaccgataccctgaccctgacctgcaccgtgtccggcttcagcctgagcagacacgccctgacatgggtgcgccaggcccctggaaatggcctggaatggatcggagccatcgacaacgccggcaccacctactatgcctcttgggccaagtccagaagcaccatcacccggaacaccgacctgcacaccgtgaccctgaagatgaccagcctgaccgccagcgacaccgccacctacttttgcgccagagtgttctacgacatcaacagcggctactacctggacggcatggacctgtggggacctggcacacttgtgaccgtgtccagcacgcgtgaggacctgaagaacgtgttcccacctgaggtggccgtgttcgagcctagcgaggccgagatcagccacacccagaaagccaccctcgtgtgcctggctaccggcttctaccccgaccatgtggaactgtcttggtgggtcaacggcaaagaggtgcacagcggcgtgtgtaccgacccccagccactgaaagaacagcccgccctgaacgacagccggtactgcctgagcagcagactgagagtgtccgccaccttctggcagaacccccggaaccacttcagatgccaggtgcagttctacggcctgagcgagaacgacgagtggacccaggacagagccaagcccgtgacccagatcgtgtctgccgaagcctggggcagagccgattgcggctttaccagcgagagctaccagcagggcgtgctgagcgccaccaacctgagcgtgatcggcttcagaatcctgctgctgaaagtggccggctttaacctgctgatgaccctgcggctgtggtccagc

SEQ ID NO: 5189 - DNA, 1875 bp, synthetic construct
  source 1..1875: mol_type = other DNA
atggccttaccagtgaccgccttgctcctgccgctggccttgctgctccacgccgccaggccggacatccagatgacccagagccccagcagcctgtctgccagcgtgggcgacagagtgaccatcacctgtagagccagccagggcatcagctcttggctggcctggtatcagcagaagcccgagaaggcccccaagagcctgatctacgccgcctctagtctccagagcggcgtgcccagcagattttctggcagcggctccggcaccgacttcaccctgacaatcagctccctccagcccgaggacttcgccacctactactgccagcagtacaacagctacccccccacctttggcggaggcaccaaggtggaaatcaagctcgagatccagaaccctgatcctgccgtgtaccagctgcgggatagcaagagcagcgacaagagcgtgtgtctgttcaccgacttcgacagccagaccaacgtgtcccagagcaaggactccgacgtgtacatcaccgataagtgcgtgctggacatgcggagcatggacttcaagagcaactccgccgtggcctggtccaacaagtccgatttcgcctgcgccaacgccttcaacaacagcattatccccgaggacacattcttcccaagccccgagagcagctgcgacgtgaagctggtggaaaagagcttcgagacagacaccaacctgaacttccagatcctgtacgagatcctgctgggcaaggccaccctgtacgccgtgctggtgtctgccctggtgctgatggctatggtcaagcggaaggacagccggggacgcgccaagagaagcggatctggcgtgaagcagaccctgaatttcgacctgctgaagctggctggcgacgtggaatccaacccaggccctactagtatggactggatttggcgcatccttttccttgtcggcgctgctaccggcgcgcattccttcgaagaagtgcaactggtggaatcaggcggcggactggtgcagcctggcgagtctctgagactgagctgtgtggcctccggcttcaccttcagccggtacaagatgaactgggtgcgccaggcccctggcaagggactggaatgggtgtcctacatcagccgcagcggcagagacatctactacgccgacagcgtgaagggccggttcaccatcagcagagacaacgccaagaacagcctgtacctccagatgaactccctgcgggacgaggacaccgccgtgtactactgtgccggaaccgtgaccacctattactacttcggcatggacgtgtggggccacggcaccaccgtgacagtgtcatctacgcgtgaggacctgaagaacgtgttcccacctgaggtggccgtgttcgagcctagcgaggccgagatcagccacacccagaaagccaccctcgtgtgcctggctaccggcttctaccccgaccatgtggaactgtcttggtgggtcaacggcaaagaggtgcacagcggcgtgtgtaccgacccccagccactgaaagaacagcccgccctgaacgacagccggtactgcctgagcagcagactgagagtgtccgccaccttctggcagaacccccggaaccacttcagatgccaggtgcagttctacggcctgagcgagaacgacgagtggacccaggacagagccaagcccgtgacccagatcgtgtctgccgaagcctggggcagagccgattgcggctttaccagcgagagctaccagcagggcgtgctgagcgccaccaacctgagcgtgatcggcttcagaatcctgctgctgaaagtggccggctttaacctgctgatgaccctgcggctgtggtccagc

SEQ ID NO: 5190 - DNA, 1878 bp, synthetic construct
  source 1..1878: mol_type = other DNA
atggccttaccagtgaccgccttgctcctgccgctggccttgctgctccacgccgccaggccggacatccagatgacccagagccccagcagcctgtctgccagcgtgggcgacagagtgaccatcacctgtagagccagccagggcatcagctcttggctggcctggtatcagcagaagcccgagaaggcccccaagagcctgatctacgccgcctctagtctccagagcggcgtgcccagcagattttctggcagcggctccggcaccgacttcaccctgacaatcagctccctccagcccgaggacttcgccacctactactgccagcagtacaacagctaccctcccacctttggcggaggcaccaaggtggaaatcaagctcgagatccagaaccctgatcctgccgtgtaccagctgcgggatagcaagagcagcgacaagagcgtgtgtctgttcaccgacttcgacagccagaccaacgtgtcccagagcaaggactccgacgtgtacatcaccgataagtgcgtgctggacatgcggagcatggacttcaagagcaactccgccgtggcctggtccaacaagtccgatttcgcctgcgccaacgccttcaacaacagcattatccccgaggacacattcttcccaagccccgagagcagctgcgacgtgaagctggtggaaaagagcttcgagacagacaccaacctgaacttccagatcctgtacgagatcctgctgggcaaggccaccctgtacgccgtgctggtgtctgccctggtgctgatggctatggtcaagcggaaggacagccggggacgcgccaagagaagcggatctggcgtgaagcagaccctgaatttcgacctgctgaagctggctggcgacgtggaatccaacccaggccctactagtatggactggatttggcgcatccttttccttgtcggcgctgctaccggcgcgcattccttcgaagaagtgcaactggtggaatccgggggaggctctgtgcagcctggcgagtctctgagactgagctgtgtggcctccggcttcaccttcagccggtacaagatgaactgggtgcgccaggcccctggcaagggactggaatgggtgtcctacatcagccgcagcggcagagacatctactacgccgacagcgtgaagggccggttcaccatcagcagagacaacgccaagaacagcctgtacctccagatgaactccctgcgggacgaggacaccgccgtgtactactgtgccggaaccgtgaccacctattactacgacttcggcatggacgtgtggggccagggcacaaccgtgacagtgtctagcacgcgtgaggacctgaagaacgtgttcccacctgaggtggccgtgttcgagcctagcgaggccgagatcagccacacccagaaagccaccctcgtgtgcctggctaccggcttctaccccgaccatgtggaactgtcttggtgggtcaacggcaaagaggtgcacagcggcgtgtgtaccgacccccagccactgaaagaacagcccgccctgaacgacagccggtactgcctgagcagcagactgagagtgtccgccaccttctggcagaacccccggaaccacttcagatgccaggtgcagttctacggcctgagcgagaacgacgagtggacccaggacagagccaagcccgtgacccagatcgtgtctgccgaagcctggggcagagccgattgcggctttaccagcgagagctaccagcagggcgtgctgagcgccaccaacctgagcgtgatcggcttcagaatcctgctgctgaaagtggccggctttaacctgctgatgaccctgcggctgtggtccagc

SEQ ID NO: 5191 - DNA, 1872 bp, synthetic construct
  source 1..1872: mol_type = other DNA
atggccttaccagtgaccgccttgctcctgccgctggccttgctgctccacgccgccaggccgcagtctgtgctgacacagcctccatctgcctctggcacacctggacagagagtgaccatcagctgtagcggcagcagaagcaacgtcggcggcaactacgtgttctggtatcagcaggtcccaggcgctacccctaagctgctgatctacagaagcaatcagcggcctagcggcgtgcccgatagatttgccggaagcaagagcggcagctctgccagccttgccatctctggactgagaagcgaggacgaggccgactactactgtgccacctgggatgatagcctgagcggcttcgtgtttggcaccggcaccaaagtgacagtgcttggtctcgagatccagaaccctgatcctgccgtgtaccagctgcgggatagcaagagcagcgacaagagcgtgtgtctgttcaccgacttcgacagccagaccaacgtgtcccagagcaaggactccgacgtgtacatcaccgataagtgcgtgctggacatgcggagcatggacttcaagagcaactccgccgtggcctggtccaacaagtccgatttcgcctgcgccaacgccttcaacaacagcattatccccgaggacacattcttcccaagccccgagagcagctgcgacgtgaagctggtggaaaagagcttcgagacagacaccaacctgaacttccagatcctgtacgagatcctgctgggcaaggccaccctgtacgccgtgctggtgtctgccctggtgctgatggctatggtcaagcggaaggacagccggggacgcgccaagagaagcggatctggcgtgaagcagaccctgaatttcgacctgctgaagctggctggcgacgtggaatccaacccaggccctactagtatggactggatttggcgcatccttttccttgtcggcgctgctaccggcgcgcattccttcgaagttcagctggttgaatctggcggcggactggttaagcctggcggatctctgagactgtcttgtgccgccagcggcttcaccttcagcgattactacatgagctggatcagacaggcccctggcaaaggactggaatgggtgtcctacatcagcagcagcggctccaccatctactacgccgatagcgtgaagggcagattcaccatcagccgggacaacgccaagaacagcctgtacctccagatgaactccctgagagccgaggacaccgccgtgtactattgcgccagaggctacggcaaagcctacgatcaatggggccagggcacactggtcaccgtttcttctacgcgtgaggacctgaagaacgtgttcccacctgaggtggccgtgttcgagcctagcgaggccgagatcagccacacccagaaagccaccctcgtgtgcctggctaccggcttctaccccgaccatgtggaactgtcttggtgggtcaacggcaaagaggtgcacagcggcgtgtgtaccgacccccagccactgaaagaacagcccgccctgaacgacagccggtactgcctgagcagcagactgagagtgtccgccaccttctggcagaacccccggaaccacttcagatgccaggtgcagttctacggcctgagcgagaacgacgagtggacccaggacagagccaagcccgtgacccagatcgtgtctgccgaagcctggggcagagccgattgcggctttaccagcgagagctaccagcagggcgtgctgagcgccaccaacctgagcgtgatcggcttcagaatcctgctgctgaaagtggccggctttaacctgctgatgaccctgcggctgtggtccagc

SEQ ID NO: 5192 - DNA, 1869 bp, synthetic construct
  source 1..1869: mol_type = other DNA
atggccttaccagtgaccgccttgctcctgccgctggccttgctgctccacgccgccaggccgcagtctgtggtcacacagccacctagcatgtctgccgctccaggccagcaagtgaccatctcttgtagcggcggcaacagcaacatcgagcggaactacgtgtcctggtatctgcaactgcctggcacagcccctaagctggtcatcttcgacaacgacagacggcccagcggcatccccgatagattttctggcagcaagagcggcaccagcgccacactgggaattaccggacttcagacaggcgacgaggccgactactactgtggcacatgggactctagcctgagaggctgggttttcggcggaggcacaaagctgacagtgcttggtctcgagatccagaaccctgatcctgccgtgtaccagctgcgggatagcaagagcagcgacaagagcgtgtgtctgttcaccgacttcgacagccagaccaacgtgtcccagagcaaggactccgacgtgtacatcaccgataagtgcgtgctggacatgcggagcatggacttcaagagcaactccgccgtggcctggtccaacaagtccgatttcgcctgcgccaacgccttcaacaacagcattatccccgaggacacattcttcccaagccccgagagcagctgcgacgtgaagctggtggaaaagagcttcgagacagacaccaacctgaacttccagatcctgtacgagatcctgctgggcaaggccaccctgtacgccgtgctggtgtctgccctggtgctgatggctatggtcaagcggaaggacagccggggacgcgccaagagaagcggatctggcgtgaagcagaccctgaatttcgacctgctgaagctggctggcgacgtggaatccaacccaggccctactagtatggactggatttggcgcatccttttccttgtcggcgctgctaccggcgcgcattccttcgaagtgcagctcgttgagtctggcggcggactgattcaacctggcggaagcctgagactgagctgtgccgcttccggcttcaccttcagcaactacgccatgaactgggttcgacaggcccctggcaaaggactggaatgggtgtccaccatcaacggcagaggcagcagcaccatctacgccgattctgtgaagggcagattcaccatcagccgggacaacagcaagaacaccctgtacctccagatgaactccctgagagccgaggacaccgccacctattactgtgcccggtacatcagcagaggactgggcgattcttggggccagggcacactggttacagtgacgcgtgaggacctgaagaacgtgttcccacctgaggtggccgtgttcgagcctagcgaggccgagatcagccacacccagaaagccaccctcgtgtgcctggctaccggcttctaccccgaccatgtggaactgtcttggtgggtcaacggcaaagaggtgcacagcggcgtgtgtaccgacccccagccactgaaagaacagcccgccctgaacgacagccggtactgcctgagcagcagactgagagtgtccgccaccttctggcagaacccccggaaccacttcagatgccaggtgcagttctacggcctgagcgagaacgacgagtggacccaggacagagccaagcccgtgacccagatcgtgtctgccgaagcctggggcagagccgattgcggctttaccagcgagagctaccagcagggcgtgctgagcgccaccaacctgagcgtgatcggcttcagaatcctgctgctgaaagtggccggctttaacctgctgatgaccctgcggctgtggtccagc

SEQ ID NO: 5193 - DNA, 1872 bp, synthetic construct
  source 1..1872: mol_type = other DNA
atggccttaccagtgaccgccttgctcctgccgctggccttgctgctccacgccgccaggccggacgtcgtgatgacccagacccctctgagcctgcctgtgtccctgggcgatcaggccagcatcagctgtagaagcagccagagcctggtgcacagcaacggcaacacctacctgcactggtatctccagaagcccggccagagccccaagctgctgatctacaaggtgtccaacagattcagcggcgtgcccgacagattctccggcagcggctctggcaccgacttcaccctgaagatcagccgggtggaagccgaggacctgggcgtgtacttctgtagccagaacacccccgtgccccccaagtttggcagcggcaccaagctggaaatcaagctcgagatccagaaccctgatcctgccgtgtaccagctgcgggatagcaagagcagcgacaagagcgtgtgtctgttcaccgacttcgacagccagaccaacgtgtcccagagcaaggactccgacgtgtacatcaccgataagtgcgtgctggacatgcggagcatggacttcaagagcaactccgccgtggcctggtccaacaagtccgatttcgcctgcgccaacgccttcaacaacagcattatccccgaggacacattcttcccaagccccgagagcagctgcgacgtgaagctggtggaaaagagcttcgagacagacaccaacctgaacttccagatcctgtacgagatcctgctgggcaaggccaccctgtacgccgtgctggtgtctgccctggtgctgatggctatggtcaagcggaaggacagccggggacgcgccaagagaagcggatctggcgtgaagcagaccctgaatttcgacctgctgaagctggctggcgacgtggaatccaacccaggccctactagtatggactggatttggcgcatccttttccttgtcggcgctgctaccggcgcgcattccttcgaacaggtgcagctccagcagtctggcgctgaactcgtgcggcctggcgcttctgtgaagctgtcttgcaaggccagcggctacaccttcaacgactacgagatgcactgggtcaagcagacccctgtgcacggcctgaagtggatcggagccctggaacccaagaccggcgataccgcctacagccagaagttcaagggcaaggccaccctgaccgccgacaagagcagcagcacagcctacatggaactgcggagcctgaccagcgaggacagcgccgtgtactactgcaccagctgctactactacacctacagcggccagggcaccctcgtgacagtgtctgctacgcgtgaggacctgaagaacgtgttcccacctgaggtggccgtgttcgagcctagcgaggccgagatcagccacacccagaaagccaccctcgtgtgcctggctaccggcttctaccccgaccatgtggaactgtcttggtgggtcaacggcaaagaggtgcacagcggcgtgtgtaccgacccccagccactgaaagaacagcccgccctgaacgacagccggtactgcctgagcagcagactgagagtgtccgccaccttctggcagaacccccggaaccacttcagatgccaggtgcagttctacggcctgagcgagaacgacgagtggacccaggacagagccaagcccgtgacccagatcgtgtctgccgaagcctggggcagagccgattgcggctttaccagcgagagctaccagcagggcgtgctgagcgccaccaacctgagcgtgatcggcttcagaatcctgctgctgaaagtggccggctttaacctgctgatgaccctgcggctgtggtccagc

SEQ ID NO: 5194 - DNA, 1869 bp, synthetic construct
  source 1..1869: mol_type = other DNA
atggccttaccagtgaccgccttgctcctgccgctggccttgctgctccacgccgccaggccggacatccaactgacccagagccccagcagcctgtctgcctctgtgggcgacagagtgaccatcacctgtagagccagccagggcatcagaaacgacctgggctggtatcagcagaagcccggcaaggcccccaagcggctgatctatgctgccagctccctccagaatggcgtgcccagcagattttccggcagcggctctggcaccgagttcaccctgaccatcagctccctccagcccgaggacttcgccacctactactgcctccagcacaacacctaccccgccttcggccagggcaccaaggtggaaatcaagagactcgagatccagaaccctgatcctgccgtgtaccagctgcgggatagcaagagcagcgacaagagcgtgtgtctgttcaccgacttcgacagccagaccaacgtgtcccagagcaaggactccgacgtgtacatcaccgataagtgcgtgctggacatgcggagcatggacttcaagagcaactccgccgtggcctggtccaacaagtccgatttcgcctgcgccaacgccttcaacaacagcattatccccgaggacacattcttcccaagccccgagagcagctgcgacgtgaagctggtggaaaagagcttcgagacagacaccaacctgaacttccagatcctgtacgagatcctgctgggcaaggccaccctgtacgccgtgctggtgtctgccctggtgctgatggctatggtcaagcggaaggacagccggggacgcgccaagagaagcggatctggcgtgaagcagaccctgaatttcgacctgctgaagctggctggcgacgtggaatccaacccaggccctactagtatggactggatttggcgcatccttttccttgtcggcgctgctaccggcgcgcattccttcgaacaggtgcaactccaggaatctggccctggcctcgtgaagcctagccagaccctgagcctgacctgtaccgtgtctggcggcagcatcagcagcttcaactactactggtcctggatcagacaccaccctggcaagggcctggaatggatcggctacatctactacagcggcagcacctacagcaaccccagcctgaagtcccgcgtgaccatctccgtggacaccagcaagaaccagtttagcctgaccctgtccagcgtgacagccgccgataccgccgtgtactactgcgccagaggctacaactggaactacttcgactactggggccagggaaccctcgtgaccgtgtctagtacgcgtgaggacctgaagaacgtgttcccacctgaggtggccgtgttcgagcctagcgaggccgagatcagccacacccagaaagccaccctcgtgtgcctggctaccggcttctaccccgaccatgtggaactgtcttggtgggtcaacggcaaagaggtgcacagcggcgtgtgtaccgacccccagccactgaaagaacagcccgccctgaacgacagccggtactgcctgagcagcagactgagagtgtccgccaccttctggcagaacccccggaaccacttcagatgccaggtgcagttctacggcctgagcgagaacgacgagtggacccaggacagagccaagcccgtgacccagatcgtgtctgccgaagcctggggcagagccgattgcggctttaccagcgagagctaccagcagggcgtgctgagcgccaccaacctgagcgtgatcggcttcagaatcctgctgctgaaagtggccggctttaacctgctgatgaccctgcggctgtggtccagc

SEQ ID NO: 5195 - DNA, 1875 bp, synthetic construct
  source 1..1875: mol_type = other DNA
atggccttaccagtgaccgccttgctcctgccgctggccttgctgctccacgccgccaggccggacgacatcgtgctgacccagagccccgccagcctggccgtgagcctgggccagagcgtgaccatcagctgcagagccagcgagagcgtggagtactacggcaccagcctgatgcagtggtaccagcagaagcccggccagccccccaagctgctgatctacgccaccagcaacgtggagagcggcgtgcccgccagattcagcggcagcggcagcggcaccgacttcagcctgaacatccaccccgtggaggaggacgacatcgccatgtacttctgccagcagagcagaaagctgcccagcaccttcggcggcggcaccaagctggagatcaagctcgagatccagaaccctgatcctgccgtgtaccagctgcgggatagcaagagcagcgacaagagcgtgtgtctgttcaccgacttcgacagccagaccaacgtgtcccagagcaaggactccgacgtgtacatcaccgataagtgcgtgctggacatgcggagcatggacttcaagagcaactccgccgtggcctggtccaacaagtccgatttcgcctgcgccaacgccttcaacaacagcattatccccgaggacacattcttcccaagccccgagagcagctgcgacgtgaagctggtggaaaagagcttcgagacagacaccaacctgaacttccagatcctgtacgagatcctgctgggcaaggccaccctgtacgccgtgctggtgtctgccctggtgctgatggctatggtcaagcggaaggacagccggggacgcgccaagagaagcggatctggcgtgaagcagaccctgaatttcgacctgctgaagctggctggcgacgtggaatccaacccaggccctactagtatggactggatttggcgcatccttttccttgtcggcgctgctaccggcgcgcattccttcgaagacgtgagactgcaggagagcggccccggccaggtgaagcccagccagaccgtgagcctgacctgcagcgtgaccggctacagcatcaccaacggcaaccactggtggaactggatcagacaggtgagcggcagcaagctggagtggatcggctacatcagcagcagcggcagcaccgacagcaaccccagcctgaagagcagaatcagcatcaccagagacaccagcaagaaccagctgttcctgcagctgaacagcgtgaccaccgaggacatcgccacctactactgcgccagaggctactacttcgactactggggccagggcaccaccctgaccgtgagcagcacgcgtgaggacctgaagaacgtgttcccacctgaggtggccgtgttcgagcctagcgaggccgagatcagccacacccagaaagccaccctcgtgtgcctggctaccggcttctaccccgaccatgtggaactgtcttggtgggtcaacggcaaagaggtgcacagcggcgtgtgtaccgacccccagccactgaaagaacagcccgccctgaacgacagccggtactgcctgagcagcagactgagagtgtccgccaccttctggcagaacccccggaaccacttcagatgccaggtgcagttctacggcctgagcgagaacgacgagtggacccaggacagagccaagcccgtgacccagatcgtgtctgccgaagcctggggcagagccgattgcggctttaccagcgagagctaccagcagggcgtgctgagcgccaccaacctgagcgtgatcggcttcagaatcctgctgctgaaagtggccggctttaacctgctgatgaccctgcggctgtggtccagc

SEQ ID NO: 5196 - DNA, 1872 bp, synthetic construct
  source 1..1872: mol_type = other DNA
atggccttaccagtgaccgccttgctcctgccgctggccttgctgctccacgccgccaggccggacatccagatgacccagagccccagcagcctgtctgccagcgtgggcgacagagtgaccatcacctgtagagccagccaggacgtgaacaccgccgtggcctggtatcagcagaagcctggcaaggcccccaagctgctgatctacagcgccagcttcctggaaagcggcgtgcccagcagattcagcggaagcagaagcggcaccgacttcaccctgaccatcagctccctccagcccgaggacttcgccacctactactgccagcagcactacaccacccctcccaccttcggccagaccaaggtggaaatcaagagactcgagatccagaaccctgatcctgccgtgtaccagctgcgggatagcaagagcagcgacaagagcgtgtgtctgttcaccgacttcgacagccagaccaacgtgtcccagagcaaggactccgacgtgtacatcaccgataagtgcgtgctggacatgcggagcatggacttcaagagcaactccgccgtggcctggtccaacaagtccgatttcgcctgcgccaacgccttcaacaacagcattatccccgaggacacattcttcccaagccccgagagcagctgcgacgtgaagctggtggaaaagagcttcgagacagacaccaacctgaacttccagatcctgtacgagatcctgctgggcaaggccaccctgtacgccgtgctggtgtctgccctggtgctgatggctatggtcaagcggaaggacagccggggacgcgccaagagaagcggatctggcgtgaagcagaccctgaatttcgacctgctgaagctggctggcgacgtggaatccaacccaggccctactagtatggactggatttggcgcatccttttccttgtcggcgctgctaccggcgcgcattccttcgaagaagtgcaactggtggaatctggcggcggactggtgcagcctggcggatctctgagactgagctgtgccgccagcggcttcaacatcaaggacacctacatccactgggtgcgccaggcccctggaaagggactggaatgggtggcccggatctaccccaccaacggctacaccagatacgccgacagcgtgaagggccggttcaccatcagcgccgacaccagcaagaataccgcctacctccagatgaacagcctgcgggccgaggataccgccgtgtactactgctcaagatggggaggcgacggcttctacgctatggacgtgtggggccagggcacccttgtgaccgtgtcatctacgcgtgaggacctgaagaacgtgttcccacctgaggtggccgtgttcgagcctagcgaggccgagatcagccacacccagaaagccaccctcgtgtgcctggctaccggcttctaccccgaccatgtggaactgtcttggtgggtcaacggcaaagaggtgcacagcggcgtgtgtaccgacccccagccactgaaagaacagcccgccctgaacgacagccggtactgcctgagcagcagactgagagtgtccgccaccttctggcagaacccccggaaccacttcagatgccaggtgcagttctacggcctgagcgagaacgacgagtggacccaggacagagccaagcccgtgacccagatcgtgtctgccgaagcctggggcagagccgattgcggctttaccagcgagagctaccagcagggcgtgctgagcgccaccaacctgagcgtgatcggcttcagaatcctgctgctgaaagtggccggctttaacctgctgatgaccctgcggctgtggtccagc

SEQ ID NO: 5197 - DNA, 1869 bp, synthetic construct
  source 1..1869: mol_type = other DNA
atggccttaccagtgaccgccttgctcctgccgctggccttgctgctccacgccgccaggccggaccagagcgtgctgacacagcctcctagcgtgtcagtggcccctggcaagaccgccagaatcccctgcgagggcaactacatcggcagcagcaacgtgcactggtatcagcagaagcccggccaggctcccgtgctcgtgatccacttcgacagcgacagacccagcggcatccccgacagattcagcggcagcaacagcggcaacatggctaccctgaccatcagcagagtggaagccggggacgaggccgactactactgtcaagtgtgggagaaccacggctgggtgttcggcggaggcaccaagctgacagtgctgtctctcgagatccagaaccctgatcctgccgtgtaccagctgcgggatagcaagagcagcgacaagagcgtgtgtctgttcaccgacttcgacagccagaccaacgtgtcccagagcaaggactccgacgtgtacatcaccgataagtgcgtgctggacatgcggagcatggacttcaagagcaactccgccgtggcctggtccaacaagtccgatttcgcctgcgccaacgccttcaacaacagcattatccccgaggacacattcttcccaagccccgagagcagctgcgacgtgaagctggtggaaaagagcttcgagacagacaccaacctgaacttccagatcctgtacgagatcctgctgggcaaggccaccctgtacgccgtgctggtgtctgccctggtgctgatggctatggtcaagcggaaggacagccggggacgcgccaagagaagcggatctggcgtgaagcagaccctgaatttcgacctgctgaagctggctggcgacgtggaatccaacccaggccctactagtatggactggatttggcgcatccttttccttgtcggcgctgctaccggcgcgcattccttcgaagaggtgcaactggtggaaacaggcggcggactggtgcagcctggcgagtctctgagactgagctgtgccgccagcggcttcaccttcagcgactacgagatgaactgggtgcgccaggcccctggaaagggcctggaatgggtgtcctacatcagcagctccggcagcaccatctactacgccgacagcgtgaagggccggtttaccatctaccgggacaacgccaagaacagcctgtacctccagatgaactccctgcgggccgaggacaccgccctgtactattgtgccagagcctggggcgtgggaccccctgattattggggacagggcaccctcgtgaccgtgtcctctacgcgtgaggacctgaagaacgtgttcccacctgaggtggccgtgttcgagcctagcgaggccgagatcagccacacccagaaagccaccctcgtgtgcctggctaccggcttctaccccgaccatgtggaactgtcttggtgggtcaacggcaaagaggtgcacagcggcgtgtgtaccgacccccagccactgaaagaacagcccgccctgaacgacagccggtactgcctgagcagcagactgagagtgtccgccaccttctggcagaacccccggaaccacttcagatgccaggtgcagttctacggcctgagcgagaacgacgagtggacccaggacagagccaagcccgtgacccagatcgtgtctgccgaagcctggggcagagccgattgcggctttaccagcgagagctaccagcagggcgtgctgagcgccaccaacctgagcgtgatcggcttcagaatcctgctgctgaaagtggccggctttaacctgctgatgaccctgcggctgtggtccagc

SEQ ID NO: 5198 - DNA, 1893 bp, synthetic construct
  source 1..1893: mol_type = other DNA
atggccttaccagtgaccgccttgctcctgccgctggccttgctgctccacgccgccaggccggacatccagatgacccagagccccagcagcctgtctgccagcgtgggcgataccgtgaccatcacctgtcaggccaacggctacctgaactggtatcagcagcggagaggcaaggcccccaagctgctgatctacgacggcagcaagctggaaagaggcgtgcccagcagattcagcggcagaagatggggccaggagtacaacctgaccatcaacaacctccagcccgaggatattgccacatacttttgccaggtgtacgagttcgtggtgcccggcacacggctggacctgaagagaacagtggctgctcctctcgagatccagaaccctgatcctgccgtgtaccagctgcgggatagcaagagcagcgacaagagcgtgtgtctgttcaccgacttcgacagccagaccaacgtgtcccagagcaaggactccgacgtgtacatcaccgataagtgcgtgctggacatgcggagcatggacttcaagagcaactccgccgtggcctggtccaacaagtccgatttcgcctgcgccaacgccttcaacaacagcattatccccgaggacacattcttcccaagccccgagagcagctgcgacgtgaagctggtggaaaagagcttcgagacagacaccaacctgaacttccagatcctgtacgagatcctgctgggcaaggccaccctgtacgccgtgctggtgtctgccctggtgctgatggctatggtcaagcggaaggacagccggggacgcgccaagagaagcggatctggcgtgaagcagaccctgaatttcgacctgctgaagctggctggcgacgtggaatccaacccaggccctactagtatggactggatttggcgcatccttttccttgtcggcgctgctaccggcgcgcattccttcgaacaggtgcagctgctccagtctggcgctgccgtgacaaagcctggcgcttctgtgcgggtgtcctgtgaagccagcggctacaacatccgggactacttcatccactggtggcggcaggctccaggccagggactccagtgggtgggatggatcaaccccaagaccggccagcccaacaaccccagacagttccagggcagagtgtccctgaccagacacgccagctgggacttcgacaccttcagcttctacatggatctgaaggccctgcggagcgacgataccgccgtgtacttctgcgccagacagagaagcgactactgggatttcgacgtgtggggcagcggcacccaagtgacagtgtctagcgccagcaccaagggacccacgcgtgaggacctgaagaacgtgttcccacctgaggtggccgtgttcgagcctagcgaggccgagatcagccacacccagaaagccaccctcgtgtgcctggctaccggcttctaccccgaccatgtggaactgtcttggtgggtcaacggcaaagaggtgcacagcggcgtgtgtaccgacccccagccactgaaagaacagcccgccctgaacgacagccggtactgcctgagcagcagactgagagtgtccgccaccttctggcagaacccccggaaccacttcagatgccaggtgcagttctacggcctgagcgagaacgacgagtggacccaggacagagccaagcccgtgacccagatcgtgtctgccgaagcctggggcagagccgattgcggctttaccagcgagagctaccagcagggcgtgctgagcgccaccaacctgagcgtgatcggcttcagaatcctgctgctgaaagtggccggctttaacctgctgatgaccctgcggctgtggtccagc

SEQ ID NO: 5199 - DNA, 1911 bp, synthetic construct
  source 1..1911: mol_type = other DNA
atggccttaccagtgaccgccttgctcctgccgctggccttgctgctccacgccgccaggccgcagtctgccctgacacagcctcctagcgcctctggctctcccggccagagcatcaccatcagctgtaccggcaccagcaacaacttcgtgtcctggtatcagcagcacgccggcaaggcccccaagctcgtgatctacgacgtgaacaagcggcccagcggcgtgcccgatagattcagcggcagcaagagcggcaacaccgccagcctgacagtgtctggcctccagaccgatgacgaggccgtgtactactgcggcagcctcgtgggcaactgggacgtgatctttggcggaggcaccaagctgaccgtgctgctcgagatccagaaccctgatcctgccgtgtaccagctgcgggatagcaagagcagcgacaagagcgtgtgtctgttcaccgacttcgacagccagaccaacgtgtcccagagcaaggactccgacgtgtacatcaccgataagtgcgtgctggacatgcggagcatggacttcaagagcaactccgccgtggcctggtccaacaagtccgatttcgcctgcgccaacgccttcaacaacagcattatccccgaggacacattcttcccaagccccgagagcagctgcgacgtgaagctggtggaaaagagcttcgagacagacaccaacctgaacttccagatcctgtacgagatcctgctgggcaaggccaccctgtacgccgtgctggtgtctgccctggtgctgatggctatggtcaagcggaaggacagccggggacgcgccaagagaagcggatctggcgtgaagcagaccctgaatttcgacctgctgaagctggctggcgacgtggaatccaacccaggccctactagtatggactggatttggcgcatccttttccttgtcggcgctgctaccggcgcgcattccttcgaacagccccagctccaggaatctggccccacactggtggaagccagcgagacactgagcctgacctgtgccgtgtccggcgattctaccgccgcctgcaatagcttctggggctgggtgcgccagcctcctggaaagggactggaatgggtgggaagcctgagccactgcgccagctattggaaccggggctggacctaccacaaccccagcctgaagtccagactgaccctggccctggacacccccaagaacctggtgttcctgaagctgaacagcgtgacagccgccgacaccgccacctactactgtgccagatttggcggcgaggtgctgcggtacaccgactggcctaaacctgcctgggtggacctgtggggcagaggaacactcgtgaccgtgtccagcacgcgtgaggacctgaagaacgtgttcccacctgaggtggccgtgttcgagcctagcgaggccgagatcagccacacccagaaagccaccctcgtgtgcctggctaccggcttctaccccgaccatgtggaactgtcttggtgggtcaacggcaaagaggtgcacagcggcgtgtgtaccgacccccagccactgaaagaacagcccgccctgaacgacagccggtactgcctgagcagcagactgagagtgtccgccaccttctggcagaacccccggaaccacttcagatgccaggtgcagttctacggcctgagcgagaacgacgagtggacccaggacagagccaagcccgtgacccagatcgtgtctgccgaagcctggggcagagccgattgcggctttaccagcgagagctaccagcagggcgtgctgagcgccaccaacctgagcgtgatcggcttcagaatcctgctgctgaaagtggccggctttaacctgctgatgaccctgcggctgtggtccagc

SEQ ID NO: 5200 - DNA, 1866 bp, synthetic construct
  source 1..1866: mol_type = other DNA
atggccttaccagtgaccgccttgctcctgccgctggccttgctgctccacgccgccaggccggagatcgtgctgacacagagccctggcaccctgagcctgtctccaggcgagacagccatcatcagctgccggacaagccagtacggcagcctggcctggtatcagcagaggccaggacaggcccccagactcgtgatctacagcggcagcacaagagccgccggaatccccgatagattcagcggctccagatggggacccgactacaacctgaccatcagcaacctggaaagcggcgacttcggcgtgtactactgccagcagtacgagttcttcggccagggcaccaaggtgcaggtggacatcaaaagactcgagatccagaaccctgatcctgccgtgtaccagctgcgggatagcaagagcagcgacaagagcgtgtgtctgttcaccgacttcgacagccagaccaacgtgtcccagagcaaggactccgacgtgtacatcaccgataagtgcgtgctggacatgcggagcatggacttcaagagcaactccgccgtggcctggtccaacaagtccgatttcgcctgcgccaacgccttcaacaacagcattatccccgaggacacattcttcccaagccccgagagcagctgcgacgtgaagctggtggaaaagagcttcgagacagacaccaacctgaacttccagatcctgtacgagatcctgctgggcaaggccaccctgtacgccgtgctggtgtctgccctggtgctgatggctatggtcaagcggaaggacagccggggacgcgccaagagaagcggatctggcgtgaagcagaccctgaatttcgacctgctgaagctggctggcgacgtggaatccaacccaggccctactagtatggactggatttggcgcatccttttccttgtcggcgctgctaccggcgcgcattccttcgaacaggtgcagctggtgcagtctggcggccagatgaagaaacccggcgagagcatgagaatcagctgtcgggcctccggctacgagttcatcgactgcaccctgaactggatcagactggcccctggcaagcggcctgagtggatgggatggctgaagcctagaggcggagccgtgaactacgccagacctctccagggcagagtgaccatgaccagggacgtgtacagcgataccgccttcctggaactgcggagcctgaccgtggatgataccgccgtgtacttctgcaccagaggcaagaactgcgattacaactgggacttcgagcactggggcagaggcacccctgtgatcgtgtctagcacgcgtgaggacctgaagaacgtgttcccacctgaggtggccgtgttcgagcctagcgaggccgagatcagccacacccagaaagccaccctcgtgtgcctggctaccggcttctaccccgaccatgtggaactgtcttggtgggtcaacggcaaagaggtgcacagcggcgtgtgtaccgacccccagccactgaaagaacagcccgccctgaacgacagccggtactgcctgagcagcagactgagagtgtccgccaccttctggcagaacccccggaaccacttcagatgccaggtgcagttctacggcctgagcgagaacgacgagtggacccaggacagagccaagcccgtgacccagatcgtgtctgccgaagcctggggcagagccgattgcggctttaccagcgagagctaccagcagggcgtgctgagcgccaccaacctgagcgtgatcggcttcagaatcctgctgctgaaagtggccggctttaacctgctgatgaccctgcggctgtggtccagc

SEQ ID NO: 5201 - DNA, 1896 bp, synthetic construct
  source 1..1896: mol_type = other DNA
atggccttaccagtgaccgccttgctcctgccgctggccttgctgctccacgccgccaggccggagctggtgctgacacagagccctggcaccctgtctctgtctgccggcgaaagagccaccctgagctgtagagccagccagagcgtgtcctctggcagcctggcttggtatcagcagaagccaggccaggcccccagactgctgatctacggcgcttctaccagagccaccggcatccccgatagattcagcggctctggctccggcaccgacttcaccctgacaatcggcagactggaacccgaggacctggccgtgtactactgccagcagtacggcaccagcccctacacattcggccagggcaccaagctggaaatcctcgagatccagaaccctgatcctgccgtgtaccagctgcgggatagcaagagcagcgacaagagcgtgtgtctgttcaccgacttcgacagccagaccaacgtgtcccagagcaaggactccgacgtgtacatcaccgataagtgcgtgctggacatgcggagcatggacttcaagagcaactccgccgtggcctggtccaacaagtccgatttcgcctgcgccaacgccttcaacaacagcattatccccgaggacacattcttcccaagccccgagagcagctgcgacgtgaagctggtggaaaagagcttcgagacagacaccaacctgaacttccagatcctgtacgagatcctgctgggcaaggccaccctgtacgccgtgctggtgtctgccctggtgctgatggctatggtcaagcggaaggacagccggggacgcgccaagagaagcggatctggcgtgaagcagaccctgaatttcgacctgctgaagctggctggcgacgtggaatccaacccaggccctactagtatggactggatttggcgcatccttttccttgtcggcgctgctaccggcgcgcattccttcgaactggaacagagcggagccgaagtgaagaaacccggcagcagcgtgcaggtgtcctgcaaagcaagcggcggcaccttctctatgtacggcttcaactgggtgcgccaggctcctggacacggcctggaatggatgggcggcatcatccccatcttcggcacctccaactacgcccagaaattccggggcagagtgaccttcaccgccgaccaggccacaagcaccgcctacatggaactgaccaacctgcggagcgacgacaccgccgtgtattattgcgccagagacttcggccccgactgggaggatggcgacagctacgatggcagcggcagaggcttcttcgacttctggggccagggaacccttgtgaccgtgtcctcaacgcgtgaggacctgaagaacgtgttcccacctgaggtggccgtgttcgagcctagcgaggccgagatcagccacacccagaaagccaccctcgtgtgcctggctaccggcttctaccccgaccatgtggaactgtcttggtgggtcaacggcaaagaggtgcacagcggcgtgtgtaccgacccccagccactgaaagaacagcccgccctgaacgacagccggtactgcctgagcagcagactgagagtgtccgccaccttctggcagaacccccggaaccacttcagatgccaggtgcagttctacggcctgagcgagaacgacgagtggacccaggacagagccaagcccgtgacccagatcgtgtctgccgaagcctggggcagagccgattgcggctttaccagcgagagctaccagcagggcgtgctgagcgccaccaacctgagcgtgatcggcttcagaatcctgctgctgaaagtggccggctttaacctgctgatgaccctgcggctgtggtccagc

SEQ ID NO: 5202 - DNA, 1836 bp, synthetic construct
  source 1..1836: mol_type = other DNA
atggccttaccagtgaccgccttgctcctgccgctggccttgctgctccacgccgccaggccggacatccagatgacccagagccccagcagcctgtctgccagcgtgggcgacagagtgaccatcacctgtcaggccagccaggacatcaacaactacctgaactggtatcagcagaagcccggcaaggcccccaagctgctgatctacgacgccagcaatctgcagaccggcgtgcccagcagattttccggctctggcagcggcaccgacttcaccttcaccatcgaggacattgccacctactactgccagcagtacaccttcggccctggcaccaaggtggacatcaaactcgagatccagaaccctgatcctgccgtgtaccagctgcgggatagcaagagcagcgacaagagcgtgtgtctgttcaccgacttcgacagccagaccaacgtgtcccagagcaaggactccgacgtgtacatcaccgataagtgcgtgctggacatgcggagcatggacttcaagagcaactccgccgtggcctggtccaacaagtccgatttcgcctgcgccaacgccttcaacaacagcattatccccgaggacacattcttcccaagccccgagagcagctgcgacgtgaagctggtggaaaagagcttcgagacagacaccaacctgaacttccagatcctgtacgagatcctgctgggcaaggccaccctgtacgccgtgctggtgtctgccctggtgctgatggctatggtcaagcggaaggacagccggggacgcgccaagagaagcggatctggcgtgaagcagaccctgaatttcgacctgctgaagctggctggcgacgtggaatccaacccaggccctactagtatggactggatttggcgcatccttttccttgtcggcgctgctaccggcgcgcattccttcgaagaagtgcaactgctggaatctggcggcggactggtgcagcctggcggatctctgagactgagctgtgccgccagcggcttcacctttagctggtacagcatgacctgggtgcgccaggcccctggcaaaggactggaatgggtgtccagcatcgtgccctggggcgatttcacccagtacgccgatagcgtgaagggccggttcaccatcagccgggacaacagcaagaacaccctgtacctgcagatgaacagcctgcgggccgaggacaccgccgtgtactattgtgccaagggacctggctggggcagcttcgatctgtggggcagaggaacccttgtgaccgtgtccagcacgcgtgaggacctgaagaacgtgttcccacctgaggtggccgtgttcgagcctagcgaggccgagatcagccacacccagaaagccaccctcgtgtgcctggctaccggcttctaccccgaccatgtggaactgtcttggtgggtcaacggcaaagaggtgcacagcggcgtgtgtaccgacccccagccactgaaagaacagcccgccctgaacgacagccggtactgcctgagcagcagactgagagtgtccgccaccttctggcagaacccccggaaccacttcagatgccaggtgcagttctacggcctgagcgagaacgacgagtggacccaggacagagccaagcccgtgacccagatcgtgtctgccgaagcctggggcagagccgattgcggctttaccagcgagagctaccagcagggcgtgctgagcgccaccaacctgagcgtgatcggcttcagaatcctgctgctgaaagtggccggctttaacctgctgatgaccctgcggctgtggtccagc

SEQ ID NO: 5203 - DNA, 1866 bp, synthetic construct
  source 1..1866: mol_type = other DNA
atggccttaccagtgaccgccttgctcctgccgctggccttgctgctccacgccgccaggccggacatccagatgacccagagccccagcagcctgtctgccagcgtgggcgacagagtgaccatcacctgtaccgccagcctgagcgtgtccagcacctacctgcactggtatcagcagaagcccggcagcagccccaagctgtggatctacagcaccagcaacctggcctccggcgtgcccagcagattttctggcagcggctctggcaccagctacaccctgaccatcagctccctccagcccgaggacttcgccacctactactgccaccagtaccacagaagccccctgacctttggcggaggcaccaaggtggaaatcaagagactcgagatccagaaccctgatcctgccgtgtaccagctgcgggatagcaagagcagcgacaagagcgtgtgtctgttcaccgacttcgacagccagaccaacgtgtcccagagcaaggactccgacgtgtacatcaccgataagtgcgtgctggacatgcggagcatggacttcaagagcaactccgccgtggcctggtccaacaagtccgatttcgcctgcgccaacgccttcaacaacagcattatccccgaggacacattcttcccaagccccgagagcagctgcgacgtgaagctggtggaaaagagcttcgagacagacaccaacctgaacttccagatcctgtacgagatcctgctgggcaaggccaccctgtacgccgtgctggtgtctgccctggtgctgatggctatggtcaagcggaaggacagccggggacgcgccaagagaagcggatctggcgtgaagcagaccctgaatttcgacctgctgaagctggctggcgacgtggaatccaacccaggccctactagtatggactggatttggcgcatccttttccttgtcggcgctgctaccggcgcgcattccttcgaagaagtgcaactggtggaatctggcggcggactggtgcagcctggcggatctctgagactgagctgtgccgccagcggcttcagcctgaccaaatacggcgtgcactgggtgcgccaggcccctggaaaaggactggaatgggtgggagtgaagtgggctggcggctccaccgactacaacagcgccctgatgagccggttcaccatcagcaaggacaacgccaagaacagcctgtacctccagatgaactccctgcgggccgaggacaccgccgtgtactactgtgccagagatcaccgggacgctatggactactggggccagggaacactcgtgaccgtgtcctctacgcgtgaggacctgaagaacgtgttcccacctgaggtggccgtgttcgagcctagcgaggccgagatcagccacacccagaaagccaccctcgtgtgcctggctaccggcttctaccccgaccatgtggaactgtcttggtgggtcaacggcaaagaggtgcacagcggcgtgtgtaccgacccccagccactgaaagaacagcccgccctgaacgacagccggtactgcctgagcagcagactgagagtgtccgccaccttctggcagaacccccggaaccacttcagatgccaggtgcagttctacggcctgagcgagaacgacgagtggacccaggacagagccaagcccgtgacccagatcgtgtctgccgaagcctggggcagagccgattgcggctttaccagcgagagctaccagcagggcgtgctgagcgccaccaacctgagcgtgatcggcttcagaatcctgctgctgaaagtggccggctttaacctgctgatgaccctgcggctgtggtccagc

SEQ ID NO: 5204 - DNA, 1878 bp, synthetic construct
  source 1..1878: mol_type = other DNA
atggccttaccagtgaccgccttgctcctgccgctggccttgctgctccacgccgccaggccggacatccagatgacccagagccccagcagcctgtctgccagcgtgggcgacagagtgaccatcacatgcaaggccagccaggacgtgggaacagccgtggcctggtatcagcagaagcctggcaaggcccccaagctgctgatctacagcgccagctacagatccaccggcgtgcccagcagattttccggctctggcagcggcaccgacttcaccctgaccatctctagcctccagcccgaggacttcgccacctactactgccagcaccactactccgccccctggacatttggcggaggcaccaaggtggaaatcaagctcgagatccagaaccctgatcctgccgtgtaccagctgcgggatagcaagagcagcgacaagagcgtgtgtctgttcaccgacttcgacagccagaccaacgtgtcccagagcaaggactccgacgtgtacatcaccgataagtgcgtgctggacatgcggagcatggacttcaagagcaactccgccgtggcctggtccaacaagtccgatttcgcctgcgccaacgccttcaacaacagcattatccccgaggacacattcttcccaagccccgagagcagctgcgacgtgaagctggtggaaaagagcttcgagacagacaccaacctgaacttccagatcctgtacgagatcctgctgggcaaggccaccctgtacgccgtgctggtgtctgccctggtgctgatggctatggtcaagcggaaggacagccggggacgcgccaagagaagcggatctggcgtgaagcagaccctgaatttcgacctgctgaagctggctggcgacgtggaatccaacccaggccctactagtatggactggatttggcgcatccttttccttgtcggcgctgctaccggcgcgcattccttcgaagaagtgcaactggtggaatcaggcggcggactggtgcagcctggcggatctctgagactgagctgtgccgccagcggcttcaccttcagcagaaacggcatgagctgggtgcgccaggcccctggaaaaggactggaatgggtggcaaccgtgtccagcggcggcagctacatctactacgccgacagcgtgaagggccggttcaccatctccagagacaacgccaagaacagcctgtacctccagatgaactccctgcgggccgaggacaccgccgtgtactattgtgccagacagggcaccaccgccctggctaccagattcttcgatgtgtggggccagggcaccctcgtgaccgtgtcatctacgcgtgaggacctgaagaacgtgttcccacctgaggtggccgtgttcgagcctagcgaggccgagatcagccacacccagaaagccaccctcgtgtgcctggctaccggcttctaccccgaccatgtggaactgtcttggtgggtcaacggcaaagaggtgcacagcggcgtgtgtaccgacccccagccactgaaagaacagcccgccctgaacgacagccggtactgcctgagcagcagactgagagtgtccgccaccttctggcagaacccccggaaccacttcagatgccaggtgcagttctacggcctgagcgagaacgacgagtggacccaggacagagccaagcccgtgacccagatcgtgtctgccgaagcctggggcagagccgattgcggctttaccagcgagagctaccagcagggcgtgctgagcgccaccaacctgagcgtgatcggcttcagaatcctgctgctgaaagtggccggctttaacctgctgatgaccctgcggctgtggtccagc

SEQ ID NO: 5205 - DNA, 1866 bp, synthetic construct
  source 1..1866: mol_type = other DNA
atggccttaccagtgaccgccttgctcctgccgctggccttgctgctccacgccgccaggccggacatccagatgacccagagcccccctagcctgtctgcctctgtgggcggcaaagtgaccatcacatgcaaggccagccaggacatcgaccgctacatggcctggtatcaggacaagcccggcaagggacccaagctgctgatccacgataccagcaccctccagcccggcatccccagcagattttctggcagcggctccggcagagactacagcttcagcatcagcaacctggaacccgaggacattgccacctactactgcctccagtacgacaacctgtggaccttcggcggaggcaccaagctggaaatcaagagactcgagatccagaaccctgatcctgccgtgtaccagctgcgggatagcaagagcagcgacaagagcgtgtgtctgttcaccgacttcgacagccagaccaacgtgtcccagagcaaggactccgacgtgtacatcaccgataagtgcgtgctggacatgcggagcatggacttcaagagcaactccgccgtggcctggtccaacaagtccgatttcgcctgcgccaacgccttcaacaacagcattatccccgaggacacattcttcccaagccccgagagcagctgcgacgtgaagctggtggaaaagagcttcgagacagacaccaacctgaacttccagatcctgtacgagatcctgctgggcaaggccaccctgtacgccgtgctggtgtctgccctggtgctgatggctatggtcaagcggaaggacagccggggacgcgccaagagaagcggatctggcgtgaagcagaccctgaatttcgacctgctgaagctggctggcgacgtggaatccaacccaggccctactagtatggactggatttggcgcatccttttccttgtcggcgctgctaccggcgcgcattccttcgaacaggtgcaactggtgcagagcggagccgagcttgtgaagcctggcgcttccgtgaagatgagctgcaaagccagcggctacatcttcaccaactacaacatccactgggtcaagaagtccccaggccagggcctggaatggatcggagccatctaccccggaaacggcgacgccccttacagccagaagttccaggacagagccaccctgaccgccgacaccagcagcagcaccacctacatggaactgagcagcctgaccagcgaggacagcgccgtgtactattgcgtgcgggccaactgggatgtggccttcgcctattggggccagggcacactggtgtccgtgtcctctacgcgtgaggacctgaagaacgtgttcccacctgaggtggccgtgttcgagcctagcgaggccgagatcagccacacccagaaagccaccctcgtgtgcctggctaccggcttctaccccgaccatgtggaactgtcttggtgggtcaacggcaaagaggtgcacagcggcgtgtgtaccgacccccagccactgaaagaacagcccgccctgaacgacagccggtactgcctgagcagcagactgagagtgtccgccaccttctggcagaacccccggaaccacttcagatgccaggtgcagttctacggcctgagcgagaacgacgagtggacccaggacagagccaagcccgtgacccagatcgtgtctgccgaagcctggggcagagccgattgcggctttaccagcgagagctaccagcagggcgtgctgagcgccaccaacctgagcgtgatcggcttcagaatcctgctgctgaaagtggccggctttaacctgctgatgaccctgcggctgtggtccagc

SEQ ID NO: 5206 - DNA, 1869 bp, synthetic construct
  source 1..1869: mol_type = other DNA
atggccttaccagtgaccgccttgctcctgccgctggccttgctgctccacgccgccaggccggacatccagatgacccagagccctgccagcctgtctgcctctgtgggcgagacagtgaccatcacctgtcgggtgtccggcaacatccacaactacctggcctggtatcagcagaagcagggcaagagcccccaactgctggtgtacaacgccaagaccctggccgatggcgtgcccagcagattttctggctctggcagcggcacccagtacagcctgaagatcaacagcctccagcccgaggacttcggcagctactactgccagcacttctggtccaacccctacaccttcggcggaggcaccaagctggaaatcaagctcgagatccagaaccctgatcctgccgtgtaccagctgcgggatagcaagagcagcgacaagagcgtgtgtctgttcaccgacttcgacagccagaccaacgtgtcccagagcaaggactccgacgtgtacatcaccgataagtgcgtgctggacatgcggagcatggacttcaagagcaactccgccgtggcctggtccaacaagtccgatttcgcctgcgccaacgccttcaacaacagcattatccccgaggacacattcttcccaagccccgagagcagctgcgacgtgaagctggtggaaaagagcttcgagacagacaccaacctgaacttccagatcctgtacgagatcctgctgggcaaggccaccctgtacgccgtgctggtgtctgccctggtgctgatggctatggtcaagcggaaggacagccggggacgcgccaagagaagcggatctggcgtgaagcagaccctgaatttcgacctgctgaagctggctggcgacgtggaatccaacccaggccctactagtatggactggatttggcgcatccttttccttgtcggcgctgctaccggcgcgcattccttcgaacaggtgcaactccagcagtctggcgcttccgtgaaggtgtcctgcaaggccagcgaactcgtgcggcctggcacaggctacgccttcaccaattacctgatcgagtgggtcaagcagaggcccggacagggcctggaatggatcggagtgattaacccaggcagcggcggcaccaactacaacgagaagttcaagggcaaggccaccctgaccgccgacaagagcagcagcacagcctacatgcaactgagcagcctgaccagcgacgacagcgccgtgtacttctgcgcccggtacagaagctacgactggtacttcgacgtgtggggagccggcaccaccgtgacagtgtcatctacgcgtgaggacctgaagaacgtgttcccacctgaggtggccgtgttcgagcctagcgaggccgagatcagccacacccagaaagccaccctcgtgtgcctggctaccggcttctaccccgaccatgtggaactgtcttggtgggtcaacggcaaagaggtgcacagcggcgtgtgtaccgacccccagccactgaaagaacagcccgccctgaacgacagccggtactgcctgagcagcagactgagagtgtccgccaccttctggcagaacccccggaaccacttcagatgccaggtgcagttctacggcctgagcgagaacgacgagtggacccaggacagagccaagcccgtgacccagatcgtgtctgccgaagcctggggcagagccgattgcggctttaccagcgagagctaccagcagggcgtgctgagcgccaccaacctgagcgtgatcggcttcagaatcctgctgctgaaagtggccggctttaacctgctgatgaccctgcggctgtggtccagc

SEQ ID NO: 5207 - DNA, 1866 bp, synthetic construct
  source 1..1866: mol_type = other DNA
atggccttaccagtgaccgccttgctcctgccgctggccttgctgctccacgccgccaggccggacatccagatgacccagagcttcagcagcctgagcgccagcgtgggcgacagagtgaccatcacctgtagagccagccaggacatcagcaactacctgaactggtatcagcagaagcccggcaaggcccccaagctgctgatctactacaccagcagactgcacagcggcgtgcccagcagattttctggcagcggctccggcaccgactacaccctgacaatcagctccctgcagcccgaggacttcgctacctacttctgtcagcaaggcaacaccctgccctggacctttggcggaggcaccaagctggaaatcaagagactcgagatccagaaccctgatcctgccgtgtaccagctgcgggatagcaagagcagcgacaagagcgtgtgtctgttcaccgacttcgacagccagaccaacgtgtcccagagcaaggactccgacgtgtacatcaccgataagtgcgtgctggacatgcggagcatggacttcaagagcaactccgccgtggcctggtccaacaagtccgatttcgcctgcgccaacgccttcaacaacagcattatccccgaggacacattcttcccaagccccgagagcagctgcgacgtgaagctggtggaaaagagcttcgagacagacaccaacctgaacttccagatcctgtacgagatcctgctgggcaaggccaccctgtacgccgtgctggtgtctgccctggtgctgatggctatggtcaagcggaaggacagccggggacgcgccaagagaagcggatctggcgtgaagcagaccctgaatttcgacctgctgaagctggctggcgacgtggaatccaacccaggccctactagtatggactggatttggcgcatccttttccttgtcggcgctgctaccggcgcgcattccttcgaagaagtgcaactggtgcagtccggcggagggctggtgcagagcggaggatctctgagactgagctgcagagccagcggctacaccttcacccggtactggatgctgtgggtgcgccagaggccaggcaagggactggaatgggtggccgagatcaacccccggaacgaccggaccaactacaacgagaagttcaagacccggttcaccatcagcgtggacagaagcaagaacaccctgtacctgcagatggacagcctgcgggccgaggataccgccgtgtacttttgtgctctgggaggcggctacgctatggactactggggccagggaacccttgtgaccgtgtcctctacgcgtgaggacctgaagaacgtgttcccacctgaggtggccgtgttcgagcctagcgaggccgagatcagccacacccagaaagccaccctcgtgtgcctggctaccggcttctaccccgaccatgtggaactgtcttggtgggtcaacggcaaagaggtgcacagcggcgtgtgtaccgacccccagccactgaaagaacagcccgccctgaacgacagccggtactgcctgagcagcagactgagagtgtccgccaccttctggcagaacccccggaaccacttcagatgccaggtgcagttctacggcctgagcgagaacgacgagtggacccaggacagagccaagcccgtgacccagatcgtgtctgccgaagcctggggcagagccgattgcggctttaccagcgagagctaccagcagggcgtgctgagcgccaccaacctgagcgtgatcggcttcagaatcctgctgctgaaagtggccggctttaacctgctgatgaccctgcggctgtggtccagc

SEQ ID NO: 5208 - DNA, 1869 bp, synthetic construct
  source 1..1869: mol_type = other DNA
atggccttaccagtgaccgccttgctcctgccgctggccttgctgctccacgccgccaggccggacatccagatgacacagtctccggcgtcactgtccgcctccgtgggggagactgtgactattatttgtagggcatcagttaacatctactcttatttggcctggtaccagcagaagcaaggcaagagtcctcagctgctggtgtataatgcgaagatcctggcagagggcgtgccgagccggttctccggcagcggctcaggtacccaattttccctcaagatcaattcactgcagccagaggactttggcagttactattgtcaacaccactacggcacattcactttcgggtccggtacaaaattggagattaagcgactcgagatccagaaccctgatcctgccgtgtaccagctgcgggatagcaagagcagcgacaagagcgtgtgtctgttcaccgacttcgacagccagaccaacgtgtcccagagcaaggactccgacgtgtacatcaccgataagtgcgtgctggacatgcggagcatggacttcaagagcaactccgccgtggcctggtccaacaagtccgatttcgcctgcgccaacgccttcaacaacagcattatccccgaggacacattcttcccaagccccgagagcagctgcgacgtgaagctggtggaaaagagcttcgagacagacaccaacctgaacttccagatcctgtacgagatcctgctgggcaaggccaccctgtacgccgtgctggtgtctgccctggtgctgatggctatggtcaagcggaaggacagccggggacgcgccaagagaagcggatctggcgtgaagcagaccctgaatttcgacctgctgaagctggctggcgacgtggaatccaacccaggccctactagtatggactggatttggcgcatccttttccttgtcggcgctgctaccggcgcgcattccttcgaacaggtacagttgaaagaaagcgggcctggactggtagcgccttcccaatctctctccatcacgtgcaccatctctggcttctccctgacttcctatggagttcactgggtgaggcagccccccggcaagggactggaatggctggtcgtcatctggtccgacgggtccacaacctacaactccgctctgaaaagtcggctctctatttctaaagataatagcaagagccaggtgtttctgaaaatgaactctctgcagaccgatgatacggccatttactactgcgcttcacactatggctcaaccttggcattcgcttcctggggccacggaacactggtgaccgtttccgcagccacgcgtgaggacctgaagaacgtgttcccacctgaggtggccgtgttcgagcctagcgaggccgagatcagccacacccagaaagccaccctcgtgtgcctggctaccggcttctaccccgaccatgtggaactgtcttggtgggtcaacggcaaagaggtgcacagcggcgtgtgtaccgacccccagccactgaaagaacagcccgccctgaacgacagccggtactgcctgagcagcagactgagagtgtccgccaccttctggcagaacccccggaaccacttcagatgccaggtgcagttctacggcctgagcgagaacgacgagtggacccaggacagagccaagcccgtgacccagatcgtgtctgccgaagcctggggcagagccgattgcggctttaccagcgagagctaccagcagggcgtgctgagcgccaccaacctgagcgtgatcggcttcagaatcctgctgctgaaagtggccggctttaacctgctgatgaccctgcggctgtggtccagc

SEQ ID NO: 5209 - DNA, 1893 bp, synthetic construct
  source 1..1893: mol_type = other DNA
atggccttaccagtgaccgccttgctcctgccgctggccttgctgctccacgccgccaggccggacattgtgatgacccagtctcacaaattcatgtccacatcagtaggagacagggtcagcgtcacctgcaaggccagtcagaatgtgggtaataatgtagcctggtatcaacagaaaccagggcaatctcctaaagtactgatttactcggcatcctaccggtacagtggagtccctgatcgcttcacaggcagtggatctgggacagatttcactctcaccatcagtaatgtgcagtctgaagacttggcagagtatttctgtcagcaatataacacctatccattcacgttcggctcggggacaaagttggaaataaaactcgagatccagaaccctgatcctgccgtgtaccagctgcgggatagcaagagcagcgacaagagcgtgtgtctgttcaccgacttcgacagccagaccaacgtgtcccagagcaaggactccgacgtgtacatcaccgataagtgcgtgctggacatgcggagcatggacttcaagagcaactccgccgtggcctggtccaacaagtccgatttcgcctgcgccaacgccttcaacaacagcattatccccgaggacacattcttcccaagccccgagagcagctgcgacgtgaagctggtggaaaagagcttcgagacagacaccaacctgaacttccagatcctgtacgagatcctgctgggcaaggccaccctgtacgccgtgctggtgtctgccctggtgctgatggctatggtcaagcggaaggacagccggggacgcgccaagagaagcggatctggcgtgaagcagaccctgaatttcgacctgctgaagctggctggcgacgtggaatccaacccaggccctactagtatggactggatttggcgcatccttttccttgtcggcgctgctaccggcgcgcattccttcgaagaggtacagctggaggaaagcggtggaggactggtgcaacctggagggtctatgaagctctcttgcgtagcttctgggttcacgttctccaattactggatgaactgggtgcggcagtcccccgagaaaggcctggaatgggtagcagaaattcggttcaagtcccataactatgctacacactttgccgagtctgtcaaaggccggttcactattagtcgagacgacagcaagtcttcagtctacctgcagatgaataacttgcgggcagaggacacaggtatctactactgcaccaggagaatcggcaactccgactatgactggtggtactttgacgtctggggagcaggcaccagcgtgacggtgagttcagcctcaacgcgtgaggacctgaagaacgtgttcccacctgaggtggccgtgttcgagcctagcgaggccgagatcagccacacccagaaagccaccctcgtgtgcctggctaccggcttctaccccgaccatgtggaactgtcttggtgggtcaacggcaaagaggtgcacagcggcgtgtgtaccgacccccagccactgaaagaacagcccgccctgaacgacagccggtactgcctgagcagcagactgagagtgtccgccaccttctggcagaacccccggaaccacttcagatgccaggtgcagttctacggcctgagcgagaacgacgagtggacccaggacagagccaagcccgtgacccagatcgtgtctgccgaagcctggggcagagccgattgcggctttaccagcgagagctaccagcagggcgtgctgagcgccaccaacctgagcgtgatcggcttcagaatcctgctgctgaaagtggccggctttaacctgctgatgaccctgcggctgtggtccagc

SEQ ID NO: 5210 - DNA, 1872 bp, synthetic construct
  source 1..1872: mol_type = other DNA
atggccttaccagtgaccgccttgctcctgccgctggccttgctgctccacgccgccaggccggaccagatcgtgctgacccagtcccccgctattatgtccgcatcaccgggcgaaaaagtgacgatctcctgtagcgcttcatctagcgtctcctacatgtattggtatcaacagaaacctgggtctagcccaaagccgtggatctacagaaccagtaaccttgccagtggggtgccagcccgcttcagcggtagtggcagtggaacttcctatagcctcacaataagcaacatggaggctgaagatgccgctgcctattactgccagcagtaccacagttacccaaccacgttcggcgggggaactaagctcgaagtaaaactcgagatccagaaccctgatcctgccgtgtaccagctgcgggatagcaagagcagcgacaagagcgtgtgtctgttcaccgacttcgacagccagaccaacgtgtcccagagcaaggactccgacgtgtacatcaccgataagtgcgtgctggacatgcggagcatggacttcaagagcaactccgccgtggcctggtccaacaagtccgatttcgcctgcgccaacgccttcaacaacagcattatccccgaggacacattcttcccaagccccgagagcagctgcgacgtgaagctggtggaaaagagcttcgagacagacaccaacctgaacttccagatcctgtacgagatcctgctgggcaaggccaccctgtacgccgtgctggtgtctgccctggtgctgatggctatggtcaagcggaaggacagccggggacgcgccaagagaagcggatctggcgtgaagcagaccctgaatttcgacctgctgaagctggctggcgacgtggaatccaacccaggccctactagtatggactggatttggcgcatccttttccttgtcggcgctgctaccggcgcgcattccttcgaagaggtgcagctggtggaatctgggggcggcctggtccaacctaagggatcactcaagctctcttgtgcggccagcggattctctttcaatacctatgctatgaattgggtgagacaggcgcccggaaagggcctcgaatggatagcccatatccggtcaaaatcaaacaatttcgcaacctactatgcggactccgtgaaggaccgattttccatctcccgagatgcctccgagaatattctgttcctgcagatgaataacctcaagacagaggacaccgccatgtactactgtgtgcgccagggcggtgactttcccatggattactgggggcaggggaccagcgtgaccgtgagctctacgcgtgaggacctgaagaacgtgttcccacctgaggtggccgtgttcgagcctagcgaggccgagatcagccacacccagaaagccaccctcgtgtgcctggctaccggcttctaccccgaccatgtggaactgtcttggtgggtcaacggcaaagaggtgcacagcggcgtgtgtaccgacccccagccactgaaagaacagcccgccctgaacgacagccggtactgcctgagcagcagactgagagtgtccgccaccttctggcagaacccccggaaccacttcagatgccaggtgcagttctacggcctgagcgagaacgacgagtggacccaggacagagccaagcccgtgacccagatcgtgtctgccgaagcctggggcagagccgattgcggctttaccagcgagagctaccagcagggcgtgctgagcgccaccaacctgagcgtgatcggcttcagaatcctgctgctgaaagtggccggctttaacctgctgatgaccctgcggctgtggtccagc

SEQ ID NO: 5211 - DNA, 1869 bp, synthetic construct
  source 1..1869: mol_type = other DNA
atggccttaccagtgaccgccttgctcctgccgctggccttgctgctccacgccgccaggccggacgacatccagatgacccagagcagcagcagcttcagcgtgagcctgggcgacagagtgaccatcacctgcatggccagcgaggacatctacatcagactggcctggtaccagcagaagcccggcaacgcccccagactgctgatcagcgccgccaccagcctggagaccggcgtgcccagcagattcagcggcagcggcagcggcaaggactacaccctgagcatcaccagcctgcagaccgaggacgtgggcacctactactgccagcagtactggagcagcccctggaccttcggcggcggcaccaagctggagatcaacctcgagatccagaaccctgatcctgccgtgtaccagctgcgggatagcaagagcagcgacaagagcgtgtgtctgttcaccgacttcgacagccagaccaacgtgtcccagagcaaggactccgacgtgtacatcaccgataagtgcgtgctggacatgcggagcatggacttcaagagcaactccgccgtggcctggtccaacaagtccgatttcgcctgcgccaacgccttcaacaacagcattatccccgaggacacattcttcccaagccccgagagcagctgcgacgtgaagctggtggaaaagagcttcgagacagacaccaacctgaacttccagatcctgtacgagatcctgctgggcaaggccaccctgtacgccgtgctggtgtctgccctggtgctgatggctatggtcaagcggaaggacagccggggacgcgccaagagaagcggatctggcgtgaagcagaccctgaatttcgacctgctgaagctggctggcgacgtggaatccaacccaggccctactagtatggactggatttggcgcatccttttccttgtcggcgctgctaccggcgcgcattccttcgaagacgtgcagctgcaggagagcggccccggcctggtgaagcccagccagagcctgagcctgacctgcaccgtgaccggctacagcatcaccagcgactacacctggaactggatcagacagttccccggcaacaagctggagtggatgggctacatcacctacagcggcagcaccagctacaaccccagcctgaagagcagaaacagcatcaccagagacaccagcaagaaccagttcttcctgcagctgaacagcgtgaccaccgaggacaccgccacctactactgcgccagactgggcagaagatacacaatggactactggggccagggcaccagcgtgaccgtgagcagcacgcgtgaggacctgaagaacgtgttcccacctgaggtggccgtgttcgagcctagcgaggccgagatcagccacacccagaaagccaccctcgtgtgcctggctaccggcttctaccccgaccatgtggaactgtcttggtgggtcaacggcaaagaggtgcacagcggcgtgtgtaccgacccccagccactgaaagaacagcccgccctgaacgacagccggtactgcctgagcagcagactgagagtgtccgccaccttctggcagaacccccggaaccacttcagatgccaggtgcagttctacggcctgagcgagaacgacgagtggacccaggacagagccaagcccgtgacccagatcgtgtctgccgaagcctggggcagagccgattgcggctttaccagcgagagctaccagcagggcgtgctgagcgccaccaacctgagcgtgatcggcttcagaatcctgctgctgaaagtggccggctttaacctgctgatgaccctgcggctgtggtccagc

SEQ ID NO: 5212 - DNA, 1878 bp, synthetic construct
  source 1..1878: mol_type = other DNA
atggccttaccagtgaccgccttgctcctgccgctggccttgctgctccacgccgccaggccggacgacatccagatgacccagagccccagcagcctgtctgccagcgtgggcgacagagtgaccatcacctgtagagccagccagagcatcagcagctacctgaactggtatcagcagaagcccggcaaggcccccaaactgctgatctacgacgccagcaacctggaaaccggcgtgcccagcagattttccggcagcggctctggcaccgacttcaccttcaccatcagctccctccagcccgaggacattgccacctactactgccagcagtacgacaacctgcccctgacctttggcggaggcaccaaggtggacatcaagagactcgagatccagaaccctgatcctgccgtgtaccagctgcgggatagcaagagcagcgacaagagcgtgtgtctgttcaccgacttcgacagccagaccaacgtgtcccagagcaaggactccgacgtgtacatcaccgataagtgcgtgctggacatgcggagcatggacttcaagagcaactccgccgtggcctggtccaacaagtccgatttcgcctgcgccaacgccttcaacaacagcattatccccgaggacacattcttcccaagccccgagagcagctgcgacgtgaagctggtggaaaagagcttcgagacagacaccaacctgaacttccagatcctgtacgagatcctgctgggcaaggccaccctgtacgccgtgctggtgtctgccctggtgctgatggctatggtcaagcggaaggacagccggggacgcgccaagagaagcggatctggcgtgaagcagaccctgaatttcgacctgctgaagctggctggcgacgtggaatccaacccaggccctactagtatggactggatttggcgcatccttttccttgtcggcgctgctaccggcgcgcattccttcgaacaggtgcaactggtggaatctggcggcggagtggtgcagcctggcagaagcctgagactgagctgtgccgccagcggcttcacctttagcagctacgccatgcactgggtgcgccaggcccctggaaaaggcctggaatgggtggccgtgatctcctacgacggctccaacaagtattacgccgacagcgtgaagggccggttcaccatctccagagacaacagcaagaacaccctgtacctccagatgaacagcctgcgggccgaggacaccgccgtgtactattgtgccagggctcacaacagcagctcttggagcttcgactactggggccagggcaccctcgtgaccgtgtcatctacgcgtgaggacctgaagaacgtgttcccacctgaggtggccgtgttcgagcctagcgaggccgagatcagccacacccagaaagccaccctcgtgtgcctggctaccggcttctaccccgaccatgtggaactgtcttggtgggtcaacggcaaagaggtgcacagcggcgtgtgtaccgacccccagccactgaaagaacagcccgccctgaacgacagccggtactgcctgagcagcagactgagagtgtccgccaccttctggcagaacccccggaaccacttcagatgccaggtgcagttctacggcctgagcgagaacgacgagtggacccaggacagagccaagcccgtgacccagatcgtgtctgccgaagcctggggcagagccgattgcggctttaccagcgagagctaccagcagggcgtgctgagcgccaccaacctgagcgtgatcggcttcagaatcctgctgctgaaagtggccggctttaacctgctgatgaccctgcggctgtggtccagc

SEQ ID NO: 5213 - DNA, 1905 bp, synthetic construct
  source 1..1905: mol_type = other DNA
atggccttaccagtgaccgccttgctcctgccgctggccttgctgctccacgccgccaggccggacgacgtcgtgatgacccagagccctctgagcctgcctgtgtccctgggcgatcaggccagcatctcctgcagatccagccagagactggtgcacagcaacggcaacacctacctgcactggtatctgcagaagcccggccagagccccaagctgctgatctaccgggtgtccaacagattccccggcgtgcccgatagattcagcggctctggcagcggcaccgacttcaccctgaagatcagccgggtggaagccgaggacctgggcatctatttctgcagccagagcacccacgtgccctacacctttggcggaggcaccaagctggaaatcaagcggctcgagatccagaaccctgatcctgccgtgtaccagctgcgggatagcaagagcagcgacaagagcgtgtgtctgttcaccgacttcgacagccagaccaacgtgtcccagagcaaggactccgacgtgtacatcaccgataagtgcgtgctggacatgcggagcatggacttcaagagcaactccgccgtggcctggtccaacaagtccgatttcgcctgcgccaacgccttcaacaacagcattatccccgaggacacattcttcccaagccccgagagcagctgcgacgtgaagctggtggaaaagagcttcgagacagacaccaacctgaacttccagatcctgtacgagatcctgctgggcaaggccaccctgtacgccgtgctggtgtctgccctggtgctgatggctatggtcaagcggaaggacagccggggacgcgccaagagaagcggatctggcgtgaagcagaccctgaatttcgacctgctgaagctggctggcgacgtggaatccaacccaggccctactagtatggactggatttggcgcatccttttccttgtcggcgctgctaccggcgcgcattccttcgaagaagtgcggctgcagcagtctggccccgacctgattaagcctggggccagcgtgaagatgagctgcaaggccagcggctacaccttcaccggctacgtgatgcactgggtcaagcagaggccaggccagggcctggaatggatcggcttcatcaacccctacaacgacgacatccagagcaacgagcggttccggggcaaggccaccctgaccagcgataagagcagcaccaccgcctacatggaactgagcagcctgacctccgaggacagcgccgtgtactactgtgctaggggagccggctacaacttcgacggggcctacagattcttcgacttttggggccagggcaccacactgaccgtgtcctctacgcgtgaggacctgaagaacgtgttcccacctgaggtggccgtgttcgagcctagcgaggccgagatcagccacacccagaaagccaccctcgtgtgcctggctaccggcttctaccccgaccatgtggaactgtcttggtgggtcaacggcaaagaggtgcacagcggcgtgtgtaccgacccccagccactgaaagaacagcccgccctgaacgacagccggtactgcctgagcagcagactgagagtgtccgccaccttctggcagaacccccggaaccacttcagatgccaggtgcagttctacggcctgagcgagaacgacgagtggacccaggacagagccaagcccgtgacccagatcgtgtctgccgaagcctggggcagagccgattgcggctttaccagcgagagctaccagcagggcgtgctgagcgccaccaacctgagcgtgatcggcttcagaatcctgctgctgaaagtggccggctttaacctgctgatgaccctgcggctgtggtccagc

SEQ ID NO: 5214 - DNA, 1878 bp, synthetic construct
  source 1..1878: mol_type = other DNA
atggccttaccagtgaccgccttgctcctgccgctggccttgctgctccacgccgccaggccggacagctacgagctgacccagcctcctagcgtgtccgtgtctcctggacagaccgccaccatctcttgcagcggcgatcaactgggcgggaagtacggccactggtatcagaagaagcccggccagagccccgtgctggtgctgtaccaggacagaaaacggcctgccggcatccccgagagattcagcggaagcagcagcggcaacaccatcaccctgaccatcagcggcacccaggccgtggatgaggccgactactactgccaggcttgggacaccaatctgggcggcgtgttcggcggaggcaccaaagtgacagtgctgggacagctcgagatccagaaccctgatcctgccgtgtaccagctgcgggatagcaagagcagcgacaagagcgtgtgtctgttcaccgacttcgacagccagaccaacgtgtcccagagcaaggactccgacgtgtacatcaccgataagtgcgtgctggacatgcggagcatggacttcaagagcaactccgccgtggcctggtccaacaagtccgatttcgcctgcgccaacgccttcaacaacagcattatccccgaggacacattcttcccaagccccgagagcagctgcgacgtgaagctggtggaaaagagcttcgagacagacaccaacctgaacttccagatcctgtacgagatcctgctgggcaaggccaccctgtacgccgtgctggtgtctgccctggtgctgatggctatggtcaagcggaaggacagccggggacgcgccaagagaagcggatctggcgtgaagcagaccctgaatttcgacctgctgaagctggctggcgacgtggaatccaacccaggccctactagtatggactggatttggcgcatccttttccttgtcggcgctgctaccggcgcgcattccttcgaacaggtgcaactggtggaaagcggagccgaagtgaagaaacctggggccagcgtgaaggtgtcctgcaaggccagcggctacacctttaccggctactacatgcactgggtgcgccaggctccaggccagggactggaatggatgggccggatcaaccccaatagcggcggcaccaactacgcccagaaattccagggcagagtgaccatgaccagagacaccagcatcagcaccgcctacatggaactgagccggctgagaagcgacgacaccgccgtgtactactgcgccagccctagaggcagaggcagcgccttcgatatttggggccagggcacactcgtgaccgtgtcctctacgcgtgaggacctgaagaacgtgttcccacctgaggtggccgtgttcgagcctagcgaggccgagatcagccacacccagaaagccaccctcgtgtgcctggctaccggcttctaccccgaccatgtggaactgtcttggtgggtcaacggcaaagaggtgcacagcggcgtgtgtaccgacccccagccactgaaagaacagcccgccctgaacgacagccggtactgcctgagcagcagactgagagtgtccgccaccttctggcagaacccccggaaccacttcagatgccaggtgcagttctacggcctgagcgagaacgacgagtggacccaggacagagccaagcccgtgacccagatcgtgtctgccgaagcctggggcagagccgattgcggctttaccagcgagagctaccagcagggcgtgctgagcgccaccaacctgagcgtgatcggcttcagaatcctgctgctgaaagtggccggctttaacctgctgatgaccctgcggctgtggtccagc

SEQ ID NO: 5215 - DNA, 1887 bp, synthetic construct
  source 1..1887: mol_type = other DNA
atggccttaccagtgaccgccttgctcctgccgctggccttgctgctccacgccgccaggccggacaacttcatgctgacccagccccacagcgtgtccgagagccctggcaagaccgtgaccatctcctgcaccagaagcagcggctctatcgccagcaaatacgtgcagtggtatcagcagaggcccggcagcagccctaccaccgtgatctacgaggacaaccagaggcctagcggcgtgcccgatagattcagcggcagcatcgacaccagcagcaacagcgccagcctgaccatcagcggcctgagaacagaggacgaggccgactactactgccacagctacgacagcaacaaccactccgtgttcggcggaggcaccaaagtgacagtgctgggacagctcgagatccagaaccctgatcctgccgtgtaccagctgcgggatagcaagagcagcgacaagagcgtgtgtctgttcaccgacttcgacagccagaccaacgtgtcccagagcaaggactccgacgtgtacatcaccgataagtgcgtgctggacatgcggagcatggacttcaagagcaactccgccgtggcctggtccaacaagtccgatttcgcctgcgccaacgccttcaacaacagcattatccccgaggacacattcttcccaagccccgagagcagctgcgacgtgaagctggtggaaaagagcttcgagacagacaccaacctgaacttccagatcctgtacgagatcctgctgggcaaggccaccctgtacgccgtgctggtgtctgccctggtgctgatggctatggtcaagcggaaggacagccggggacgcgccaagagaagcggatctggcgtgaagcagaccctgaatttcgacctgctgaagctggctggcgacgtggaatccaacccaggccctactagtatggactggatttggcgcatccttttccttgtcggcgctgctaccggcgcgcattccttcgaagaagtgcaactggtggaaagcgggggaggcgtggtgcagccaggcggatctctgagactgagctgtgccgccagcggcttcaccttcagcagctacgccatgagctgggtgcgccaggcccctggaaaaggcctggaatgggtgtccgccatctctggctctggcggcagcacctactacgccgatagcgtgaagggccggttcagcatcagccgggacaacagcaagaacaccctgtacctccagatgaacagcctgcgggccgaggacaccgccgtgtactactgtgccagaaccagaagctccggggccttcgacatctggggccagggaacactcgtgaccgtgtcctctacgcgtgaggacctgaagaacgtgttcccacctgaggtggccgtgttcgagcctagcgaggccgagatcagccacacccagaaagccaccctcgtgtgcctggctaccggcttctaccccgaccatgtggaactgtcttggtgggtcaacggcaaagaggtgcacagcggcgtgtgtaccgacccccagccactgaaagaacagcccgccctgaacgacagccggtactgcctgagcagcagactgagagtgtccgccaccttctggcagaacccccggaaccacttcagatgccaggtgcagttctacggcctgagcgagaacgacgagtggacccaggacagagccaagcccgtgacccagatcgtgtctgccgaagcctggggcagagccgattgcggctttaccagcgagagctaccagcagggcgtgctgagcgccaccaacctgagcgtgatcggcttcagaatcctgctgctgaaagtggccggctttaacctgctgatgaccctgcggctgtggtccagc

SEQ ID NO: 5216 - DNA, 1872 bp, synthetic construct
  source 1..1872: mol_type = other DNA
atggccttaccagtgaccgccttgctcctgccgctggccttgctgctccacgccgccaggccggacatccagatgaaccagagccccagcagcctgagcgccagcctgggcgataccatcaccatcacctgtcacgccagccagaacatcaacgtgtggctgagctggtatcagcagaagcccggcaacatccccaagctgctgatctacaaggccagcaacctgcacaccggcgtgcccagcagattttctggcagcggctctggcaccggcttcaccattaccatcagctccctccagcccgaggacattgccacctactactgccagcagggccagagctacccctggacatttggcggaggcaccaagctggaaatcaagagactcgagatccagaaccctgatcctgccgtgtaccagctgcgggatagcaagagcagcgacaagagcgtgtgtctgttcaccgacttcgacagccagaccaacgtgtcccagagcaaggactccgacgtgtacatcaccgataagtgcgtgctggacatgcggagcatggacttcaagagcaactccgccgtggcctggtccaacaagtccgatttcgcctgcgccaacgccttcaacaacagcattatccccgaggacacattcttcccaagccccgagagcagctgcgacgtgaagctggtggaaaagagcttcgagacagacaccaacctgaacttccagatcctgtacgagatcctgctgggcaaggccaccctgtacgccgtgctggtgtctgccctggtgctgatggctatggtcaagcggaaggacagccggggacgcgccaagagaagcggatctggcgtgaagcagaccctgaatttcgacctgctgaagctggctggcgacgtggaatccaacccaggccctactagtatggactggatttggcgcatccttttccttgtcggcgctgctaccggcgcgcattccttcgaagaagtgcaactccagcagagcggcccagagcttgtgaagcctggcgcttccgtgaagattagctgcaaagccagcggctacagcttcaccggctacttcatgaactgggtcaagcagagccacggcaagagcctggagtacatcggcagattcaacccctacaacggcgagacactgtacaaccagaagttcaagggcaaggccaccctgaccgtggacaagagcagcagcaccgtgcacatggaactgctgagcgtgaccagcgaggacagcgccgtgtactactgtggcagaagcggcaacgacgacgctatggactattggggccagggcaccagcgtgaccgtgtctagtgctacgcgtgaggacctgaagaacgtgttcccacctgaggtggccgtgttcgagcctagcgaggccgagatcagccacacccagaaagccaccctcgtgtgcctggctaccggcttctaccccgaccatgtggaactgtcttggtgggtcaacggcaaagaggtgcacagcggcgtgtgtaccgacccccagccactgaaagaacagcccgccctgaacgacagccggtactgcctgagcagcagactgagagtgtccgccaccttctggcagaacccccggaaccacttcagatgccaggtgcagttctacggcctgagcgagaacgacgagtggacccaggacagagccaagcccgtgacccagatcgtgtctgccgaagcctggggcagagccgattgcggctttaccagcgagagctaccagcagggcgtgctgagcgccaccaacctgagcgtgatcggcttcagaatcctgctgctgaaagtggccggctttaacctgctgatgaccctgcggctgtggtccagc

SEQ ID NO: 5217 - DNA, 1875 bp, synthetic construct
  source 1..1875: mol_type = other DNA
atggccttaccagtgaccgccttgctcctgccgctggccttgctgctccacgccgccaggccggagatcgtgctgacacagagccctgccaccctgtctctgagccctggcgaaagagccaccctgagctgtagagccagccagagcgtgcggagctacctggcctggtatcagcagaagcctggacaggcccccagactgctgatctacgacgccagcaatcgggccacaggcatccccgccagattttctggctctggcagcggcaccgacttcaccctgacaatcagcagcctggaacccgaggacttcgccgtgtactactgccagcagcggagcaactggccccctacctttggacagggcaccaaggtggaaatcaagctcgagatccagaaccctgatcctgccgtgtaccagctgcgggatagcaagagcagcgacaagagcgtgtgtctgttcaccgacttcgacagccagaccaacgtgtcccagagcaaggactccgacgtgtacatcaccgataagtgcgtgctggacatgcggagcatggacttcaagagcaactccgccgtggcctggtccaacaagtccgatttcgcctgcgccaacgccttcaacaacagcattatccccgaggacacattcttcccaagccccgagagcagctgcgacgtgaagctggtggaaaagagcttcgagacagacaccaacctgaacttccagatcctgtacgagatcctgctgggcaaggccaccctgtacgccgtgctggtgtctgccctggtgctgatggctatggtcaagcggaaggacagccggggacgcgccaagagaagcggatctggcgtgaagcagaccctgaatttcgacctgctgaagctggctggcgacgtggaatccaacccaggccctactagtatggactggatttggcgcatccttttccttgtcggcgctgctaccggcgcgcattccttcgaacaactccaggtgcaggaatctggccccggactcgtgaagcccagcgagacactgagcctgacctgtaccgtgtccggcggcagcatcagcaacagctacttctcctggggctggatcagacagccccctggcaagggcctggaatggatcggcagcttctactacggcgagaaaacctactacaaccccagcctgaagtccagagccaccatcagcatcgacaccagcaagagccagttctccctgaagctgagcagcgtgacagccgccgacaccgccgtgtattattgccccagaggccccaccatgatccggggcgtgatcgactcttggggccagggaacactcgtgaccgtgtcctctacgcgtgaggacctgaagaacgtgttcccacctgaggtggccgtgttcgagcctagcgaggccgagatcagccacacccagaaagccaccctcgtgtgcctggctaccggcttctaccccgaccatgtggaactgtcttggtgggtcaacggcaaagaggtgcacagcggcgtgtgtaccgacccccagccactgaaagaacagcccgccctgaacgacagccggtactgcctgagcagcagactgagagtgtccgccaccttctggcagaacccccggaaccacttcagatgccaggtgcagttctacggcctgagcgagaacgacgagtggacccaggacagagccaagcccgtgacccagatcgtgtctgccgaagcctggggcagagccgattgcggctttaccagcgagagctaccagcagggcgtgctgagcgccaccaacctgagcgtgatcggcttcagaatcctgctgctgaaagtggccggctttaacctgctgatgaccctgcggctgtggtccagc

SEQ ID NO: 5218 - DNA, 1902 bp, synthetic construct
  source 1..1902: mol_type = other DNA
atggccttaccagtgaccgccttgctcctgccgctggccttgctgctccacgccgccaggccggacatcgtgatgacccagacccccctgagcctgcctgtgacacctggcgagcctgccagcatctcctgcagaagcagcagaagcctgctggacagcgacgacggcaacacctacctggactggtatctgcagaaacccggccagagcccccaactgctgatctacaccctgagctacagagccagcggcgtgcccgatagattttccggctctggcagcggcaccgacttcaccctgaagatcagccgggtggaagccgaggacgtgggcgtgtactactgtatgcagcgggtggaatttcccatcaccttcggccagggcaccagactggaaatcaagagactcgagatccagaaccctgatcctgccgtgtaccagctgcgggatagcaagagcagcgacaagagcgtgtgtctgttcaccgacttcgacagccagaccaacgtgtcccagagcaaggactccgacgtgtacatcaccgataagtgcgtgctggacatgcggagcatggacttcaagagcaactccgccgtggcctggtccaacaagtccgatttcgcctgcgccaacgccttcaacaacagcattatccccgaggacacattcttcccaagccccgagagcagctgcgacgtgaagctggtggaaaagagcttcgagacagacaccaacctgaacttccagatcctgtacgagatcctgctgggcaaggccaccctgtacgccgtgctggtgtctgccctggtgctgatggctatggtcaagcggaaggacagccggggacgcgccaagagaagcggatctggcgtgaagcagaccctgaatttcgacctgctgaagctggctggcgacgtggaatccaacccaggccctactagtatggactggatttggcgcatccttttccttgtcggcgctgctaccggcgcgcattccttcgaacaggtgcaactggtggaatctggcgggggagtggtgcagcctggcagatccctgagactgagctgtgccgccagcggcttcatcttcagcagatacggaatgcactgggtgcgccaggcccctggcaagggactgaaatgggtggccgtgatttggtacgacggcagcaacaagctgtacgccgacagcgtgaagggccggttcaccatcagcagagacaacagcaagaacaccctgtacctgcagatgaacagcctgcgggccgaggacaccgccgtgtactattgcgccagagactactacgacaacagccggcaccactggggcttcgactattggggccagggaacccttgtgaccgtgtcctctacgcgtgaggacctgaagaacgtgttcccacctgaggtggccgtgttcgagcctagcgaggccgagatcagccacacccagaaagccaccctcgtgtgcctggctaccggcttctaccccgaccatgtggaactgtcttggtgggtcaacggcaaagaggtgcacagcggcgtgtgtaccgacccccagccactgaaagaacagcccgccctgaacgacagccggtactgcctgagcagcagactgagagtgtccgccaccttctggcagaacccccggaaccacttcagatgccaggtgcagttctacggcctgagcgagaacgacgagtggacccaggacagagccaagcccgtgacccagatcgtgtctgccgaagcctggggcagagccgattgcggctttaccagcgagagctaccagcagggcgtgctgagcgccaccaacctgagcgtgatcggcttcagaatcctgctgctgaaagtggccggctttaacctgctgatgaccctgcggctgtggtccagc

SEQ ID NO: 5219 - DNA, 1872 bp, synthetic construct
  source 1..1872: mol_type = other DNA
atggccttaccagtgaccgccttgctcctgccgctggccttgctgctccacgccgccaggccggagatccagatgacccagagccccagcagcatgtctgccagcctgggcgacaccatcaccatcacatgccaggccacccaggacatcttcaagaacctgaactggtatcagcagaagcccggcaagccccccagcctgctgatctactatgccaccgaactggccgagggcgtgcccagcagattttctggcagcggcagcggctccgactacagcctgaccatcagcaacctggaaagcgaggacttcgccgcctactactgcctccagttcttcgagttcccattcaccttcggctccggcaccaagctggaaatgaagctcgagatccagaaccctgatcctgccgtgtaccagctgcgggatagcaagagcagcgacaagagcgtgtgtctgttcaccgacttcgacagccagaccaacgtgtcccagagcaaggactccgacgtgtacatcaccgataagtgcgtgctggacatgcggagcatggacttcaagagcaactccgccgtggcctggtccaacaagtccgatttcgcctgcgccaacgccttcaacaacagcattatccccgaggacacattcttcccaagccccgagagcagctgcgacgtgaagctggtggaaaagagcttcgagacagacaccaacctgaacttccagatcctgtacgagatcctgctgggcaaggccaccctgtacgccgtgctggtgtctgccctggtgctgatggctatggtcaagcggaaggacagccggggacgcgccaagagaagcggatctggcgtgaagcagaccctgaatttcgacctgctgaagctggctggcgacgtggaatccaacccaggccctactagtatggactggatttggcgcatccttttccttgtcggcgctgctaccggcgcgcattccttcgaacaggtgcaactccagcagtctggcgctgagcttgtgcggcctggcacctctgtgaaggtgtcctgtaaagccagcggctacgtgttcaccaactactggatcgagtggatcaagcagcggccaggccagggcctggaatggatcggcgtgatgaatccaggcagcggcgagacaacctacaacgagaagttcaagggcaaggccaccctgaccgccgacaagagcagcagcacagcctacatgcaactgtcctccctgaccagcgtggacagcgccgtgtacttctgcgccagggaccacgaccgggactactacgctatggactactggggccagggcaccagcgtgaccgtgtcatctacgcgtgaggacctgaagaacgtgttcccacctgaggtggccgtgttcgagcctagcgaggccgagatcagccacacccagaaagccaccctcgtgtgcctggctaccggcttctaccccgaccatgtggaactgtcttggtgggtcaacggcaaagaggtgcacagcggcgtgtgtaccgacccccagccactgaaagaacagcccgccctgaacgacagccggtactgcctgagcagcagactgagagtgtccgccaccttctggcagaacccccggaaccacttcagatgccaggtgcagttctacggcctgagcgagaacgacgagtggacccaggacagagccaagcccgtgacccagatcgtgtctgccgaagcctggggcagagccgattgcggctttaccagcgagagctaccagcagggcgtgctgagcgccaccaacctgagcgtgatcggcttcagaatcctgctgctgaaagtggccggctttaacctgctgatgaccctgcggctgtggtccagc

SEQ ID NO: 5220 - DNA, 1863 bp, synthetic construct
  source 1..1863: mol_type = other DNA
atggccttaccagtgaccgccttgctcctgccgctggccttgctgctccacgccgccaggccggacatcctgctgacacagagccccgccatcctgtccgtgtctccaggcgagagagtgtcctttagctgccgggccagccagaacatcggcaccagcatccactggtatcagcagcggaccaacggcagccccagactgctgattaagtacgccagcgagtccgtgtccggcatccccagcagattttctggcagcggctccggcaccgacttcaccctgagcatcaacagcgtggaaagcgaggacattgccgactactactgccagcacaccaatagctggcccaccacctttggcggaggcaccaagctggaaatcaagagactcgagatccagaaccctgatcctgccgtgtaccagctgcgggatagcaagagcagcgacaagagcgtgtgtctgttcaccgacttcgacagccagaccaacgtgtcccagagcaaggactccgacgtgtacatcaccgataagtgcgtgctggacatgcggagcatggacttcaagagcaactccgccgtggcctggtccaacaagtccgatttcgcctgcgccaacgccttcaacaacagcattatccccgaggacacattcttcccaagccccgagagcagctgcgacgtgaagctggtggaaaagagcttcgagacagacaccaacctgaacttccagatcctgtacgagatcctgctgggcaaggccaccctgtacgccgtgctggtgtctgccctggtgctgatggctatggtcaagcggaaggacagccggggacgcgccaagagaagcggatctggcgtgaagcagaccctgaatttcgacctgctgaagctggctggcgacgtggaatccaacccaggccctactagtatggactggatttggcgcatccttttccttgtcggcgctgctaccggcgcgcattccttcgaacaggtgcaactccagcagtccgacgccgagcttgtgaagcctggcgcttccgtgaagattagctgcaaggccagcggctacaccttcaccgaccacgccattcactgggtcaagcagaagcccgagcagggcctggaatggatcggctacttcagccccggcaacggcgacatcaagtacaacgagaagttcaagggcaaggccaccctgaccgccgacaagagcagcagcacagcctacatgcaactgaacagcctgaccagcgaggactccgccgtgtacttctgcaagcggagctacggcaactacgactactggggccagggcaccacactgaccgtgtctagtacgcgtgaggacctgaagaacgtgttcccacctgaggtggccgtgttcgagcctagcgaggccgagatcagccacacccagaaagccaccctcgtgtgcctggctaccggcttctaccccgaccatgtggaactgtcttggtgggtcaacggcaaagaggtgcacagcggcgtgtgtaccgacccccagccactgaaagaacagcccgccctgaacgacagccggtactgcctgagcagcagactgagagtgtccgccaccttctggcagaacccccggaaccacttcagatgccaggtgcagttctacggcctgagcgagaacgacgagtggacccaggacagagccaagcccgtgacccagatcgtgtctgccgaagcctggggcagagccgattgcggctttaccagcgagagctaccagcagggcgtgctgagcgccaccaacctgagcgtgatcggcttcagaatcctgctgctgaaagtggccggctttaacctgctgatgaccctgcggctgtggtccagc

SEQ ID NO: 5221 - DNA, 1878 bp, synthetic construct
  source 1..1878: mol_type = other DNA
atggccttaccagtgaccgccttgctcctgccgctggccttgctgctccacgccgccaggccggacatcgtgatgacccagagccccgatagcctggccgtgtctctgggagagagagccaccatcaactgcaagagcagccagagcctgctgaacagcggcgaccagaagaactacctgacctggtatcagcagaagcccggccagccccccaagctgctgatctactgggccagcaccagagaaagcggcgtgcccgatagattcagcggcagcggaagtggcaccgacttcaccctgaccatcagttctcttcaggccgaggacgtggccgtgtactactgccagaacgactacagctaccccctgaccttcggccagggcaccaaggtggaaatcaagctcgagatccagaaccctgatcctgccgtgtaccagctgcgggatagcaagagcagcgacaagagcgtgtgtctgttcaccgacttcgacagccagaccaacgtgtcccagagcaaggactccgacgtgtacatcaccgataagtgcgtgctggacatgcggagcatggacttcaagagcaactccgccgtggcctggtccaacaagtccgatttcgcctgcgccaacgccttcaacaacagcattatccccgaggacacattcttcccaagccccgagagcagctgcgacgtgaagctggtggaaaagagcttcgagacagacaccaacctgaacttccagatcctgtacgagatcctgctgggcaaggccaccctgtacgccgtgctggtgtctgccctggtgctgatggctatggtcaagcggaaggacagccggggacgcgccaagagaagcggatctggcgtgaagcagaccctgaatttcgacctgctgaagctggctggcgacgtggaatccaacccaggccctactagtatggactggatttggcgcatccttttccttgtcggcgctgctaccggcgcgcattccttcgaacaggtgcagctggtgcagtctggggccgaagtgaagaaaaccggcagcagcgtgaaggtgtcctgcaaggccagcggctacacctttaccgaccacgccattcacgtgtggcggcaggctccaggacaggccctggaatggatgggccacttcagccccggcaacaccgacatcaagtacaacgacaagttcaagggcagagtgaccctgaccgtggaccgcagcatgagcaccgcctacatggaactgagcagcctgcggagcgaggacaccgccatgtactattgcaagaccagcaccttctttttcgactactggggccagggaacaatggtcaccgtgtccagcacgcgtgaggacctgaagaacgtgttcccacctgaggtggccgtgttcgagcctagcgaggccgagatcagccacacccagaaagccaccctcgtgtgcctggctaccggcttctaccccgaccatgtggaactgtcttggtgggtcaacggcaaagaggtgcacagcggcgtgtgtaccgacccccagccactgaaagaacagcccgccctgaacgacagccggtactgcctgagcagcagactgagagtgtccgccaccttctggcagaacccccggaaccacttcagatgccaggtgcagttctacggcctgagcgagaacgacgagtggacccaggacagagccaagcccgtgacccagatcgtgtctgccgaagcctggggcagagccgattgcggctttaccagcgagagctaccagcagggcgtgctgagcgccaccaacctgagcgtgatcggcttcagaatcctgctgctgaaagtggccggctttaacctgctgatgaccctgcggctgtggtccagc

SEQ ID NO: 5222 - DNA, 1875 bp, synthetic construct
  source 1..1875: mol_type = other DNA
atggccttaccagtgaccgccttgctcctgccgctggccttgctgctccacgccgccaggccggacatccagatgacccagagccccagcagcctgtctgccagcgtgggcgacagagtgaccatcacatgcaaggccagccaggacgtgtccattgccgtggcctggtatcagcagaagcccggcaaggcccccaaggtgctgatctacagcgccagctacagatacaccggcgtgcccgacagattcagcggctctggcagcggcaccgacttcaccttcaccatcagctccctccagcccgaggatattgccgtgtactactgccagcagcactacatcacccccctgacctttggcggaggcaccaaggtggaaatcaagctcgagatccagaaccctgatcctgccgtgtaccagctgcgggatagcaagagcagcgacaagagcgtgtgtctgttcaccgacttcgacagccagaccaacgtgtcccagagcaaggactccgacgtgtacatcaccgataagtgcgtgctggacatgcggagcatggacttcaagagcaactccgccgtggcctggtccaacaagtccgatttcgcctgcgccaacgccttcaacaacagcattatccccgaggacacattcttcccaagccccgagagcagctgcgacgtgaagctggtggaaaagagcttcgagacagacaccaacctgaacttccagatcctgtacgagatcctgctgggcaaggccaccctgtacgccgtgctggtgtctgccctggtgctgatggctatggtcaagcggaaggacagccggggacgcgccaagagaagcggatctggcgtgaagcagaccctgaatttcgacctgctgaagctggctggcgacgtggaatccaacccaggccctactagtatggactggatttggcgcatccttttccttgtcggcgctgctaccggcgcgcattccttcgaacagatccaactggtgcagagcggccacgaagtgaagaaacctggggccagcgtgaaggtgtcctgcaaagccagcggctacacctttaccaactacggcatgaactgggtgcgccaggcccctggacagggcctggaatggatgggctggatcaacaccaagaccggcgagcccacctacgccgaagagttcaagggcagattcgtgttcagcctggaaaccagcgcctccaccgcctacctccagatcagctctctgaaggccgaggacaccgccatgtacttttgcggcagaggcggctacggcagcagctactggtacttcgatgtgtggggccagggcaccaccgtgaccgtgtcatctacgcgtgaggacctgaagaacgtgttcccacctgaggtggccgtgttcgagcctagcgaggccgagatcagccacacccagaaagccaccctcgtgtgcctggctaccggcttctaccccgaccatgtggaactgtcttggtgggtcaacggcaaagaggtgcacagcggcgtgtgtaccgacccccagccactgaaagaacagcccgccctgaacgacagccggtactgcctgagcagcagactgagagtgtccgccaccttctggcagaacccccggaaccacttcagatgccaggtgcagttctacggcctgagcgagaacgacgagtggacccaggacagagccaagcccgtgacccagatcgtgtctgccgaagcctggggcagagccgattgcggctttaccagcgagagctaccagcagggcgtgctgagcgccaccaacctgagcgtgatcggcttcagaatcctgctgctgaaagtggccggctttaacctgctgatgaccctgcggctgtggtccagc

SEQ ID NO: 5223 - DNA, 1881 bp, synthetic construct
  source 1..1881: mol_type = other DNA
atggccttaccagtgaccgccttgctcctgccgctggccttgctgctccacgccgccaggccggacatcgtgatgacccagagccccgatagcctggccgtgtctctgggagagagagccaccatcaactgccgggccagcaagagcgtgtccaccagcggctacagctacatgcactggtatcagcagaagcccggccagccccccaagctgctgatctacctggcctccaacctggaaagcggcgtgcccgatagattcagcggcagcggctctggcaccgacttcaccctgaccatcagttctcttcaggccgaggacgtggccgtgtactactgccagcacagcagagagctgccctacaccttcggccagggcaccaagctggaaatcaagctcgagatccagaaccctgatcctgccgtgtaccagctgcgggatagcaagagcagcgacaagagcgtgtgtctgttcaccgacttcgacagccagaccaacgtgtcccagagcaaggactccgacgtgtacatcaccgataagtgcgtgctggacatgcggagcatggacttcaagagcaactccgccgtggcctggtccaacaagtccgatttcgcctgcgccaacgccttcaacaacagcattatccccgaggacacattcttcccaagccccgagagcagctgcgacgtgaagctggtggaaaagagcttcgagacagacaccaacctgaacttccagatcctgtacgagatcctgctgggcaaggccaccctgtacgccgtgctggtgtctgccctggtgctgatggctatggtcaagcggaaggacagccggggacgcgccaagagaagcggatctggcgtgaagcagaccctgaatttcgacctgctgaagctggctggcgacgtggaatccaacccaggccctactagtatggactggatttggcgcatccttttccttgtcggcgctgctaccggcgcgcattccttcgaacaggtgcaactccaggaatctggccctggccttgtgaagcccagcgagacactgagcctgacctgtaccgtgtccggcggcagcatcagctcttacggcgtgcactggattcggcagcctccaggcaagggcctggaatggatcggcgtgatctggacctccggcgtgaccgactacaacagcgccctgatgggcagagtgaccatctccgtggacaccagcaagaaccagttcagcctgaagctgagcagcgtgacagccgccgataccgccgtgtattattgcgccagagatggcgactacgaccgctacacaatggactactggggccagggaacccttgtgaccgtgtcctctacgcgtgaggacctgaagaacgtgttcccacctgaggtggccgtgttcgagcctagcgaggccgagatcagccacacccagaaagccaccctcgtgtgcctggctaccggcttctaccccgaccatgtggaactgtcttggtgggtcaacggcaaagaggtgcacagcggcgtgtgtaccgacccccagccactgaaagaacagcccgccctgaacgacagccggtactgcctgagcagcagactgagagtgtccgccaccttctggcagaacccccggaaccacttcagatgccaggtgcagttctacggcctgagcgagaacgacgagtggacccaggacagagccaagcccgtgacccagatcgtgtctgccgaagcctggggcagagccgattgcggctttaccagcgagagctaccagcagggcgtgctgagcgccaccaacctgagcgtgatcggcttcagaatcctgctgctgaaagtggccggctttaacctgctgatgaccctgcggctgtggtccagc

SEQ ID NO: 5224 - DNA, 1881 bp, synthetic construct
  source 1..1881: mol_type = other DNA
atggccttaccagtgaccgccttgctcctgccgctggccttgctgctccacgccgccaggccggacatccagatgacccagagccccagcagcctgtctgccagcgtgggcgacagagtgaccatcacctgtagagccagccagagcatcggcaccagcctgcactggtatcagcagaagcctggcaaggcccccaagctgctgattaagttcgccagcagactgcagagcggcgtgcccagcagattttctggcagcggctccggcaccgacttcaccctgacaatcagctccctgcagcccgaggacttcgccacctactactgccagcagagccccggcttccctccaacctttggacagggcaccaagctggaaatcaagcggctcgagatccagaaccctgatcctgccgtgtaccagctgcgggatagcaagagcagcgacaagagcgtgtgtctgttcaccgacttcgacagccagaccaacgtgtcccagagcaaggactccgacgtgtacatcaccgataagtgcgtgctggacatgcggagcatggacttcaagagcaactccgccgtggcctggtccaacaagtccgatttcgcctgcgccaacgccttcaacaacagcattatccccgaggacacattcttcccaagccccgagagcagctgcgacgtgaagctggtggaaaagagcttcgagacagacaccaacctgaacttccagatcctgtacgagatcctgctgggcaaggccaccctgtacgccgtgctggtgtctgccctggtgctgatggctatggtcaagcggaaggacagccggggacgcgccaagagaagcggatctggcgtgaagcagaccctgaatttcgacctgctgaagctggctggcgacgtggaatccaacccaggccctactagtatggactggatttggcgcatccttttccttgtcggcgctgctaccggcgcgcattccttcgaacaggtgcaactggtggaatctggcggcggacttgtgaagccaggcggcagcctgagactgagctgtgccgccagcggcttcagcatcaccaccagcggctactactggacctggatcagacagttccccggcaagggcctggaatggatgggctacatcggctacaacagcaagacctactacaaccccgccctgaagtcccggatcaccatcagcagagacaacgccaagaacagcctgtacctgcagatgaactccctgagagccgaggataccgccgtgtactactgcgccagatccctgtacggcggctacaaggacgccttcgatagctggggccagggaacccttgtgaccgtgtctagcacgcgtgaggacctgaagaacgtgttcccacctgaggtggccgtgttcgagcctagcgaggccgagatcagccacacccagaaagccaccctcgtgtgcctggctaccggcttctaccccgaccatgtggaactgtcttggtgggtcaacggcaaagaggtgcacagcggcgtgtgtaccgacccccagccactgaaagaacagcccgccctgaacgacagccggtactgcctgagcagcagactgagagtgtccgccaccttctggcagaacccccggaaccacttcagatgccaggtgcagttctacggcctgagcgagaacgacgagtggacccaggacagagccaagcccgtgacccagatcgtgtctgccgaagcctggggcagagccgattgcggctttaccagcgagagctaccagcagggcgtgctgagcgccaccaacctgagcgtgatcggcttcagaatcctgctgctgaaagtggccggctttaacctgctgatgaccctgcggctgtggtccagc

SEQ ID NO: 5225 - DNA, 1896 bp, synthetic construct
  source 1..1896: mol_type = other DNA
atggccttaccagtgaccgccttgctcctgccgctggccttgctgctccacgccgccaggccggacgagatcgtgctgacccagagccctctgagcctgcctgtgacacctggcgagcctgccagcatctcctgtagaagcagccagagcctgctgcacagcatcggctacaactacctggactggtatctccagaagcccggccagagcccccaactgctgatctacctgggcagcaacagagccagcggcgtgcccgatagattttccggcagcggctccggcaccgacttcaccctgaagatcagccgggtggaagccgaggacgtgggcgtgtactactgtatgcaggccctccagacccccctgacctttggcggaggcaccaaggtggaaatcaagcggctcgagatccagaaccctgatcctgccgtgtaccagctgcgggatagcaagagcagcgacaagagcgtgtgtctgttcaccgacttcgacagccagaccaacgtgtcccagagcaaggactccgacgtgtacatcaccgataagtgcgtgctggacatgcggagcatggacttcaagagcaactccgccgtggcctggtccaacaagtccgatttcgcctgcgccaacgccttcaacaacagcattatccccgaggacacattcttcccaagccccgagagcagctgcgacgtgaagctggtggaaaagagcttcgagacagacaccaacctgaacttccagatcctgtacgagatcctgctgggcaaggccaccctgtacgccgtgctggtgtctgccctggtgctgatggctatggtcaagcggaaggacagccggggacgcgccaagagaagcggatctggcgtgaagcagaccctgaatttcgacctgctgaagctggctggcgacgtggaatccaacccaggccctactagtatggactggatttggcgcatccttttccttgtcggcgctgctaccggcgcgcattccttcgaagaagtgcaactggtggaaagcggaggcggcgtggtgcagcctggaagaagcctgagactgagctgtgccgccagcggcttcaccttccggtcctacggaatgcactgggtgcgccaggcccctggcaaaggactggaatgggtggccgtgatctcctacgacggctccaacaagtactacaccgacagcgtgaacggcagattcaccatcagcagagacaacagcaagaacaccctgtacctccagatgaacagcctgcgggccgaggacaccgccgtgtactattgtgctagaggcggaggctactacgagacaagcggccctgattactggggccagggcacactcgtgaccgtgtctagtacgcgtgaggacctgaagaacgtgttcccacctgaggtggccgtgttcgagcctagcgaggccgagatcagccacacccagaaagccaccctcgtgtgcctggctaccggcttctaccccgaccatgtggaactgtcttggtgggtcaacggcaaagaggtgcacagcggcgtgtgtaccgacccccagccactgaaagaacagcccgccctgaacgacagccggtactgcctgagcagcagactgagagtgtccgccaccttctggcagaacccccggaaccacttcagatgccaggtgcagttctacggcctgagcgagaacgacgagtggacccaggacagagccaagcccgtgacccagatcgtgtctgccgaagcctggggcagagccgattgcggctttaccagcgagagctaccagcagggcgtgctgagcgccaccaacctgagcgtgatcggcttcagaatcctgctgctgaaagtggccggctttaacctgctgatgaccctgcggctgtggtccagc

SEQ ID NO: 5226 - DNA, 1890 bp, synthetic construct
  source 1..1890: mol_type = other DNA
atggccttaccagtgaccgccttgctcctgccgctggccttgctgctccacgccgccaggccggacgacgtcgtgatgacccagagccctctgagcctgcctgtgacacctggcgagcctgccagcatctcctgtagaagcagccagagcctgctgcacagcatcggctacaactacctgcactggtttctccagaagcccggccagagcccccaactgctgatctacctgggcagcaacagagccagcggcgtgcccgatagattttccggcagcggctccggcaccgacttcaccctgaagatcagccgggtggaagccgaggacgtgggcgtgtactactgtatgcaggccctccagacccctcccacctttggacagggcaccagactggaaatcaagcggctcgagatccagaaccctgatcctgccgtgtaccagctgcgggatagcaagagcagcgacaagagcgtgtgtctgttcaccgacttcgacagccagaccaacgtgtcccagagcaaggactccgacgtgtacatcaccgataagtgcgtgctggacatgcggagcatggacttcaagagcaactccgccgtggcctggtccaacaagtccgatttcgcctgcgccaacgccttcaacaacagcattatccccgaggacacattcttcccaagccccgagagcagctgcgacgtgaagctggtggaaaagagcttcgagacagacaccaacctgaacttccagatcctgtacgagatcctgctgggcaaggccaccctgtacgccgtgctggtgtctgccctggtgctgatggctatggtcaagcggaaggacagccggggacgcgccaagagaagcggatctggcgtgaagcagaccctgaatttcgacctgctgaagctggctggcgacgtggaatccaacccaggccctactagtatggactggatttggcgcatccttttccttgtcggcgctgctaccggcgcgcattccttcgaacaactccaactccaggaaagcggccctggcctcgtgaagcctagcggcacactgagcctgacatgtgccgtgtctggcggcagcatcagcagcagcaactggtggtcttgggtgcgccagcctcctggcaagggcctggaatggatcggcgaaatctaccacagcggcagcaccaactacaaccccagcctgaagtccagagtgaccatcagcgtggacaagagcaagaaccagttctccctgaagctgagcagcgtgacagccgccgataccgccgtgtactattgcgtgggcagcccctacggcgactacgtgctggattattggggccagggcaccctcgtgaccgtgtctagtacgcgtgaggacctgaagaacgtgttcccacctgaggtggccgtgttcgagcctagcgaggccgagatcagccacacccagaaagccaccctcgtgtgcctggctaccggcttctaccccgaccatgtggaactgtcttggtgggtcaacggcaaagaggtgcacagcggcgtgtgtaccgacccccagccactgaaagaacagcccgccctgaacgacagccggtactgcctgagcagcagactgagagtgtccgccaccttctggcagaacccccggaaccacttcagatgccaggtgcagttctacggcctgagcgagaacgacgagtggacccaggacagagccaagcccgtgacccagatcgtgtctgccgaagcctggggcagagccgattgcggctttaccagcgagagctaccagcagggcgtgctgagcgccaccaacctgagcgtgatcggcttcagaatcctgctgctgaaagtggccggctttaacctgctgatgaccctgcggctgtggtccagc

SEQ ID NO: 5227 - DNA, 1884 bp, synthetic construct
  source 1..1884: mol_type = other DNA
atggccttaccagtgaccgccttgctcctgccgctggccttgctgctccacgccgccaggccggacgagatcgtgctgacacagagccctggcaccctgagcctgtctctgggagagagagccacactgagctgtcgggccagccagtctatcagcagcagcttcctggcctggtatcagcagaagcccggccaggcccctaagctgctgatctacgccgccagcacaagagccaccggcatccccgatagattcagcggctctggcagcggcaccgacttcaccctgaccatcagcagactggaacccgaggacttcgccgtgtactactgccagcagtacggcagaagcctgagcttcggcggaggcaccaaggtggaagtgaagctcgagatccagaaccctgatcctgccgtgtaccagctgcgggatagcaagagcagcgacaagagcgtgtgtctgttcaccgacttcgacagccagaccaacgtgtcccagagcaaggactccgacgtgtacatcaccgataagtgcgtgctggacatgcggagcatggacttcaagagcaactccgccgtggcctggtccaacaagtccgatttcgcctgcgccaacgccttcaacaacagcattatccccgaggacacattcttcccaagccccgagagcagctgcgacgtgaagctggtggaaaagagcttcgagacagacaccaacctgaacttccagatcctgtacgagatcctgctgggcaaggccaccctgtacgccgtgctggtgtctgccctggtgctgatggctatggtcaagcggaaggacagccggggacgcgccaagagaagcggatctggcgtgaagcagaccctgaatttcgacctgctgaagctggctggcgacgtggaatccaacccaggccctactagtatggactggatttggcgcatccttttccttgtcggcgctgctaccggcgcgcattccttcgaacaggtgcaactccagcagtctggccccggactcgtgaagcctagccagacactgagcctgacctgcgccatcagcggcgatagcgtgtccggcaatagcgccacctggaactggatcagacagagcccatctcggggcctggaatggctgggccggacctactaccgcagcaagtggaaccacgactacgccgagagcgtgaagtcccggatcaccatcaaccccgacaccagcaagaaccagttctccttgcaactgaacagcgtgacccccgaggacacagccgtgtattattgcgccagaggcgacagcagctcttggtacgccttcgactattggggccagggcaccctcgtgaccgtgtctagtacgcgtgaggacctgaagaacgtgttcccacctgaggtggccgtgttcgagcctagcgaggccgagatcagccacacccagaaagccaccctcgtgtgcctggctaccggcttctaccccgaccatgtggaactgtcttggtgggtcaacggcaaagaggtgcacagcggcgtgtgtaccgacccccagccactgaaagaacagcccgccctgaacgacagccggtactgcctgagcagcagactgagagtgtccgccaccttctggcagaacccccggaaccacttcagatgccaggtgcagttctacggcctgagcgagaacgacgagtggacccaggacagagccaagcccgtgacccagatcgtgtctgccgaagcctggggcagagccgattgcggctttaccagcgagagctaccagcagggcgtgctgagcgccaccaacctgagcgtgatcggcttcagaatcctgctgctgaaagtggccggctttaacctgctgatgaccctgcggctgtggtccagc

SEQ ID NO: 5228 - DNA, 1881 bp, synthetic construct
  source 1..1881: mol_type = other DNA
atggccttaccagtgaccgccttgctcctgccgctggccttgctgctccacgccgccaggccggaccagagcgtcgtgacacagcctcctagcgtgtcagtggcccctggcaagaccgccagaatcacctgtggccggaacaacatcggcagcaagagcgtgcactggtatcagcagaagcccggccaggctcctgtgctggtggtgtacgacgacagcgacagacccagcggcatccccgagagattcagcggcagcaactccggcaataccgccaccctgaccatcagcagagtggaagccggcgacgaggccgactactactgccaagtgtgggacagcagcagcgatcacgtggtgtttggcggaggcaccaagctgacagtgctgggtctcgagatccagaaccctgatcctgccgtgtaccagctgcgggatagcaagagcagcgacaagagcgtgtgtctgttcaccgacttcgacagccagaccaacgtgtcccagagcaaggactccgacgtgtacatcaccgataagtgcgtgctggacatgcggagcatggacttcaagagcaactccgccgtggcctggtccaacaagtccgatttcgcctgcgccaacgccttcaacaacagcattatccccgaggacacattcttcccaagccccgagagcagctgcgacgtgaagctggtggaaaagagcttcgagacagacaccaacctgaacttccagatcctgtacgagatcctgctgggcaaggccaccctgtacgccgtgctggtgtctgccctggtgctgatggctatggtcaagcggaaggacagccggggacgcgccaagagaagcggatctggcgtgaagcagaccctgaatttcgacctgctgaagctggctggcgacgtggaatccaacccaggccctactagtatggactggatttggcgcatccttttccttgtcggcgctgctaccggcgcgcattccttcgaagtgcaactggtgcagtctggcggaggggtcatgcggcctggcggatctctgagactgtcttgtgccgccagcggcttcaccttcgacgactacggcatgagctgggtgcgccaggcccctggaaaaggcctggaatgggtgtccggcatcaactggaatggcggcagcaccggctacgccgattctgtgcggggcagattcaccatcagccgggacaacgccaagaacagcctgtacctgcagatgaactccctgcgggccgaggacaccgccctgtactattgcgccagagagcggggctacggctaccacgaccctcacgattattggggccagggcacccttgttaccgtgtcctctacgcgtgaggacctgaagaacgtgttcccacctgaggtggccgtgttcgagcctagcgaggccgagatcagccacacccagaaagccaccctcgtgtgcctggctaccggcttctaccccgaccatgtggaactgtcttggtgggtcaacggcaaagaggtgcacagcggcgtgtgtaccgacccccagccactgaaagaacagcccgccctgaacgacagccggtactgcctgagcagcagactgagagtgtccgccaccttctggcagaacccccggaaccacttcagatgccaggtgcagttctacggcctgagcgagaacgacgagtggacccaggacagagccaagcccgtgacccagatcgtgtctgccgaagcctggggcagagccgattgcggctttaccagcgagagctaccagcagggcgtgctgagcgccaccaacctgagcgtgatcggcttcagaatcctgctgctgaaagtggccggctttaacctgctgatgaccctgcggctgtggtccagc

SEQ ID NO: 5229 - DNA, 1920 bp, synthetic construct
  source 1..1920: mol_type = other DNA
atggccttaccagtgaccgccttgctcctgccgctggccttgctgctccacgccgccaggccggaacagaaactcatcagtgaagaagacctggaattccaggctgtcgtgacacagcctcctagcgcctctggcacaccaggccagagagtgaccatctcctgtagcggcagcagcagcaacatcggcagcaacaccgtgaactggtatcagcaggtgcccggcaccgctcccaagctgctgatctacagcaacaaccagcggcccagcggcgtgcccgatagattttctggcagcaagagcggcaccagcgccagcctggctatctctggactccagtccgaggacgaggccgactactattgcgccgcctgggacgatagcctgaacggctgggtgttcggcggaggcaccaagctgacagtgctgctcgagatccagaaccctgatcctgccgtgtaccagctgcgggatagcaagagcagcgacaagagcgtgtgtctgttcaccgacttcgacagccagaccaacgtgtcccagagcaaggactccgacgtgtacatcaccgataagtgcgtgctggacatgcggagcatggacttcaagagcaactccgccgtggcctggtccaacaagtccgatttcgcctgcgccaacgccttcaacaacagcattatccccgaggacacattcttcccaagccccgagagcagctgcgacgtgaagctggtggaaaagagcttcgagacagacaccaacctgaacttccagatcctgtacgagatcctgctgggcaaggccaccctgtacgccgtgctggtgtctgccctggtgctgatggctatggtcaagcggaaggacagccggggacgcgccaagagaagcggatctggcgtgaagcagaccctgaatttcgacctgctgaagctggctggcgacgtggaatccaacccaggccctactagtatggactggatttggcgcatccttttccttgtcggcgctgctaccggcgcgcattccttcgaacagatgcaactggtgcagagcggagccgaagtgaaagagcctggcgagagcctgcggatctcctgcaagggcagcggctacagcttcaccaatttctggatctcttgggtgcgccagatgcccggcaagggcctggaatggatgggcagagtggaccccggctactcctacagcacctacagccctagcttccagggccacgtgaccatcagcgccgacaagagcaccagcaccgcctacctccagtggaacagcctgaaggccagcgacaccgccatgtactactgcgccagagtgcagtacagcggctattacgattggttcgacccctggggccagggcacactcgtgacagtgtcaagcacgcgtgaggacctgaagaacgtgttcccacctgaggtggccgtgttcgagcctagcgaggccgagatcagccacacccagaaagccaccctcgtgtgcctggctaccggcttctaccccgaccatgtggaactgtcttggtgggtcaacggcaaagaggtgcacagcggcgtgtgtaccgacccccagccactgaaagaacagcccgccctgaacgacagccggtactgcctgagcagcagactgagagtgtccgccaccttctggcagaacccccggaaccacttcagatgccaggtgcagttctacggcctgagcgagaacgacgagtggacccaggacagagccaagcccgtgacccagatcgtgtctgccgaagcctggggcagagccgattgcggctttaccagcgagagctaccagcagggcgtgctgagcgccaccaacctgagcgtgatcggcttcagaatcctgctgctgaaagtggccggctttaacctgctgatgaccctgcggctgtggtccagc

SEQ ID NO: 5230 - DNA, 1902 bp, synthetic construct
  source 1..1902: mol_type = other DNA
atggccttaccagtgaccgccttgctcctgccgctggccttgctgctccacgccgccaggccggaacagaaactcatcagtgaagaagacctggaattcgacatccagatgacccagagccccagcacactgagcgccagcgtgggcgacagagtgaccatcacctgtcgggccagccagaacatcaacaagtggctggcctggtatcagcagaggcccggaaaagccccccagctgctgatctacaaggccagcagcctggaaagcggcgtgcccagcagattttctggcagcggctctggcaccgagtacaccctgaccatcagctccctccagcccgacgacttcgccacctactactgccagcagtacaacagctacgccaccttcggccagggcaccaaggtggaaatcaagagactcgagatccagaaccctgatcctgccgtgtaccagctgcgggatagcaagagcagcgacaagagcgtgtgtctgttcaccgacttcgacagccagaccaacgtgtcccagagcaaggactccgacgtgtacatcaccgataagtgcgtgctggacatgcggagcatggacttcaagagcaactccgccgtggcctggtccaacaagtccgatttcgcctgcgccaacgccttcaacaacagcattatccccgaggacacattcttcccaagccccgagagcagctgcgacgtgaagctggtggaaaagagcttcgagacagacaccaacctgaacttccagatcctgtacgagatcctgctgggcaaggccaccctgtacgccgtgctggtgtctgccctggtgctgatggctatggtcaagcggaaggacagccggggacgcgccaagagaagcggatctggcgtgaagcagaccctgaatttcgacctgctgaagctggctggcgacgtggaatccaacccaggccctactagtatggactggatttggcgcatccttttccttgtcggcgctgctaccggcgcgcattccttcgaacaggtgcagctggtgcagtctggggccgaagtgaagaagcctggcgagagcctgaagatcagctgcaagggctccggctacaacttctctaacaagtggatcggctgggtgcgccagctgcctggcagaggactggaatggatcgccatcatctaccccggctacagcgacatcacctacagccccagcttccagggccgcgtgacaatcagcgccgacaccagcatcaacaccgcctacctgcactggcacagcctgaaggccagcgacaccgccatgtactactgcgtgcggcatacagccctggctggcttcgattattggggcctgggcaccctcgtgaccgtgtctagtacgcgtgaggacctgaagaacgtgttcccacctgaggtggccgtgttcgagcctagcgaggccgagatcagccacacccagaaagccaccctcgtgtgcctggctaccggcttctaccccgaccatgtggaactgtcttggtgggtcaacggcaaagaggtgcacagcggcgtgtgtaccgacccccagccactgaaagaacagcccgccctgaacgacagccggtactgcctgagcagcagactgagagtgtccgccaccttctggcagaacccccggaaccacttcagatgccaggtgcagttctacggcctgagcgagaacgacgagtggacccaggacagagccaagcccgtgacccagatcgtgtctgccgaagcctggggcagagccgattgcggctttaccagcgagagctaccagcagggcgtgctgagcgccaccaacctgagcgtgatcggcttcagaatcctgctgctgaaagtggccggctttaacctgctgatgaccctgcggctgtggtccagc

SEQ ID NO: 5231 - DNA, 1878 bp, synthetic construct
  source 1..1878: mol_type = other DNA
atggccttaccagtgaccgccttgctcctgccgctggccttgctgctccacgccgccaggccggacatcgtgctgacacagagccctgcttctctggccgtgtctctgggacagagagccaccatcagctgtagagccagcgagagcgtggacaactacggcaacaccttcatgcactggtatcagcagaagcccggccagcctcctaagctgctgatctacagagccagcaacctggaaagcggcatccccgccagattttctggcagcggcagcagaaccgacttcaccctgaccatcaatcccgtggaagccgacgacgtggcaacctactactgccagcagagcaacgaggaccctcctacatttggagccggcaccaagctggaactgaaactcgagatccagaaccctgatcctgccgtgtaccagctgcgggatagcaagagcagcgacaagagcgtgtgtctgttcaccgacttcgacagccagaccaacgtgtcccagagcaaggactccgacgtgtacatcaccgataagtgcgtgctggacatgcggagcatggacttcaagagcaactccgccgtggcctggtccaacaagtccgatttcgcctgcgccaacgccttcaacaacagcattatccccgaggacacattcttcccaagccccgagagcagctgcgacgtgaagctggtggaaaagagcttcgagacagacaccaacctgaacttccagatcctgtacgagatcctgctgggcaaggccaccctgtacgccgtgctggtgtctgccctggtgctgatggctatggtcaagcggaaggacagccggggacgcgccaagagaagcggatctggcgtgaagcagaccctgaatttcgacctgctgaagctggctggcgacgtggaatccaacccaggccctactagtatggactggatttggcgcatccttttccttgtcggcgctgctaccggcgcgcattccttcgaacagattcagctggtgcagtctggccccgagctgaagaaacctggcgagacagtgaagatcagctgcaaggccagcggctacatcttcaccaattacggcatgaactgggtcaagcaggcccctggcaagagcttcaagtggatgggctggatcaacacctacaccggcgagagcacatacagcgccgacttcaagggcagattcgccttcagcctggaaaccagcgccagcacagcctacctgcacatcaacgacctgaagaacgaggacaccgccacctacttttgcgccagaagcggcggctacgaccctatggattattggggccagggcaccagcgtgaccgtttcttctacgcgtgaggacctgaagaacgtgttcccacctgaggtggccgtgttcgagcctagcgaggccgagatcagccacacccagaaagccaccctcgtgtgcctggctaccggcttctaccccgaccatgtggaactgtcttggtgggtcaacggcaaagaggtgcacagcggcgtgtgtaccgacccccagccactgaaagaacagcccgccctgaacgacagccggtactgcctgagcagcagactgagagtgtccgccaccttctggcagaacccccggaaccacttcagatgccaggtgcagttctacggcctgagcgagaacgacgagtggacccaggacagagccaagcccgtgacccagatcgtgtctgccgaagcctggggcagagccgattgcggctttaccagcgagagctaccagcagggcgtgctgagcgccaccaacctgagcgtgatcggcttcagaatcctgctgctgaaagtggccggctttaacctgctgatgaccctgcggctgtggtccagc

SEQ ID NO: 5232 - DNA, 1875 bp, synthetic construct
  source 1..1875: mol_type = other DNA
atggccttaccagtgaccgccttgctcctgccgctggccttgctgctccacgccgccaggccggacgagatcgtgctgacacagagccctggcaccctgagcctgtctccaggcgaaagagccacactgagctgtcgggccagccagagcgtgtccaatacctacctggcctggtatcaccagaggcccggacaggctccccggctgctgatctatggcgcttctagcagagccaccggcatccccgatagattcagcggctctggcagcggcaccgacttcgccctgacaatcagctccctggaacccgaggacttcgccgtgtactactgccagcagtacagcaactcctggaccttcggccagggcaccaaggtggaaatcaagagactcgagatccagaaccctgatcctgccgtgtaccagctgcgggatagcaagagcagcgacaagagcgtgtgtctgttcaccgacttcgacagccagaccaacgtgtcccagagcaaggactccgacgtgtacatcaccgataagtgcgtgctggacatgcggagcatggacttcaagagcaactccgccgtggcctggtccaacaagtccgatttcgcctgcgccaacgccttcaacaacagcattatccccgaggacacattcttcccaagccccgagagcagctgcgacgtgaagctggtggaaaagagcttcgagacagacaccaacctgaacttccagatcctgtacgagatcctgctgggcaaggccaccctgtacgccgtgctggtgtctgccctggtgctgatggctatggtcaagcggaaggacagccggggacgcgccaagagaagcggatctggcgtgaagcagaccctgaatttcgacctgctgaagctggctggcgacgtggaatccaacccaggccctactagtatggactggatttggcgcatccttttccttgtcggcgctgctaccggcgcgcattccttcgaacaggtgcaactggtggaatctggcgggggagtggtgcagcctggcagaagcctgagactgtcttgtgccgccagcggcttcaccttcagcagctacgacatgcactgggtgcgccaggcccctggcaaaggactggaatgggtggccgtgatctcctacgacggcaccaacgagtattacgccgacagcgtgaagggccggttcaccatctccagagacaccagcaagaacaccctgtacctccagatgaacagcctgcgggccgaggacacagccgtgtattattgcgccagagagcggtacttcgactggtccttcgactactggggccagggaaccctggtgtccgtgtctagtacgcgtgaggacctgaagaacgtgttcccacctgaggtggccgtgttcgagcctagcgaggccgagatcagccacacccagaaagccaccctcgtgtgcctggctaccggcttctaccccgaccatgtggaactgtcttggtgggtcaacggcaaagaggtgcacagcggcgtgtgtaccgacccccagccactgaaagaacagcccgccctgaacgacagccggtactgcctgagcagcagactgagagtgtccgccaccttctggcagaacccccggaaccacttcagatgccaggtgcagttctacggcctgagcgagaacgacgagtggacccaggacagagccaagcccgtgacccagatcgtgtctgccgaagcctggggcagagccgattgcggctttaccagcgagagctaccagcagggcgtgctgagcgccaccaacctgagcgtgatcggcttcagaatcctgctgctgaaagtggccggctttaacctgctgatgaccctgcggctgtggtccagc

SEQ ID NO: 5233 - DNA, 1872 bp, synthetic construct
  source 1..1872: mol_type = other DNA
atggccttaccagtgaccgccttgctcctgccgctggccttgctgctccacgccgccaggccggacgagctgacacaggaccctgctgtgtctgttgccctgggccagacagtgcggattacctgtcaaggcgacagcctgagaagcaactacgccaactggtatcagcagaagcccggacaggctcccgtgctggttatctacggccagaacaacagacccagcggcatccccgatagattcagcggctctagctctggcaataccgccagcctgacaatcactggcgctcaggctgccgatgaggccgactactactgcgatagcagagtgtccaccggcaatcacgtggtgtttggcggcggaacaaagctgacagtgctcggacaactcgagatccagaaccctgatcctgccgtgtaccagctgcgggatagcaagagcagcgacaagagcgtgtgtctgttcaccgacttcgacagccagaccaacgtgtcccagagcaaggactccgacgtgtacatcaccgataagtgcgtgctggacatgcggagcatggacttcaagagcaactccgccgtggcctggtccaacaagtccgatttcgcctgcgccaacgccttcaacaacagcattatccccgaggacacattcttcccaagccccgagagcagctgcgacgtgaagctggtggaaaagagcttcgagacagacaccaacctgaacttccagatcctgtacgagatcctgctgggcaaggccaccctgtacgccgtgctggtgtctgccctggtgctgatggctatggtcaagcggaaggacagccggggacgcgccaagagaagcggatctggcgtgaagcagaccctgaatttcgacctgctgaagctggctggcgacgtggaatccaacccaggccctactagtatggactggatttggcgcatccttttccttgtcggcgctgctaccggcgcgcattccttcgaagaagttcagctggtgcagagcggagccgaagtgaagaaacctggggcctctgtgaaggtgtcctgcaaggcttccggctacacctttaccagctacgccatgcactgggtccgacaggcacctggacaacggcttgaatggatgggctggatcaacgccggcaacggcaacaccaagtacagccagaaattccagggccgcgtgaccatcaccagagatacaagcgccagcaccgcctacatggaactgtctagcctgagatccgaggacaccgccgtgtactactgtgccagagacatcagctacggcagcttcgactattggggccagggcacactggtcaccgttagctctacgcgtgaggacctgaagaacgtgttcccacctgaggtggccgtgttcgagcctagcgaggccgagatcagccacacccagaaagccaccctcgtgtgcctggctaccggcttctaccccgaccatgtggaactgtcttggtgggtcaacggcaaagaggtgcacagcggcgtgtgtaccgacccccagccactgaaagaacagcccgccctgaacgacagccggtactgcctgagcagcagactgagagtgtccgccaccttctggcagaacccccggaaccacttcagatgccaggtgcagttctacggcctgagcgagaacgacgagtggacccaggacagagccaagcccgtgacccagatcgtgtctgccgaagcctggggcagagccgattgcggctttaccagcgagagctaccagcagggcgtgctgagcgccaccaacctgagcgtgatcggcttcagaatcctgctgctgaaagtggccggctttaacctgctgatgaccctgcggctgtggtccagc

SEQ ID NO: 5234 - DNA, 1878 bp, synthetic construct
  source 1..1878: mol_type = other DNA
atggccttaccagtgaccgccttgctcctgccgctggccttgctgctccacgccgccaggccggacgacatcgtgctgacacagacaccagccacactgagcgtgacacctggcgattctgtgtccctgagctgtagagccagccagagcatcagcaacaacctgcactggtatcagcagaagtcccacgagagccccagactgctgattaagaacgccagccagtctatcagcggcatccccagcaagtttagcggctctggcagcggcaccgacttcaccctgagaatcaacagcgtggaaaccgaggacttcgggatgtacttctgccagcagagcaatagctggccctacacatttggctccggcaccaagctggaaatcaaactcgagatccagaaccctgatcctgccgtgtaccagctgcgggatagcaagagcagcgacaagagcgtgtgtctgttcaccgacttcgacagccagaccaacgtgtcccagagcaaggactccgacgtgtacatcaccgataagtgcgtgctggacatgcggagcatggacttcaagagcaactccgccgtggcctggtccaacaagtccgatttcgcctgcgccaacgccttcaacaacagcattatccccgaggacacattcttcccaagccccgagagcagctgcgacgtgaagctggtggaaaagagcttcgagacagacaccaacctgaacttccagatcctgtacgagatcctgctgggcaaggccaccctgtacgccgtgctggtgtctgccctggtgctgatggctatggtcaagcggaaggacagccggggacgcgccaagagaagcggatctggcgtgaagcagaccctgaatttcgacctgctgaagctggctggcgacgtggaatccaacccaggccctactagtatggactggatttggcgcatccttttccttgtcggcgctgctaccggcgcgcattccttcgaacaagtgaagctgcaacagagcggacccgagctggttaagccaggcgcttccgtgaagattagctgcaaggccagcggctacagcttcaccggctactacatgcactgggtcaagcagagccacggcaacatcctggactggatcggctacatctacccctacaacggcgtgtccagctacaaccagaagttcaagggcaaagccactctgaccgtggacaagagcagcagcaccgcctacatggaactgagaagcctgaccagcgaggacagcgccgtgtactattgtgccagagagcggggcctgtaccagctcagagcaatggattattggggccagggcaccagcgtgaccgtttcttctacgcgtgaggacctgaagaacgtgttcccacctgaggtggccgtgttcgagcctagcgaggccgagatcagccacacccagaaagccaccctcgtgtgcctggctaccggcttctaccccgaccatgtggaactgtcttggtgggtcaacggcaaagaggtgcacagcggcgtgtgtaccgacccccagccactgaaagaacagcccgccctgaacgacagccggtactgcctgagcagcagactgagagtgtccgccaccttctggcagaacccccggaaccacttcagatgccaggtgcagttctacggcctgagcgagaacgacgagtggacccaggacagagccaagcccgtgacccagatcgtgtctgccgaagcctggggcagagccgattgcggctttaccagcgagagctaccagcagggcgtgctgagcgccaccaacctgagcgtgatcggcttcagaatcctgctgctgaaagtggccggctttaacctgctgatgaccctgcggctgtggtccagc

SEQ ID NO: 5235 - DNA, 1851 bp, synthetic construct
  source 1..1851: mol_type = other DNA
atggccttaccagtgaccgccttgctcctgccgctggccttgctgctccacgccgccaggccggacgacatcgtgatgacacagacccctgccatcatgagcgcctctccaggccagaaagtgaccatcacatgtagcgccagcagcagcgtgaactacatgcactggtatcagcagaagctgggcagcagccccaagctgtggatctacgataccagcaaactggcccctggcgtgccagccagattttctggttctggcagcggcaccagctacagcctgacaatcagcagcatggaagccgaggatgccgccagctacttctgccatcagtggtctagctacccctacacctttggctccggcaccaagctggaaatcaaactcgagatccagaaccctgatcctgccgtgtaccagctgcgggatagcaagagcagcgacaagagcgtgtgtctgttcaccgacttcgacagccagaccaacgtgtcccagagcaaggactccgacgtgtacatcaccgataagtgcgtgctggacatgcggagcatggacttcaagagcaactccgccgtggcctggtccaacaagtccgatttcgcctgcgccaacgccttcaacaacagcattatccccgaggacacattcttcccaagccccgagagcagctgcgacgtgaagctggtggaaaagagcttcgagacagacaccaacctgaacttccagatcctgtacgagatcctgctgggcaaggccaccctgtacgccgtgctggtgtctgccctggtgctgatggctatggtcaagcggaaggacagccggggacgcgccaagagaagcggatctggcgtgaagcagaccctgaatttcgacctgctgaagctggctggcgacgtggaatccaacccaggccctactagtatggactggatttggcgcatccttttccttgtcggcgctgctaccggcgcgcattccttcgaagaagttcagctccaagagtctggccccgacctggtcaagcctagccaaagcctgagcctgacctgtaccgtgaccggctacagcatcacaagcggctatggatggcactggatcagacagttccccggcaacaaactggaatggatgggctacatccactacagcggcagcaccacctacaatcccagcctgaagtcccggatcagcatcagcagagacaccagcaagaaccagttcttcctgcaactgaacagcgtgaccaccgaggacaccgccacctactattgtgctcggagcctgagatattggggccagggcacaaccctgaccgtgtcatctacgcgtgaggacctgaagaacgtgttcccacctgaggtggccgtgttcgagcctagcgaggccgagatcagccacacccagaaagccaccctcgtgtgcctggctaccggcttctaccccgaccatgtggaactgtcttggtgggtcaacggcaaagaggtgcacagcggcgtgtgtaccgacccccagccactgaaagaacagcccgccctgaacgacagccggtactgcctgagcagcagactgagagtgtccgccaccttctggcagaacccccggaaccacttcagatgccaggtgcagttctacggcctgagcgagaacgacgagtggacccaggacagagccaagcccgtgacccagatcgtgtctgccgaagcctggggcagagccgattgcggctttaccagcgagagctaccagcagggcgtgctgagcgccaccaacctgagcgtgatcggcttcagaatcctgctgctgaaagtggccggctttaacctgctgatgaccctgcggctgtggtccagc

SEQ ID NO: 5236 - DNA, 1860 bp, synthetic construct
  source 1..1860: mol_type = other DNA
atggccttaccagtgaccgccttgctcctgccgctggccttgctgctccacgccgccaggccggacgacatccagatgacacagagccctagcagcctgtctgccagcgtgggagacagagtgaccatcacctgtagcgccaccagcagcatcagctacatgcactggtatcagcagaagcccggcaaggcccctaaaggctggatctacgataccagcaaactggcccacggcgtgcccagcagattttctggttctggcagcggcaccgacttcaccctgacaatatctagcctccagcctgaggacttcgccacctactactgccaccagagaagaagctaccccttcaccttcggccagggcaccaaggtggaaatcaaactcgagatccagaaccctgatcctgccgtgtaccagctgcgggatagcaagagcagcgacaagagcgtgtgtctgttcaccgacttcgacagccagaccaacgtgtcccagagcaaggactccgacgtgtacatcaccgataagtgcgtgctggacatgcggagcatggacttcaagagcaactccgccgtggcctggtccaacaagtccgatttcgcctgcgccaacgccttcaacaacagcattatccccgaggacacattcttcccaagccccgagagcagctgcgacgtgaagctggtggaaaagagcttcgagacagacaccaacctgaacttccagatcctgtacgagatcctgctgggcaaggccaccctgtacgccgtgctggtgtctgccctggtgctgatggctatggtcaagcggaaggacagccggggacgcgccaagagaagcggatctggcgtgaagcagaccctgaatttcgacctgctgaagctggctggcgacgtggaatccaacccaggccctactagtatggactggatttggcgcatccttttccttgtcggcgctgctaccggcgcgcattccttcgaagaagtgcaactggttcagagcggagccgaagtgaagaaacctggggcctctgtgaaggtgtcctgcaaggcttccggctacacctttaccaatttctggattcactgggtccgacaggctccaggccaaggactggaatggatcggagagatcgaccccagcgacagctacaccaactacaaccagaaattcaaaggccgggtcaccatcaccagagacaccagcacaagcaccgcctacctggaactgagcagcctgagaagcgaggacaccgccgtgtactactgcgccagggaaatcaccaccgtggattattggggccagggaaccctggtcaccgtgtcatctacgcgtgaggacctgaagaacgtgttcccacctgaggtggccgtgttcgagcctagcgaggccgagatcagccacacccagaaagccaccctcgtgtgcctggctaccggcttctaccccgaccatgtggaactgtcttggtgggtcaacggcaaagaggtgcacagcggcgtgtgtaccgacccccagccactgaaagaacagcccgccctgaacgacagccggtactgcctgagcagcagactgagagtgtccgccaccttctggcagaacccccggaaccacttcagatgccaggtgcagttctacggcctgagcgagaacgacgagtggacccaggacagagccaagcccgtgacccagatcgtgtctgccgaagcctggggcagagccgattgcggctttaccagcgagagctaccagcagggcgtgctgagcgccaccaacctgagcgtgatcggcttcagaatcctgctgctgaaagtggccggctttaacctgctgatgaccctgcggctgtggtccagc

SEQ ID NO: 5237 - DNA, 1881 bp, synthetic construct
  source 1..1881: mol_type = other DNA
atggccttaccagtgaccgccttgctcctgccgctggccttgctgctccacgccgccaggccggacgacatccagatgacacagagccctagcagcctgtctgccagcgtgggagacagagtgaccatcacatgcaaggccagccagggcttcaacaaatacgtggcctggtatcagcagaagcccggcaaggctcctaagctgctgatctactacaccagcacactccagcctggcgtgcccagcagattttctggctctggcagcggcagagactacaccctgacaatatccagcctccagccagaggacttcgccacctactactgtctccagtacggcaacctgctgtacgcctttggacagggcaccaaggtggaaatcaagagactcgagatccagaaccctgatcctgccgtgtaccagctgcgggatagcaagagcagcgacaagagcgtgtgtctgttcaccgacttcgacagccagaccaacgtgtcccagagcaaggactccgacgtgtacatcaccgataagtgcgtgctggacatgcggagcatggacttcaagagcaactccgccgtggcctggtccaacaagtccgatttcgcctgcgccaacgccttcaacaacagcattatccccgaggacacattcttcccaagccccgagagcagctgcgacgtgaagctggtggaaaagagcttcgagacagacaccaacctgaacttccagatcctgtacgagatcctgctgggcaaggccaccctgtacgccgtgctggtgtctgccctggtgctgatggctatggtcaagcggaaggacagccggggacgcgccaagagaagcggatctggcgtgaagcagaccctgaatttcgacctgctgaagctggctggcgacgtggaatccaacccaggccctactagtatggactggatttggcgcatccttttccttgtcggcgctgctaccggcgcgcattccttcgaagaagttcagcttgtgcagagcggagccgaagtgaagaaacctggggcctctgtgaaggtgtcctgcaaagccagcggctacacctttaccagctactggatcggctgggtccgacaggctcctggacaaggactggaatggatcggcgacatctatcccggcggaggctacaccaactacaacgagaagttcaagggccgcgtgacaatcaccagagacacctctacaagcaccgcctacctggaactgagcagcctgagaagcgaggacaccgccgtgtactactgcgccagactggatggcagcagctacagaggcgctatggattcttggggccagggcacactggtcaccgtttcttctacgcgtgaggacctgaagaacgtgttcccacctgaggtggccgtgttcgagcctagcgaggccgagatcagccacacccagaaagccaccctcgtgtgcctggctaccggcttctaccccgaccatgtggaactgtcttggtgggtcaacggcaaagaggtgcacagcggcgtgtgtaccgacccccagccactgaaagaacagcccgccctgaacgacagccggtactgcctgagcagcagactgagagtgtccgccaccttctggcagaacccccggaaccacttcagatgccaggtgcagttctacggcctgagcgagaacgacgagtggacccaggacagagccaagcccgtgacccagatcgtgtctgccgaagcctggggcagagccgattgcggctttaccagcgagagctaccagcagggcgtgctgagcgccaccaacctgagcgtgatcggcttcagaatcctgctgctgaaagtggccggctttaacctgctgatgaccctgcggctgtggtccagc

SEQ ID NO: 5238 - DNA, 1869 bp, synthetic construct
  source 1..1869: mol_type = other DNA
atggccttaccagtgaccgccttgctcctgccgctggccttgctgctccacgccgccaggccggacgacatccagatgacacagagccctagcagcctgtctgccagcgtgggagacagagtgaccatcacctgtagagccagccaggacatccggtactacctgaactggtatcagcagaagcccggcaaggcccctaagctgctgatctatgtggcctccagcctccagagcggagtgccttctagattttctggcagcggctccggcaccgagtttaccctgacagtgtctagcttgcagcccgaggacttcgccacctactactgcctgcaagtgtacagcacccctcggacctttggacagggcaccaaggtggaaatcaaactcgagatccagaaccctgatcctgccgtgtaccagctgcgggatagcaagagcagcgacaagagcgtgtgtctgttcaccgacttcgacagccagaccaacgtgtcccagagcaaggactccgacgtgtacatcaccgataagtgcgtgctggacatgcggagcatggacttcaagagcaactccgccgtggcctggtccaacaagtccgatttcgcctgcgccaacgccttcaacaacagcattatccccgaggacacattcttcccaagccccgagagcagctgcgacgtgaagctggtggaaaagagcttcgagacagacaccaacctgaacttccagatcctgtacgagatcctgctgggcaaggccaccctgtacgccgtgctggtgtctgccctggtgctgatggctatggtcaagcggaaggacagccggggacgcgccaagagaagcggatctggcgtgaagcagaccctgaatttcgacctgctgaagctggctggcgacgtggaatccaacccaggccctactagtatggactggatttggcgcatccttttccttgtcggcgctgctaccggcgcgcattccttcgaagaagtgcagcttgttgaatctggcggcggactggctaagcctggcggatctctgagactgtcttgtgccgccagcggcttccggttcaccttcaacaactactacatggactgggtccgacaggcccctggacaaggacttgaatgggtgtccagaatcagcagcagcggcgaccctacttggtacgccgattctgtgaagggcagattcaccatcagcagagagaacgccaagaacaccctgttcctccagatgaactccctgagagccgaggacaccgccgtgtactattgtgcctctctgaccaccggcagcgattcttggggacagggcgtgctggttaccgtgtcatctacgcgtgaggacctgaagaacgtgttcccacctgaggtggccgtgttcgagcctagcgaggccgagatcagccacacccagaaagccaccctcgtgtgcctggctaccggcttctaccccgaccatgtggaactgtcttggtgggtcaacggcaaagaggtgcacagcggcgtgtgtaccgacccccagccactgaaagaacagcccgccctgaacgacagccggtactgcctgagcagcagactgagagtgtccgccaccttctggcagaacccccggaaccacttcagatgccaggtgcagttctacggcctgagcgagaacgacgagtggacccaggacagagccaagcccgtgacccagatcgtgtctgccgaagcctggggcagagccgattgcggctttaccagcgagagctaccagcagggcgtgctgagcgccaccaacctgagcgtgatcggcttcagaatcctgctgctgaaagtggccggctttaacctgctgatgaccctgcggctgtggtccagc

SEQ ID NO: 5239 - DNA, 1869 bp, synthetic construct
  source 1..1869: mol_type = other DNA
atggccttaccagtgaccgccttgctcctgccgctggccttgctgctccacgccgccaggccggagatcgtgatgacacagagccccgccacactgagtgtgtctccaggcgaaagagccacactgtcctgtagagccagccagagcgtgtccagaaacctggcctggtatcagcagaagcctggacaggctccccggctgttgatctacggcgcttctacaagagccaccggcattcccgccagattttctggctctggcagcggcaccgagttcaccctgacaatcggaagcctccagagcgaggacttcgccgtgtactactgccagcagtacaagacctggcctcggacctttggacagggcaccaacgtggaaatcaaactcgagatccagaaccctgatcctgccgtgtaccagctgcgggatagcaagagcagcgacaagagcgtgtgtctgttcaccgacttcgacagccagaccaacgtgtcccagagcaaggactccgacgtgtacatcaccgataagtgcgtgctggacatgcggagcatggacttcaagagcaactccgccgtggcctggtccaacaagtccgatttcgcctgcgccaacgccttcaacaacagcattatccccgaggacacattcttcccaagccccgagagcagctgcgacgtgaagctggtggaaaagagcttcgagacagacaccaacctgaacttccagatcctgtacgagatcctgctgggcaaggccaccctgtacgccgtgctggtgtctgccctggtgctgatggctatggtcaagcggaaggacagccggggacgcgccaagagaagcggatctggcgtgaagcagaccctgaatttcgacctgctgaagctggctggcgacgtggaatccaacccaggccctactagtatggactggatttggcgcatccttttccttgtcggcgctgctaccggcgcgcattccttcgaacaagttcagctgcaacaatggggagccggcctgctgaagcctagcgaaacactgtctctgacctgcgccgtgttcggcggctctttcagcggctactactggtcctggatcagacagcctcctggcaaaggactggaatggatcggcgagatcaaccaccggggcaacaccaacgacaaccccagcctgaaaagcagagtgaccatcagcgtggacaccagcaagaaccagttcgccctgaagctgagcagcgtgacagccgctgataccgccgtgtattattgcgccagagagcggggctacacctacggcaatttcgatcactggggccagggcaccctggtcacagtttcttctacgcgtgaggacctgaagaacgtgttcccacctgaggtggccgtgttcgagcctagcgaggccgagatcagccacacccagaaagccaccctcgtgtgcctggctaccggcttctaccccgaccatgtggaactgtcttggtgggtcaacggcaaagaggtgcacagcggcgtgtgtaccgacccccagccactgaaagaacagcccgccctgaacgacagccggtactgcctgagcagcagactgagagtgtccgccaccttctggcagaacccccggaaccacttcagatgccaggtgcagttctacggcctgagcgagaacgacgagtggacccaggacagagccaagcccgtgacccagatcgtgtctgccgaagcctggggcagagccgattgcggctttaccagcgagagctaccagcagggcgtgctgagcgccaccaacctgagcgtgatcggcttcagaatcctgctgctgaaagtggccggctttaacctgctgatgaccctgcggctgtggtccagc

SEQ ID NO: 5240 - DNA, 1872 bp, synthetic construct
  source 1..1872: mol_type = other DNA
atggccttaccagtgaccgccttgctcctgccgctggccttgctgctccacgccgccaggccggagatcgtgatgacccctagcagcgccacactgagtgtgtctccaggcgaaagagccacactgtcctgtagagccagccagagcgtgtccagaaacctggcctggtatcagcagaagcctggacaggctccccggctgttgatctacggcgcttctacaagagccaccggcattcccgccagattttctggctctggcagcggcaccgagttcaccctgacaatctctagcctccagagcgaggacttcgccgtgtactactgccaccagtacagcaactggatgtgcagcttcggccagggcaccaagctggaaatcaaactcgagatccagaaccctgatcctgccgtgtaccagctgcgggatagcaagagcagcgacaagagcgtgtgtctgttcaccgacttcgacagccagaccaacgtgtcccagagcaaggactccgacgtgtacatcaccgataagtgcgtgctggacatgcggagcatggacttcaagagcaactccgccgtggcctggtccaacaagtccgatttcgcctgcgccaacgccttcaacaacagcattatccccgaggacacattcttcccaagccccgagagcagctgcgacgtgaagctggtggaaaagagcttcgagacagacaccaacctgaacttccagatcctgtacgagatcctgctgggcaaggccaccctgtacgccgtgctggtgtctgccctggtgctgatggctatggtcaagcggaaggacagccggggacgcgccaagagaagcggatctggcgtgaagcagaccctgaatttcgacctgctgaagctggctggcgacgtggaatccaacccaggccctactagtatggactggatttggcgcatccttttccttgtcggcgctgctaccggcgcgcattccttcgaagaagttcagctccttgagtcaggtggcggcctggttcaacctggcggatctctgagactgagctgtgccgccagcggcttcacctttagcagatacgccatgaactgggtccgacaggcccctggcaaaggactggaatgggtgtccggcatctctggaagcggcggcagaacctactacgccgattctgtgaagggcagattcaccatcagccgggacaacagcaagaacaccctgtacctccagatgaacagcctgagagccgaggacacagccgtgtattattgcgccaaggaccgggacttttggagcggcccttttgactattggggccagggaaccctggtcaccgttagctctacgcgtgaggacctgaagaacgtgttcccacctgaggtggccgtgttcgagcctagcgaggccgagatcagccacacccagaaagccaccctcgtgtgcctggctaccggcttctaccccgaccatgtggaactgtcttggtgggtcaacggcaaagaggtgcacagcggcgtgtgtaccgacccccagccactgaaagaacagcccgccctgaacgacagccggtactgcctgagcagcagactgagagtgtccgccaccttctggcagaacccccggaaccacttcagatgccaggtgcagttctacggcctgagcgagaacgacgagtggacccaggacagagccaagcccgtgacccagatcgtgtctgccgaagcctggggcagagccgattgcggctttaccagcgagagctaccagcagggcgtgctgagcgccaccaacctgagcgtgatcggcttcagaatcctgctgctgaaagtggccggctttaacctgctgatgaccctgcggctgtggtccagc

SEQ ID NO: 5241 - DNA, 1887 bp, synthetic construct
  source 1..1887: mol_type = other DNA
atggccttaccagtgaccgccttgctcctgccgctggccttgctgctccacgccgccaggccggacatccagatgacccagagccccagcagcctgtctgccagcgtgggcgacagagtgaccatcacatgcaaggccagcaagaacatcagaagctacctggcctggtatcagcagaagcccggcaaggcccccaagctgctgatctacagcggcagcacactgcacagcggcgtgcccagcagattttccggctctggcagcggcaccgacttcaccctgaccatctctagcctccagcccgaggacttcgccacctactactgccagcagcaccacgagtaccccctgacattcggccagggcaccaaggtggaaatcaagagactcgagatccagaaccctgatcctgccgtgtaccagctgcgggatagcaagagcagcgacaagagcgtgtgtctgttcaccgacttcgacagccagaccaacgtgtcccagagcaaggactccgacgtgtacatcaccgataagtgcgtgctggacatgcggagcatggacttcaagagcaactccgccgtggcctggtccaacaagtccgatttcgcctgcgccaacgccttcaacaacagcattatccccgaggacacattcttcccaagccccgagagcagctgcgacgtgaagctggtggaaaagagcttcgagacagacaccaacctgaacttccagatcctgtacgagatcctgctgggcaaggccaccctgtacgccgtgctggtgtctgccctggtgctgatggctatggtcaagcggaaggacagccggggacgcgccaagagaagcggatctggcgtgaagcagaccctgaatttcgacctgctgaagctggctggcgacgtggaatccaacccaggccctactagtatggactggatttggcgcatccttttccttgtcggcgctgctaccggcgcgcattccttcgaacaggtgcaactccaggaatctggccccggactcgtgaagcccagcgagacactgagcctgacctgtaccgtgtccggctacaccatcaccagcggctacgactggtcctggatcagacagcctcctggcaagggcctggaatggatcggctacatcaactacggcggctccaccaactacaagcccagcctgggaagccgcgtgacaatcagcgtggacacctccaagaaccagttcagcctgaagctgagcagcgtgacagccgccgataccgccgtgtactactgcgcccggtacaacgagtacaagagctacatctacgattggtacttcgacttctggggccagggaaccctcgtgaccgtgtctagtacgcgtgaggacctgaagaacgtgttcccacctgaggtggccgtgttcgagcctagcgaggccgagatcagccacacccagaaagccaccctcgtgtgcctggctaccggcttctaccccgaccatgtggaactgtcttggtgggtcaacggcaaagaggtgcacagcggcgtgtgtaccgacccccagccactgaaagaacagcccgccctgaacgacagccggtactgcctgagcagcagactgagagtgtccgccaccttctggcagaacccccggaaccacttcagatgccaggtgcagttctacggcctgagcgagaacgacgagtggacccaggacagagccaagcccgtgacccagatcgtgtctgccgaagcctggggcagagccgattgcggctttaccagcgagagctaccagcagggcgtgctgagcgccaccaacctgagcgtgatcggcttcagaatcctgctgctgaaagtggccggctttaacctgctgatgaccctgcggctgtggtccagc

SEQ ID NO: 5242 - DNA, 1893 bp, synthetic construct
  source 1..1893: mol_type = other DNA
atggccttaccagtgaccgccttgctcctgccgctggccttgctgctccacgccgccaggccgcagtctgtggtcacacagcctccatccgtgtctgctgcccctggacagaaagtgaccatctcctgtagcggcagcagcagcaacatcggcaacaactacgtgtcctggtatcagcagctccccggcacagctcccaaactgctgatctacgacaacaacaagcggcccagcggcatccccgatagattttctggcagcaagagcggcaccagcgccacactgggaattaccggacttcagacaggcgacgaggccgactactactgtggcacatgggatggcagcctgtacaccatgcttttcggcggaggcaccaagctgacagtgcttctcgagatccagaaccctgatcctgccgtgtaccagctgcgggatagcaagagcagcgacaagagcgtgtgtctgttcaccgacttcgacagccagaccaacgtgtcccagagcaaggactccgacgtgtacatcaccgataagtgcgtgctggacatgcggagcatggacttcaagagcaactccgccgtggcctggtccaacaagtccgatttcgcctgcgccaacgccttcaacaacagcattatccccgaggacacattcttcccaagccccgagagcagctgcgacgtgaagctggtggaaaagagcttcgagacagacaccaacctgaacttccagatcctgtacgagatcctgctgggcaaggccaccctgtacgccgtgctggtgtctgccctggtgctgatggctatggtcaagcggaaggacagccggggacgcgccaagagaagcggatctggcgtgaagcagaccctgaatttcgacctgctgaagctggctggcgacgtggaatccaacccaggccctactagtatggactggatttggcgcatccttttccttgtcggcgctgctaccggcgcgcattccttcgaagaagtgcaactggtggaatctggcggcggactggttaagcctggcggatctctgagactgtcttgtgccgccagcggcttcaccttcagcaatgcctggatgagctgggttcgacaggcccctggaaaaggactggaatgggtcggattcatccggtccaaagcctacggcggcaccacagaatatgccgcctctgtgaagggcagattcaccatcagccgggacgacagcaagtctatcgcctacctccagatgaacaacctgaaaaccgaggacaccgccgtgtactactgcgccagagatggcctgtacagcagctcttggtacgacagcgattactggggccagggcacactggtcacagtgtcatctacgcgtgaggacctgaagaacgtgttcccacctgaggtggccgtgttcgagcctagcgaggccgagatcagccacacccagaaagccaccctcgtgtgcctggctaccggcttctaccccgaccatgtggaactgtcttggtgggtcaacggcaaagaggtgcacagcggcgtgtgtaccgacccccagccactgaaagaacagcccgccctgaacgacagccggtactgcctgagcagcagactgagagtgtccgccaccttctggcagaacccccggaaccacttcagatgccaggtgcagttctacggcctgagcgagaacgacgagtggacccaggacagagccaagcccgtgacccagatcgtgtctgccgaagcctggggcagagccgattgcggctttaccagcgagagctaccagcagggcgtgctgagcgccaccaacctgagcgtgatcggcttcagaatcctgctgctgaaagtggccggctttaacctgctgatgaccctgcggctgtggtccagc

SEQ ID NO: 5243 - DNA, 1908 bp, synthetic construct
  source 1..1908: mol_type = other DNA
atggccttaccagtgaccgccttgctcctgccgctggccttgctgctccacgccgccaggccgcagtctgtgctgacacagcctcctagtgtgtctggcgctcctggacagagagtgaccatctcttgtaccggcagcagcagcaatatcggagccggctatgacgtgcactggtatcagcagctccctggcacagcccctaaactgctgatcttcggcaacagcaacagacccagcggcgtgcccgatagattcagcggctttaagagcggcacaagcgccagcctggctatcactggactgcaagccgaggacgaggccgactacttctgccagagctacgatagcagcctgagcggcagcggagtgtttggcacaggcaccaaagtgacagtgcttggcctcgagatccagaaccctgatcctgccgtgtaccagctgcgggatagcaagagcagcgacaagagcgtgtgtctgttcaccgacttcgacagccagaccaacgtgtcccagagcaaggactccgacgtgtacatcaccgataagtgcgtgctggacatgcggagcatggacttcaagagcaactccgccgtggcctggtccaacaagtccgatttcgcctgcgccaacgccttcaacaacagcattatccccgaggacacattcttcccaagccccgagagcagctgcgacgtgaagctggtggaaaagagcttcgagacagacaccaacctgaacttccagatcctgtacgagatcctgctgggcaaggccaccctgtacgccgtgctggtgtctgccctggtgctgatggctatggtcaagcggaaggacagccggggacgcgccaagagaagcggatctggcgtgaagcagaccctgaatttcgacctgctgaagctggctggcgacgtggaatccaacccaggccctactagtatggactggatttggcgcatccttttccttgtcggcgctgctaccggcgcgcattccttcgaacaaatgcaactggttcaaagcggcggtggcctggtgcaacctggaagaagtctgagactgagctgtgccgccagcggcttcaccttcgatgattacgccatgcactgggtccgacaggcccctggaaaaggactggaatgggtgtccggcatctcctggaatagcggctctatcggctacgccgacagcgtgaagggcagattcaccatcagccgggacaacgccaagaacagcctgtacctccagatgaactccctgagagccgaggatacagccctgtactactgcgccaaggacatccacagcggcagctactacggcctgctgtactacgctatggacgtgtggggccagggcacaaccgtgacagtttcttctacgcgtgaggacctgaagaacgtgttcccacctgaggtggccgtgttcgagcctagcgaggccgagatcagccacacccagaaagccaccctcgtgtgcctggctaccggcttctaccccgaccatgtggaactgtcttggtgggtcaacggcaaagaggtgcacagcggcgtgtgtaccgacccccagccactgaaagaacagcccgccctgaacgacagccggtactgcctgagcagcagactgagagtgtccgccaccttctggcagaacccccggaaccacttcagatgccaggtgcagttctacggcctgagcgagaacgacgagtggacccaggacagagccaagcccgtgacccagatcgtgtctgccgaagcctggggcagagccgattgcggctttaccagcgagagctaccagcagggcgtgctgagcgccaccaacctgagcgtgatcggcttcagaatcctgctgctgaaagtggccggctttaacctgctgatgaccctgcggctgtggtccagc

SEQ ID NO: 5244 - DNA, 1908 bp, synthetic construct
  source 1..1908: mol_type = other DNA
atggccttaccagtgaccgccttgctcctgccgctggccttgctgctccacgccgccaggccgctgcctgttctgacacagcctccatctgcctctggcacacctggacagagagtgaccatcagctgtagcggcagaagcagcaacatcggcagcaacagcgtgaactggtacagacagcttcctggcgctgcccctaagctgctgatctacagcaacaaccagcggcctcctggcgtgccagtcagattttctggcagcaagagcggcacaagcgccagcctggctatttctggactccagtctgaggacgaggccacctactactgtgccacctgggacgacaacctgaacgtgcactacgtgttcggcaccggcaccaaagtgacagtgcttggaagtagactcgagatccagaaccctgatcctgccgtgtaccagctgcgggatagcaagagcagcgacaagagcgtgtgtctgttcaccgacttcgacagccagaccaacgtgtcccagagcaaggactccgacgtgtacatcaccgataagtgcgtgctggacatgcggagcatggacttcaagagcaactccgccgtggcctggtccaacaagtccgatttcgcctgcgccaacgccttcaacaacagcattatccccgaggacacattcttcccaagccccgagagcagctgcgacgtgaagctggtggaaaagagcttcgagacagacaccaacctgaacttccagatcctgtacgagatcctgctgggcaaggccaccctgtacgccgtgctggtgtctgccctggtgctgatggctatggtcaagcggaaggacagccggggacgcgccaagagaagcggatctggcgtgaagcagaccctgaatttcgacctgctgaagctggctggcgacgtggaatccaacccaggccctactagtatggactggatttggcgcatccttttccttgtcggcgctgctaccggcgcgcattccttcgaacttgaaatggctcaggtgcagctggtgcagagcggagccgaagtgaagaaacctggcagcagcgtgaaggtgtcctgcaaagcttctggcggcaccttcagcagctacgccatctcttgggttcgacaggcccctggacaaggactggaatggatgggcagaatcatccccatcctgggaatcgccaactacgcccagaaattccagggcagagtgacaatcaccgccgacaagagcaccagcaccgcctacatggaactgagcagcctgagaagcgaggacaccgccgtgtactattgtgcaagaggcggctactacagccacgacatgtggagcgaagattggggccagggcacactggtcacagtgtcatctacgcgtgaggacctgaagaacgtgttcccacctgaggtggccgtgttcgagcctagcgaggccgagatcagccacacccagaaagccaccctcgtgtgcctggctaccggcttctaccccgaccatgtggaactgtcttggtgggtcaacggcaaagaggtgcacagcggcgtgtgtaccgacccccagccactgaaagaacagcccgccctgaacgacagccggtactgcctgagcagcagactgagagtgtccgccaccttctggcagaacccccggaaccacttcagatgccaggtgcagttctacggcctgagcgagaacgacgagtggacccaggacagagccaagcccgtgacccagatcgtgtctgccgaagcctggggcagagccgattgcggctttaccagcgagagctaccagcagggcgtgctgagcgccaccaacctgagcgtgatcggcttcagaatcctgctgctgaaagtggccggctttaacctgctgatgaccctgcggctgtggtccagc

SEQ ID NO: 5245 - DNA, 1890 bp, synthetic construct
  source 1..1890: mol_type = other DNA
atggccttaccagtgaccgccttgctcctgccgctggccttgctgctccacgccgccaggccggacttcgtgatgacacagagccctgatagcctggccgtgtctctcggcgagcgagtgaccatgagctgcaagtctagccagagcctgctgaacagcggcaaccagaagaactacctgacctggtatcagcagaagcccggccagcctcctaagctgctgatctactgggccagcaccagagaaagcggcgtgcccgatagattttctggctctggcagcggcaccgacttcaccctgacaatttctagcctgcaagccgaggacgtggccgtgtactactgccagaacgactacagctacccctacaccttcggccagggcaccaagctggaaatcaaactcgagatccagaaccctgatcctgccgtgtaccagctgcgggatagcaagagcagcgacaagagcgtgtgtctgttcaccgacttcgacagccagaccaacgtgtcccagagcaaggactccgacgtgtacatcaccgataagtgcgtgctggacatgcggagcatggacttcaagagcaactccgccgtggcctggtccaacaagtccgatttcgcctgcgccaacgccttcaacaacagcattatccccgaggacacattcttcccaagccccgagagcagctgcgacgtgaagctggtggaaaagagcttcgagacagacaccaacctgaacttccagatcctgtacgagatcctgctgggcaaggccaccctgtacgccgtgctggtgtctgccctggtgctgatggctatggtcaagcggaaggacagccggggacgcgccaagagaagcggatctggcgtgaagcagaccctgaatttcgacctgctgaagctggctggcgacgtggaatccaacccaggccctactagtatggactggatttggcgcatccttttccttgtcggcgctgctaccggcgcgcattccttcgaagaagtgcaactggttcagagcggagccgagctgaagaaacctggggccagcgtgaaggtgtcctgtaaagccagcggctacacctttaccgactactacatgaaatgggtccgacaggccccaggccagggactcgaatggatcggcgatattatccccagcaacggggccaccttctacaaccagaaattcaagggccgcgtgaccatcaccgtggacaagagcacaagcaccgcctacatggaactgagcagcctgagaagcgaggacaccgccgtgtattattgcgccagaagccatctgctgcgggccagttggttcgcctattggggacagggaaccctggtcaccgttagctctacgcgtgaggacctgaagaacgtgttcccacctgaggtggccgtgttcgagcctagcgaggccgagatcagccacacccagaaagccaccctcgtgtgcctggctaccggcttctaccccgaccatgtggaactgtcttggtgggtcaacggcaaagaggtgcacagcggcgtgtgtaccgacccccagccactgaaagaacagcccgccctgaacgacagccggtactgcctgagcagcagactgagagtgtccgccaccttctggcagaacccccggaaccacttcagatgccaggtgcagttctacggcctgagcgagaacgacgagtggacccaggacagagccaagcccgtgacccagatcgtgtctgccgaagcctggggcagagccgattgcggctttaccagcgagagctaccagcagggcgtgctgagcgccaccaacctgagcgtgatcggcttcagaatcctgctgctgaaagtggccggctttaacctgctgatgaccctgcggctgtggtccagc

SEQ ID NO: 5246 - DNA, 1890 bp, synthetic construct
  source 1..1890: mol_type = other DNA
atggccttaccagtgaccgccttgctcctgccgctggccttgctgctccacgccgccaggccggacttcgtgatgacacagagccctgatagcctggccgtgtctctcggcgagcgagtgaccatgagctgcaagtctagccagagcctgctgaacagcggcaaccagaagaactacctgacctggtatcagcagaagcccggccagcctcctaagctgctgatctactgggccagcaccagagaaagcggcgtgcccgatagattttctggctctggcagcggcaccgacttcaccctgacaatttctagcctgcaagccgaggacgtggccgtgtactactgccagaacgactacagctacccctacaccttcggccagggcaccaagctggaaatcaaactcgagatccagaaccctgatcctgccgtgtaccagctgcgggatagcaagagcagcgacaagagcgtgtgtctgttcaccgacttcgacagccagaccaacgtgtcccagagcaaggactccgacgtgtacatcaccgataagtgcgtgctggacatgcggagcatggacttcaagagcaactccgccgtggcctggtccaacaagtccgatttcgcctgcgccaacgccttcaacaacagcattatccccgaggacacattcttcccaagccccgagagcagctgcgacgtgaagctggtggaaaagagcttcgagacagacaccaacctgaacttccagatcctgtacgagatcctgctgggcaaggccaccctgtacgccgtgctggtgtctgccctggtgctgatggctatggtcaagcggaaggacagccggggacgcgccaagagaagcggatctggcgtgaagcagaccctgaatttcgacctgctgaagctggctggcgacgtggaatccaacccaggccctactagtatggactggatttggcgcatccttttccttgtcggcgctgctaccggcgcgcattccttcgaacaagtgcaactggttcagagcggagccgagctgaagaaacctggggccagcgtgaaggtgtcctgtaaagccagcggctacacctttaccgactactacatgaaatgggtccgacaggccccaggccagggactcgaatggatcggcgatattatccccagcaacggggccaccttctacaaccagaaattcaagggccgcgtgaccatcaccgtggacaagagcacaagcaccgcctacatggaactgagcagcctgagaagcgaggacaccgccgtgtattattgcgccagaagccatctgctgcgggccagttggttcgcctattggggacagggaaccctggtcaccgttagctctacgcgtgaggacctgaagaacgtgttcccacctgaggtggccgtgttcgagcctagcgaggccgagatcagccacacccagaaagccaccctcgtgtgcctggctaccggcttctaccccgaccatgtggaactgtcttggtgggtcaacggcaaagaggtgcacagcggcgtgtgtaccgacccccagccactgaaagaacagcccgccctgaacgacagccggtactgcctgagcagcagactgagagtgtccgccaccttctggcagaacccccggaaccacttcagatgccaggtgcagttctacggcctgagcgagaacgacgagtggacccaggacagagccaagcccgtgacccagatcgtgtctgccgaagcctggggcagagccgattgcggctttaccagcgagagctaccagcagggcgtgctgagcgccaccaacctgagcgtgatcggcttcagaatcctgctgctgaaagtggccggctttaacctgctgatgaccctgcggctgtggtccagc

SEQ ID NO: 5247 - DNA, 1860 bp, synthetic construct
  source 1..1860: mol_type = other DNA
atggccttaccagtgaccgccttgctcctgccgctggccttgctgctccacgccgccaggccggacgtgcagatcacacagagccctagctacctggctgcctctcctggcgagacaatcaccatcaactgtcgggccagcaagagcatcagcaaggacctggcctggtatcaagagaagcccggcaagaccaacaagctgctgatctacagcggcagcacactccagtctggcatccccagcagattttccggctctggcagcggcaccgatttcaccctgaccataagcagcctggaacctgaggacttcgccatgtactactgccagcagcacaacaagtacccctacacctttggcggaggcaccaagctggaaatcaagagactcgagatccagaaccctgatcctgccgtgtaccagctgcgggatagcaagagcagcgacaagagcgtgtgtctgttcaccgacttcgacagccagaccaacgtgtcccagagcaaggactccgacgtgtacatcaccgataagtgcgtgctggacatgcggagcatggacttcaagagcaactccgccgtggcctggtccaacaagtccgatttcgcctgcgccaacgccttcaacaacagcattatccccgaggacacattcttcccaagccccgagagcagctgcgacgtgaagctggtggaaaagagcttcgagacagacaccaacctgaacttccagatcctgtacgagatcctgctgggcaaggccaccctgtacgccgtgctggtgtctgccctggtgctgatggctatggtcaagcggaaggacagccggggacgcgccaagagaagcggatctggcgtgaagcagaccctgaatttcgacctgctgaagctggctggcgacgtggaatccaacccaggccctactagtatggactggatttggcgcatccttttccttgtcggcgctgctaccggcgcgcattccttcgaacaagttcaactgcaacagcctggggccgagcttgttagacctggcgcttctgtgaagctgagctgcaaggccagcggctacaccttcaccagctactggatgaactgggtcaagcagcggcctgaccagggcctcgaatggatcggcagaatcgacccctacgacagcgagacacactacaaccagaagttcaaggacaaggccatcctgaccgtggacaagagcagctccaccgcctacatgcaactgagcagcctgacctctgaggatagcgccgtgtactattgcgccagaggcaactgggacgactattggggccagggcacaaccctgacagtgtctagtacgcgtgaggacctgaagaacgtgttcccacctgaggtggccgtgttcgagcctagcgaggccgagatcagccacacccagaaagccaccctcgtgtgcctggctaccggcttctaccccgaccatgtggaactgtcttggtgggtcaacggcaaagaggtgcacagcggcgtgtgtaccgacccccagccactgaaagaacagcccgccctgaacgacagccggtactgcctgagcagcagactgagagtgtccgccaccttctggcagaacccccggaaccacttcagatgccaggtgcagttctacggcctgagcgagaacgacgagtggacccaggacagagccaagcccgtgacccagatcgtgtctgccgaagcctggggcagagccgattgcggctttaccagcgagagctaccagcagggcgtgctgagcgccaccaacctgagcgtgatcggcttcagaatcctgctgctgaaagtggccggctttaacctgctgatgaccctgcggctgtggtccagc

SEQ ID NO: 5248 - DNA, 1866 bp, synthetic construct
  source 1..1866: mol_type = other DNA
atggccttaccagtgaccgccttgctcctgccgctggccttgctgctccacgccgccaggccggagatcgtgctgacacagagccctaccagcatgacagcctctccaggcgagcaagtgaccatcacctgtagagccagcagcagcatcaactacatgcactggtatcagcagaagcctggcgcaagccccagaccttggatctacgagacaagcaagctggcctccggcgtgcccgatagattttctggatctgccagcggcaccagctacagcctgaccatcaacaacatggaagccgaggacgccgccacctactactgccagcagtggaattacccctcctggacctttggcggaggcaccaagctggaacttaaactcgagatccagaaccctgatcctgccgtgtaccagctgcgggatagcaagagcagcgacaagagcgtgtgtctgttcaccgacttcgacagccagaccaacgtgtcccagagcaaggactccgacgtgtacatcaccgataagtgcgtgctggacatgcggagcatggacttcaagagcaactccgccgtggcctggtccaacaagtccgatttcgcctgcgccaacgccttcaacaacagcattatccccgaggacacattcttcccaagccccgagagcagctgcgacgtgaagctggtggaaaagagcttcgagacagacaccaacctgaacttccagatcctgtacgagatcctgctgggcaaggccaccctgtacgccgtgctggtgtctgccctggtgctgatggctatggtcaagcggaaggacagccggggacgcgccaagagaagcggatctggcgtgaagcagaccctgaatttcgacctgctgaagctggctggcgacgtggaatccaacccaggccctactagtatggactggatttggcgcatccttttccttgtcggcgctgctaccggcgcgcattccttcgaagaagtgcagctcgttgagtctggtggcggactggttcagcctggaagaagcctgaagctgagctgtgccgccagcggcttcaccttcagcgactacaatatggcctgggtccgacaggcccctaagaaaggactggaatgggtcgccaccatcctgtacgatggcggcagaacctactaccggggcagcgtgaagggcagattcaccatcagcagagacaacgccaagagcaccctgtacctgcggatggactctctgagaagcgaggataccgccacatattactgtgccacacacagccggggcaccgactactttgattattggggccagggcgtgatggttaccgtgtctagtacgcgtgaggacctgaagaacgtgttcccacctgaggtggccgtgttcgagcctagcgaggccgagatcagccacacccagaaagccaccctcgtgtgcctggctaccggcttctaccccgaccatgtggaactgtcttggtgggtcaacggcaaagaggtgcacagcggcgtgtgtaccgacccccagccactgaaagaacagcccgccctgaacgacagccggtactgcctgagcagcagactgagagtgtccgccaccttctggcagaacccccggaaccacttcagatgccaggtgcagttctacggcctgagcgagaacgacgagtggacccaggacagagccaagcccgtgacccagatcgtgtctgccgaagcctggggcagagccgattgcggctttaccagcgagagctaccagcagggcgtgctgagcgccaccaacctgagcgtgatcggcttcagaatcctgctgctgaaagtggccggctttaacctgctgatgaccctgcggctgtggtccagc

SEQ ID NO: 5249 - DNA, 1893 bp, synthetic construct
  source 1..1893: mol_type = other DNA
atggccttaccagtgaccgccttgctcctgccgctggccttgctgctccacgccgccaggccggacatcgtgatgacacagagcccttctagcctggccgtgtctgagggcgagacagtgaccatcaactgcaagagcagccagagcttcctgtctagcggcgacggcaagaattacgtggcctggtatcagtacaagcccggacagagccccaagctgctgatctactgggccagcacaagacagagcggcgtgcccgatagattcatcggctctggcagcggcaccgacttcaccctgacaatctctacagtgcaggccgaggacctggctatctactactgccagcagtattacgacacccctctgacctttggctccggcaccaagctggaaatcaaactcgagatccagaaccctgatcctgccgtgtaccagctgcgggatagcaagagcagcgacaagagcgtgtgtctgttcaccgacttcgacagccagaccaacgtgtcccagagcaaggactccgacgtgtacatcaccgataagtgcgtgctggacatgcggagcatggacttcaagagcaactccgccgtggcctggtccaacaagtccgatttcgcctgcgccaacgccttcaacaacagcattatccccgaggacacattcttcccaagccccgagagcagctgcgacgtgaagctggtggaaaagagcttcgagacagacaccaacctgaacttccagatcctgtacgagatcctgctgggcaaggccaccctgtacgccgtgctggtgtctgccctggtgctgatggctatggtcaagcggaaggacagccggggacgcgccaagagaagcggatctggcgtgaagcagaccctgaatttcgacctgctgaagctggctggcgacgtggaatccaacccaggccctactagtatggactggatttggcgcatccttttccttgtcggcgctgctaccggcgcgcattccttcgaagaagtgaagctgcaagagtctggccccagcctggtgcagagtagccaaacactgagcctgacctgtaccgtgtccggctttagcctgaccagctaccacatccactgggtccgacagacccctggcaaaggactggaatggatgggcgtgatgtggagcgacggcgacaccagctataacagcgccctgaagtcccggctgagcatcagcagagatacaagccagagccaggtgttcctgaagatgaacagcctccagaccgaggacaccgccacctactattgtgccagaggctactacagcagctacctgtacctttggttcgcctattggggccagggcaccctggttacagtcagctctacgcgtgaggacctgaagaacgtgttcccacctgaggtggccgtgttcgagcctagcgaggccgagatcagccacacccagaaagccaccctcgtgtgcctggctaccggcttctaccccgaccatgtggaactgtcttggtgggtcaacggcaaagaggtgcacagcggcgtgtgtaccgacccccagccactgaaagaacagcccgccctgaacgacagccggtactgcctgagcagcagactgagagtgtccgccaccttctggcagaacccccggaaccacttcagatgccaggtgcagttctacggcctgagcgagaacgacgagtggacccaggacagagccaagcccgtgacccagatcgtgtctgccgaagcctggggcagagccgattgcggctttaccagcgagagctaccagcagggcgtgctgagcgccaccaacctgagcgtgatcggcttcagaatcctgctgctgaaagtggccggctttaacctgctgatgaccctgcggctgtggtccagc

SEQ ID NO: 5250 - DNA, 1905 bp, synthetic construct
  source 1..1905: mol_type = other DNA
atggccttaccagtgaccgccttgctcctgccgctggccttgctgctccacgccgccaggccggacgtgctgatgacccagacacctgtgtctctgccagtgtctctcggaggccaggtgtccatctcctgtagaagcagccagagcctggtgcactccgacggcgatacctacctgcactggtatctccagaagcctggacagagccctcagctcctgatctaccgggtgtccaacagattcagcggcgtgcccgatagattttccggcagcggctctggcaccgacttcaccctgaagatcagcagagtggaacccgaggacctgggcctgtactactgtctccagaccacacacttcccaccttggacctttggcggaggcaccaagctggaaatgaaactcgagatccagaaccctgatcctgccgtgtaccagctgcgggatagcaagagcagcgacaagagcgtgtgtctgttcaccgacttcgacagccagaccaacgtgtcccagagcaaggactccgacgtgtacatcaccgataagtgcgtgctggacatgcggagcatggacttcaagagcaactccgccgtggcctggtccaacaagtccgatttcgcctgcgccaacgccttcaacaacagcattatccccgaggacacattcttcccaagccccgagagcagctgcgacgtgaagctggtggaaaagagcttcgagacagacaccaacctgaacttccagatcctgtacgagatcctgctgggcaaggccaccctgtacgccgtgctggtgtctgccctggtgctgatggctatggtcaagcggaaggacagccggggacgcgccaagagaagcggatctggcgtgaagcagaccctgaatttcgacctgctgaagctggctggcgacgtggaatccaacccaggccctactagtatggactggatttggcgcatccttttccttgtcggcgctgctaccggcgcgcattccttcgaacaggttcagctccagcagtctggacccgagcttagaaggccaggatctagcgtcagactgagctgcaaggccagcggctaccggatcaaggacttcctgatccactggattaagaacagacccgagcacggcctggaatggatcggatggattgaccctgaggacggcgagactaagtacgcccagaagttccagaccaaggccacactgaccgccgacacctctagcaacaccgcctacatgcaactgagcagcctgaccagcgaggacaccgccacctacttttgtgctagatggggcgacgtgtactacggcctgatgagaggccatgtgatggatgcctggggccagggaacaagcgtgacagtctcttctacgcgtgaggacctgaagaacgtgttcccacctgaggtggccgtgttcgagcctagcgaggccgagatcagccacacccagaaagccaccctcgtgtgcctggctaccggcttctaccccgaccatgtggaactgtcttggtgggtcaacggcaaagaggtgcacagcggcgtgtgtaccgacccccagccactgaaagaacagcccgccctgaacgacagccggtactgcctgagcagcagactgagagtgtccgccaccttctggcagaacccccggaaccacttcagatgccaggtgcagttctacggcctgagcgagaacgacgagtggacccaggacagagccaagcccgtgacccagatcgtgtctgccgaagcctggggcagagccgattgcggctttaccagcgagagctaccagcagggcgtgctgagcgccaccaacctgagcgtgatcggcttcagaatcctgctgctgaaagtggccggctttaacctgctgatgaccctgcggctgtggtccagc

SEQ ID NO: 5251 - DNA, 1890 bp, synthetic construct
  source 1..1890: mol_type = other DNA
atggccttaccagtgaccgccttgctcctgccgctggccttgctgctccacgccgccaggccggacatcgtgatgacacagagccccgccacactgtcactgtctccaggcgaaagagccacactgagctgtcggagcagcaagagcctccagaacgtgaacggcaacacctacctgtactggttccagcagaagcccggccagtctcctcagctcctgatctacagaatgagcaacctgaacagcggcgtgcccgacagattttctggcagcggaagcggcaccgagttcaccctgaccataagcagcctggaacctgaggacttcgccgtgtactactgtatgcagcacctggaataccccatcaccttcggagccggcaccaagctggaaatcaaactcgagatccagaaccctgatcctgccgtgtaccagctgcgggatagcaagagcagcgacaagagcgtgtgtctgttcaccgacttcgacagccagaccaacgtgtcccagagcaaggactccgacgtgtacatcaccgataagtgcgtgctggacatgcggagcatggacttcaagagcaactccgccgtggcctggtccaacaagtccgatttcgcctgcgccaacgccttcaacaacagcattatccccgaggacacattcttcccaagccccgagagcagctgcgacgtgaagctggtggaaaagagcttcgagacagacaccaacctgaacttccagatcctgtacgagatcctgctgggcaaggccaccctgtacgccgtgctggtgtctgccctggtgctgatggctatggtcaagcggaaggacagccggggacgcgccaagagaagcggatctggcgtgaagcagaccctgaatttcgacctgctgaagctggctggcgacgtggaatccaacccaggccctactagtatggactggatttggcgcatccttttccttgtcggcgctgctaccggcgcgcattccttcgaagaagtgcaactggttgaatctggcggcggactggttaagcctggcggatctctgaagctgagctgtgccgccagcggctacacctttaccagctacgtgatgcactgggtccgacaggcccctggcaaaggacttgagtggatcggctacatcaacccctacaacgatggcaccaagtacaacgagaagttccagggcagagtgaccatcagctccgacaagagcatcagcaccgcctacatggaactgagcagcctgagaagcgaggataccgccatgtactattgcgccagaggcacctactactacggcaccagagtgttcgactactggggccagggaaccctggtcacagtctcttctacgcgtgaggacctgaagaacgtgttcccacctgaggtggccgtgttcgagcctagcgaggccgagatcagccacacccagaaagccaccctcgtgtgcctggctaccggcttctaccccgaccatgtggaactgtcttggtgggtcaacggcaaagaggtgcacagcggcgtgtgtaccgacccccagccactgaaagaacagcccgccctgaacgacagccggtactgcctgagcagcagactgagagtgtccgccaccttctggcagaacccccggaaccacttcagatgccaggtgcagttctacggcctgagcgagaacgacgagtggacccaggacagagccaagcccgtgacccagatcgtgtctgccgaagcctggggcagagccgattgcggctttaccagcgagagctaccagcagggcgtgctgagcgccaccaacctgagcgtgatcggcttcagaatcctgctgctgaaagtggccggctttaacctgctgatgaccctgcggctgtggtccagc

SEQ ID NO: 5252 - DNA, 1878 bp, synthetic construct
  source 1..1878: mol_type = other DNA
atggccttaccagtgaccgccttgctcctgccgctggccttgctgctccacgccgccaggccggacatccagatgacacagagccctagcagcctgtctgccagcgtgggagacagagtgaccatcacatgcaaggccagcgaccacatcaacaactggctggcctggtatcagcagaagcctggacaggcccctaagctgctgatctacggcgctaccacactggaaacaggcgtgcccagcagattttctggcagcggctctggcaccgactacaccctgacaatatccagcctccagcctgaggacttcgccacctactactgtcagcagagctggaacaccccttggacattcggccagggcaccaagctggaaatcaagagactcgagatccagaaccctgatcctgccgtgtaccagctgcgggatagcaagagcagcgacaagagcgtgtgtctgttcaccgacttcgacagccagaccaacgtgtcccagagcaaggactccgacgtgtacatcaccgataagtgcgtgctggacatgcggagcatggacttcaagagcaactccgccgtggcctggtccaacaagtccgatttcgcctgcgccaacgccttcaacaacagcattatccccgaggacacattcttcccaagccccgagagcagctgcgacgtgaagctggtggaaaagagcttcgagacagacaccaacctgaacttccagatcctgtacgagatcctgctgggcaaggccaccctgtacgccgtgctggtgtctgccctggtgctgatggctatggtcaagcggaaggacagccggggacgcgccaagagaagcggatctggcgtgaagcagaccctgaatttcgacctgctgaagctggctggcgacgtggaatccaacccaggccctactagtatggactggatttggcgcatccttttccttgtcggcgctgctaccggcgcgcattccttcgaacaagttcagcttcaacagcctggcgctgagctggtcaaacctggcgcttctgtgaagatgagctgcaaagccagcggctacgccttcagcagctactggatcaactggatgaagcagaaacccggccagggactcgaatggatcggccaaatctatcccggcgacggcgacaccaactacaacggcaagttcaagggcagagccacactgaccgccgatacctctagcagcacagcctacatgcagctgagcagcctgaccagcgaagatagcgccgtgtacttctgtgcccggtccatcacaacagtcgtgggctgcgctatggactattggggccagggaacaagcgtgaccgtgtctagtacgcgtgaggacctgaagaacgtgttcccacctgaggtggccgtgttcgagcctagcgaggccgagatcagccacacccagaaagccaccctcgtgtgcctggctaccggcttctaccccgaccatgtggaactgtcttggtgggtcaacggcaaagaggtgcacagcggcgtgtgtaccgacccccagccactgaaagaacagcccgccctgaacgacagccggtactgcctgagcagcagactgagagtgtccgccaccttctggcagaacccccggaaccacttcagatgccaggtgcagttctacggcctgagcgagaacgacgagtggacccaggacagagccaagcccgtgacccagatcgtgtctgccgaagcctggggcagagccgattgcggctttaccagcgagagctaccagcagggcgtgctgagcgccaccaacctgagcgtgatcggcttcagaatcctgctgctgaaagtggccggctttaacctgctgatgaccctgcggctgtggtccagc

SEQ ID NO: 5253 - DNA, 1884 bp, synthetic construct
  source 1..1884: mol_type = other DNA
atggccttaccagtgaccgccttgctcctgccgctggccttgctgctccacgccgccaggccgcagatcgtgctgtctcagtctcctgccatcctgagcgcttccccaggcgagaaagtgaccatgacctgtagagccagcagcagcgtgtcctacatgcactggtatcagcagaagcccggcagcagccctaagccttggatctacgccaccagcaatctggcctctggcgtgccagccagattttctggctctggcagcggcaccagctacagcttcacaatcagcagagtggaagccgaggacgccgccacctactattgtcagcagtggaccttcaatcctcctaccttcggcggaggcacccggctggaaatcaaaagaacagtggctgctctcgagatccagaaccctgatcctgccgtgtaccagctgcgggatagcaagagcagcgacaagagcgtgtgtctgttcaccgacttcgacagccagaccaacgtgtcccagagcaaggactccgacgtgtacatcaccgataagtgcgtgctggacatgcggagcatggacttcaagagcaactccgccgtggcctggtccaacaagtccgatttcgcctgcgccaacgccttcaacaacagcattatccccgaggacacattcttcccaagccccgagagcagctgcgacgtgaagctggtggaaaagagcttcgagacagacaccaacctgaacttccagatcctgtacgagatcctgctgggcaaggccaccctgtacgccgtgctggtgtctgccctggtgctgatggctatggtcaagcggaaggacagccggggacgcgccaagagaagcggatctggcgtgaagcagaccctgaatttcgacctgctgaagctggctggcgacgtggaatccaacccaggccctactagtatggactggatttggcgcatccttttccttgtcggcgctgctaccggcgcgcattccttcgaacaggcttatctgcaacagagcggagccgaactcgtcagacctggcgcttctgtgaagatgagctgcaaggccagcggctacaccttcaccagctataatatgcactgggtcaagcagacccctcggcagggactcgaatggatcggcggaatctatcccggcaacggcgacacctcctacaaccagaagttcaagggcaaagccacactgaccgtgggcaagagcagcagcaccgcctatatgcagctcagcagcctgaccagcgaggacagcgccgtgtacttctgcgccagatacgactacaactacgctatggactactggggccagggcaccagcgtgacagttagctctgccagcacgcgtgaggacctgaagaacgtgttcccacctgaggtggccgtgttcgagcctagcgaggccgagatcagccacacccagaaagccaccctcgtgtgcctggctaccggcttctaccccgaccatgtggaactgtcttggtgggtcaacggcaaagaggtgcacagcggcgtgtgtaccgacccccagccactgaaagaacagcccgccctgaacgacagccggtactgcctgagcagcagactgagagtgtccgccaccttctggcagaacccccggaaccacttcagatgccaggtgcagttctacggcctgagcgagaacgacgagtggacccaggacagagccaagcccgtgacccagatcgtgtctgccgaagcctggggcagagccgattgcggctttaccagcgagagctaccagcagggcgtgctgagcgccaccaacctgagcgtgatcggcttcagaatcctgctgctgaaagtggccggctttaacctgctgatgaccctgcggctgtggtccagc

SEQ ID NO: 5254 - DNA, 1878 bp, synthetic construct
  source 1..1878: mol_type = other DNA
atggccttaccagtgaccgccttgctcctgccgctggccttgctgctccacgccgccaggccggagatcgtgctgacacagagccctgccaccctgtctctgagccctggcgaaagagccaccctgagctgtagagccagccagagcgtgtccagctacctggcctggtatcagcagaagcccggccaggctccccggctgctgatctacgatgccagcaatagagccaccggcatccccgccagattttccggctctggcagcggcaccgacttcaccctgaccatcagctccctggaacccgaggacttcgccgtgtactactgccagcagcggagcaactggcccatcacattcggccagggcacccggctggaaatcaaactcgagatccagaaccctgatcctgccgtgtaccagctgcgggatagcaagagcagcgacaagagcgtgtgtctgttcaccgacttcgacagccagaccaacgtgtcccagagcaaggactccgacgtgtacatcaccgataagtgcgtgctggacatgcggagcatggacttcaagagcaactccgccgtggcctggtccaacaagtccgatttcgcctgcgccaacgccttcaacaacagcattatccccgaggacacattcttcccaagccccgagagcagctgcgacgtgaagctggtggaaaagagcttcgagacagacaccaacctgaacttccagatcctgtacgagatcctgctgggcaaggccaccctgtacgccgtgctggtgtctgccctggtgctgatggctatggtcaagcggaaggacagccggggacgcgccaagagaagcggatctggcgtgaagcagaccctgaatttcgacctgctgaagctggctggcgacgtggaatccaacccaggccctactagtatggactggatttggcgcatccttttccttgtcggcgctgctaccggcgcgcattccttcgaagaggtgcagcttgttgagtctggcggaggactggtgcagcccgatagaagcctgagactgtcttgtgccgccagcggcttcaccttccacgattatgccatgcactgggtccgacaggcccctggcaaaggacttgaatgggtgtccaccatctcttggaacagcggcacaatcggctacgccgactctgtgaagggcagattcaccatcagccgggacaacgccaagaacagcctgtacctccagatgaactccctgagagccgaggacacagccctgtactactgcgccaaggacatccagtacggcaactactactacggcatggacgtgtggggccagggcacaacagtgacagtctcttctacgcgtgaggacctgaagaacgtgttcccacctgaggtggccgtgttcgagcctagcgaggccgagatcagccacacccagaaagccaccctcgtgtgcctggctaccggcttctaccccgaccatgtggaactgtcttggtgggtcaacggcaaagaggtgcacagcggcgtgtgtaccgacccccagccactgaaagaacagcccgccctgaacgacagccggtactgcctgagcagcagactgagagtgtccgccaccttctggcagaacccccggaaccacttcagatgccaggtgcagttctacggcctgagcgagaacgacgagtggacccaggacagagccaagcccgtgacccagatcgtgtctgccgaagcctggggcagagccgattgcggctttaccagcgagagctaccagcagggcgtgctgagcgccaccaacctgagcgtgatcggcttcagaatcctgctgctgaaagtggccggctttaacctgctgatgaccctgcggctgtggtccagc

SEQ ID NO: 5255 - DNA, 1863 bp, synthetic construct
  source 1..1863: mol_type = other DNA
atggccttaccagtgaccgccttgctcctgccgctggccttgctgctccacgccgccaggccggacatccagatgacacagagccctagcagcctgtctgccagcgtgggagatagagtgaccatcaactgcaaggccagccaggacatcaacagctacctgagctggttccagcagaagcctggcaaggcccctaagacactgatctaccgggccaacagactggtggatggcgtgccaagcagattttctggcagcggcagcggccaggattacaccctgacaatatccagcctccagcctgaggacttcgccacctactactgcctccagtacgacgagttccctctgacctttggcggaggcaccaaggtggaaatcaaactcgagatccagaaccctgatcctgccgtgtaccagctgcgggatagcaagagcagcgacaagagcgtgtgtctgttcaccgacttcgacagccagaccaacgtgtcccagagcaaggactccgacgtgtacatcaccgataagtgcgtgctggacatgcggagcatggacttcaagagcaactccgccgtggcctggtccaacaagtccgatttcgcctgcgccaacgccttcaacaacagcattatccccgaggacacattcttcccaagccccgagagcagctgcgacgtgaagctggtggaaaagagcttcgagacagacaccaacctgaacttccagatcctgtacgagatcctgctgggcaaggccaccctgtacgccgtgctggtgtctgccctggtgctgatggctatggtcaagcggaaggacagccggggacgcgccaagagaagcggatctggcgtgaagcagaccctgaatttcgacctgctgaagctggctggcgacgtggaatccaacccaggccctactagtatggactggatttggcgcatccttttccttgtcggcgctgctaccggcgcgcattccttcgaacaggtgcaactggtgcagtctggggccgaagtgaagaaacctggggcctctgtgaaggtgtcctgcaaagccagcggctacacctttaccaactacgacatcaactgggtccgacaggctccaggccaaggactggaatggatcggctggatctatcctggcgacggcagcaccaagtacaacgagaagttcaaggccaaggccacactgaccgccgataccagcacaagcaccgcctacatggaactgcggagcctgagaagcgacgacaccgccgtgtactattgtgcctccggctacgaggacgctatggactattggggccagggcaccaccgtgacagtgtctagtacgcgtgaggacctgaagaacgtgttcccacctgaggtggccgtgttcgagcctagcgaggccgagatcagccacacccagaaagccaccctcgtgtgcctggctaccggcttctaccccgaccatgtggaactgtcttggtgggtcaacggcaaagaggtgcacagcggcgtgtgtaccgacccccagccactgaaagaacagcccgccctgaacgacagccggtactgcctgagcagcagactgagagtgtccgccaccttctggcagaacccccggaaccacttcagatgccaggtgcagttctacggcctgagcgagaacgacgagtggacccaggacagagccaagcccgtgacccagatcgtgtctgccgaagcctggggcagagccgattgcggctttaccagcgagagctaccagcagggcgtgctgagcgccaccaacctgagcgtgatcggcttcagaatcctgctgctgaaagtggccggctttaacctgctgatgaccctgcggctgtggtccagc

SEQ ID NO: 5256 - DNA, 1869 bp, synthetic construct
  source 1..1869: mol_type = other DNA
atggccttaccagtgaccgccttgctcctgccgctggccttgctgctccacgccgccaggccggacatcgtgatgacccagacacctctgagcctgagcgtgacacctggacagcctgccagcattagctgcaagagcagccagtctctgctggacggcgacggcaagacctacctgaattggctgctccagaagcctggacagagccctcagcggctgatctacctggtgtccaagctggatagcggcgtgcccgatagattttctggcagcggctctggcaccgacttcaccctgaagatcagcagagtggaagccgaggacgtgggcgtgtactactgttggcagggcacacacttccccagaacattcggccagggcacaaagctggaaatcaaactcgagatccagaaccctgatcctgccgtgtaccagctgcgggatagcaagagcagcgacaagagcgtgtgtctgttcaccgacttcgacagccagaccaacgtgtcccagagcaaggactccgacgtgtacatcaccgataagtgcgtgctggacatgcggagcatggacttcaagagcaactccgccgtggcctggtccaacaagtccgatttcgcctgcgccaacgccttcaacaacagcattatccccgaggacacattcttcccaagccccgagagcagctgcgacgtgaagctggtggaaaagagcttcgagacagacaccaacctgaacttccagatcctgtacgagatcctgctgggcaaggccaccctgtacgccgtgctggtgtctgccctggtgctgatggctatggtcaagcggaaggacagccggggacgcgccaagagaagcggatctggcgtgaagcagaccctgaatttcgacctgctgaagctggctggcgacgtggaatccaacccaggccctactagtatggactggatttggcgcatccttttccttgtcggcgctgctaccggcgcgcattccttcgaacaagtgcaactggttcagagcggagccgaagtgaagaaacctggggcctctgtgaaggtgtcctgcaaggccagcggctacaccttcaaggacacctacatccactgggtccgacaggcccctggacaaggacttgagtggatgggcagaatcgaccccgccaacggcaacaccaaatacgaccccaagttccagggcagagtgaccatgaccagagacaccagcatcagcaccgcctacatggaactgagccggctgagatccgatgacaccgccgtgtactattgcgctagaagaggcggagtggattggggccagggaacactggttaccgtgtctagtacgcgtgaggacctgaagaacgtgttcccacctgaggtggccgtgttcgagcctagcgaggccgagatcagccacacccagaaagccaccctcgtgtgcctggctaccggcttctaccccgaccatgtggaactgtcttggtgggtcaacggcaaagaggtgcacagcggcgtgtgtaccgacccccagccactgaaagaacagcccgccctgaacgacagccggtactgcctgagcagcagactgagagtgtccgccaccttctggcagaacccccggaaccacttcagatgccaggtgcagttctacggcctgagcgagaacgacgagtggacccaggacagagccaagcccgtgacccagatcgtgtctgccgaagcctggggcagagccgattgcggctttaccagcgagagctaccagcagggcgtgctgagcgccaccaacctgagcgtgatcggcttcagaatcctgctgctgaaagtggccggctttaacctgctgatgaccctgcggctgtggtccagc

SEQ ID NO: 5257 - DNA, 1872 bp, synthetic construct
  source 1..1872: mol_type = other DNA
atggccttaccagtgaccgccttgctcctgccgctggccttgctgctccacgccgccaggccggacatccagatgacacagagccctagcagcctgtctgccagcgtgggagacagagtgaccatcacatgcaaggccagccaggatgtgtctacagccgtggcctggttccagcagaagcctggaaaagcccctaagctgctgatctacagccccagctacagatacaccggcgtgcccagcagattttctggcagcggctctggcaccgacttcaccctgacaatatccagcctccagcctgaggacttcacctactactgccagcagctctacagcaccccttacacattcggccagggcaccaaggtggaaatcaaactcgagatccagaaccctgatcctgccgtgtaccagctgcgggatagcaagagcagcgacaagagcgtgtgtctgttcaccgacttcgacagccagaccaacgtgtcccagagcaaggactccgacgtgtacatcaccgataagtgcgtgctggacatgcggagcatggacttcaagagcaactccgccgtggcctggtccaacaagtccgatttcgcctgcgccaacgccttcaacaacagcattatccccgaggacacattcttcccaagccccgagagcagctgcgacgtgaagctggtggaaaagagcttcgagacagacaccaacctgaacttccagatcctgtacgagatcctgctgggcaaggccaccctgtacgccgtgctggtgtctgccctggtgctgatggctatggtcaagcggaaggacagccggggacgcgccaagagaagcggatctggcgtgaagcagaccctgaatttcgacctgctgaagctggctggcgacgtggaatccaacccaggccctactagtatggactggatttggcgcatccttttccttgtcggcgctgctaccggcgcgcattccttcgaagaagtgcaactggttcagagcggagccgaagtgaagaaacctggggcctctgtgaaggtgtcctgcaaagccagcggctacacctttaccgactactacctggacgtggtcgtgcggcaagctcctggacaaggactggaatggatcggcagagtgaacccctacaacggcggcaccatctacaaccagaaattcaagggaagagtgaccctgaccagagacaccagcacctccacagcctacctggaactgagcagcctgagaagcgaagataccgccgtgtactactgcgccagggaccactacagatatgaccctctgctggactactggggccagggaaccctggttacagtgtctagtacgcgtgaggacctgaagaacgtgttcccacctgaggtggccgtgttcgagcctagcgaggccgagatcagccacacccagaaagccaccctcgtgtgcctggctaccggcttctaccccgaccatgtggaactgtcttggtgggtcaacggcaaagaggtgcacagcggcgtgtgtaccgacccccagccactgaaagaacagcccgccctgaacgacagccggtactgcctgagcagcagactgagagtgtccgccaccttctggcagaacccccggaaccacttcagatgccaggtgcagttctacggcctgagcgagaacgacgagtggacccaggacagagccaagcccgtgacccagatcgtgtctgccgaagcctggggcagagccgattgcggctttaccagcgagagctaccagcagggcgtgctgagcgccaccaacctgagcgtgatcggcttcagaatcctgctgctgaaagtggccggctttaacctgctgatgaccctgcggctgtggtccagc

SEQ ID NO: 5258 - DNA, 1890 bp, synthetic construct
  source 1..1890: mol_type = other DNA
atggccttaccagtgaccgccttgctcctgccgctggccttgctgctccacgccgccaggccggacatccagatgacacagagccctagcagcctgtctgccagcgtgggagacagagtgaccatcacctgtagagccagccagagcgtgtccaccagcagctacaactacatgcactggtatcagcagaagcccggcaagcctcctaagctgctgattaagtacgccagcaacctggaaagcggcgtgcccagcagattttctggcagcggctctggcaccgacttcaccctgacaatatccagcctccagcctgaggacttcgccacctactactgtcagcactcctgggagatccctctgacattcggccagggcaccaaggtggaaatcaaactcgagatccagaaccctgatcctgccgtgtaccagctgcgggatagcaagagcagcgacaagagcgtgtgtctgttcaccgacttcgacagccagaccaacgtgtcccagagcaaggactccgacgtgtacatcaccgataagtgcgtgctggacatgcggagcatggacttcaagagcaactccgccgtggcctggtccaacaagtccgatttcgcctgcgccaacgccttcaacaacagcattatccccgaggacacattcttcccaagccccgagagcagctgcgacgtgaagctggtggaaaagagcttcgagacagacaccaacctgaacttccagatcctgtacgagatcctgctgggcaaggccaccctgtacgccgtgctggtgtctgccctggtgctgatggctatggtcaagcggaaggacagccggggacgcgccaagagaagcggatctggcgtgaagcagaccctgaatttcgacctgctgaagctggctggcgacgtggaatccaacccaggccctactagtatggactggatttggcgcatccttttccttgtcggcgctgctaccggcgcgcattccttcgaagaagtgcaactggttcagagcggagccgaagtgaagaaacctggggcctctgtgaaggtgtcctgcaaggccagcggctacagcttcaccgactattatatgcactgggtccgacaggctccaggccagggacttgagtggatcggcagaatcaacccctacaacggcgctgccttctacagccagaacttcaaggatagagtgaccctgaccgtggacaccagcaccagcacagcctacctggaactgagcagcctgagaagcgaggacaccgccgtgtactactgcgccattgagagaggcgctgacctggaaggctacgctatggattattggggccagggaaccctggtcaccgtgtcatctacgcgtgaggacctgaagaacgtgttcccacctgaggtggccgtgttcgagcctagcgaggccgagatcagccacacccagaaagccaccctcgtgtgcctggctaccggcttctaccccgaccatgtggaactgtcttggtgggtcaacggcaaagaggtgcacagcggcgtgtgtaccgacccccagccactgaaagaacagcccgccctgaacgacagccggtactgcctgagcagcagactgagagtgtccgccaccttctggcagaacccccggaaccacttcagatgccaggtgcagttctacggcctgagcgagaacgacgagtggacccaggacagagccaagcccgtgacccagatcgtgtctgccgaagcctggggcagagccgattgcggctttaccagcgagagctaccagcagggcgtgctgagcgccaccaacctgagcgtgatcggcttcagaatcctgctgctgaaagtggccggctttaacctgctgatgaccctgcggctgtggtccagc

SEQ ID NO: 5259 - DNA, 1884 bp, synthetic construct
  source 1..1884: mol_type = other DNA
atggccttaccagtgaccgccttgctcctgccgctggccttgctgctccacgccgccaggccggagatcgtgctgacacagtctccagccacactgagcgcttctccaggcgagagagtgaccctgacctgtagagccagcagcaacgtgatctccagctacgtgcactggtatcagcagaagcctggcagcagccccagactgtttctgtacagcaccagcaatctggcctccggcgtgccaagcagattttctggctctggcagcggcaccgacttcacctttaccatctctagcctggaagccgaggacgccgccacctactactgtcagcagtacagcggctaccctctgaccttcggccagggcacaagactggaaatcaaactcgagatccagaaccctgatcctgccgtgtaccagctgcgggatagcaagagcagcgacaagagcgtgtgtctgttcaccgacttcgacagccagaccaacgtgtcccagagcaaggactccgacgtgtacatcaccgataagtgcgtgctggacatgcggagcatggacttcaagagcaactccgccgtggcctggtccaacaagtccgatttcgcctgcgccaacgccttcaacaacagcattatccccgaggacacattcttcccaagccccgagagcagctgcgacgtgaagctggtggaaaagagcttcgagacagacaccaacctgaacttccagatcctgtacgagatcctgctgggcaaggccaccctgtacgccgtgctggtgtctgccctggtgctgatggctatggtcaagcggaaggacagccggggacgcgccaagagaagcggatctggcgtgaagcagaccctgaatttcgacctgctgaagctggctggcgacgtggaatccaacccaggccctactagtatggactggatttggcgcatccttttccttgtcggcgctgctaccggcgcgcattccttcgaacaagttcagctgcaagagtctggccctggcctggtcaagcctagcgaaacactgagcctgacctgcgccgtgtctggctactctatcaccagcgcctactattggaactggatcagacagcctcctggcaaaggactggaatggatcggctacatcagctacgacggcagaaacaactacaaccccagcctgaagaaccggatcaccatcaatcccgacaccagcaagaaccagttcagcctccagctgaacagcgtgacccctgaggataccgccgtgtactactgtgccagagaaggcgactacgacgtgggcaactactacgctatggactactggggccagggaaccctggtcacagtctcttctacgcgtgaggacctgaagaacgtgttcccacctgaggtggccgtgttcgagcctagcgaggccgagatcagccacacccagaaagccaccctcgtgtgcctggctaccggcttctaccccgaccatgtggaactgtcttggtgggtcaacggcaaagaggtgcacagcggcgtgtgtaccgacccccagccactgaaagaacagcccgccctgaacgacagccggtactgcctgagcagcagactgagagtgtccgccaccttctggcagaacccccggaaccacttcagatgccaggtgcagttctacggcctgagcgagaacgacgagtggacccaggacagagccaagcccgtgacccagatcgtgtctgccgaagcctggggcagagccgattgcggctttaccagcgagagctaccagcagggcgtgctgagcgccaccaacctgagcgtgatcggcttcagaatcctgctgctgaaagtggccggctttaacctgctgatgaccctgcggctgtggtccagc

SEQ ID NO: 5260 - DNA, 1884 bp, synthetic construct
  source 1..1884: mol_type = other DNA
atggccttaccagtgaccgccttgctcctgccgctggccttgctgctccacgccgccaggccggagatcgtgctgacacagtctcccgccacactgtcactgtctccaggcgaaagagccacactgagctgtagagccagcagcaacgtgatctccagctacgtgcactggtatcagcagaagcctggacaggcccctcggctgctgatctacagcacaagcaatctggcctctggcatccccgccagattttctggctctggaagcggcaccgacttcaccctgaccataagcagcctggaacctgaggacttcgccgtgtactactgccagcagtatagcggctaccctctgaccttcggccagggcacaagactggaaatcaaactcgagatccagaaccctgatcctgccgtgtaccagctgcgggatagcaagagcagcgacaagagcgtgtgtctgttcaccgacttcgacagccagaccaacgtgtcccagagcaaggactccgacgtgtacatcaccgataagtgcgtgctggacatgcggagcatggacttcaagagcaactccgccgtggcctggtccaacaagtccgatttcgcctgcgccaacgccttcaacaacagcattatccccgaggacacattcttcccaagccccgagagcagctgcgacgtgaagctggtggaaaagagcttcgagacagacaccaacctgaacttccagatcctgtacgagatcctgctgggcaaggccaccctgtacgccgtgctggtgtctgccctggtgctgatggctatggtcaagcggaaggacagccggggacgcgccaagagaagcggatctggcgtgaagcagaccctgaatttcgacctgctgaagctggctggcgacgtggaatccaacccaggccctactagtatggactggatttggcgcatccttttccttgtcggcgctgctaccggcgcgcattccttcgaagaagtgcaactggtggaaagtggcggcggactggtgcaacctggaagaagcctgagactgtcctgtgccgccagcggctactctatcacaagcgcctactactggaactgggtccgacaggctcctggcaaaggactggaatgggtgtcctacatcagctacgacggcagaaacaactacaaccccagcctgaagaaccgcttcaccatcagccgggacaacgccaagaagtccctgtacctccagatgaacagcctgagagccgaggacacagccctgtactattgcgccaaagagggcgactacgacgtcggcaactactacgctatggactactggggccagggaaccaccgtgactgtctcttctacgcgtgaggacctgaagaacgtgttcccacctgaggtggccgtgttcgagcctagcgaggccgagatcagccacacccagaaagccaccctcgtgtgcctggctaccggcttctaccccgaccatgtggaactgtcttggtgggtcaacggcaaagaggtgcacagcggcgtgtgtaccgacccccagccactgaaagaacagcccgccctgaacgacagccggtactgcctgagcagcagactgagagtgtccgccaccttctggcagaacccccggaaccacttcagatgccaggtgcagttctacggcctgagcgagaacgacgagtggacccaggacagagccaagcccgtgacccagatcgtgtctgccgaagcctggggcagagccgattgcggctttaccagcgagagctaccagcagggcgtgctgagcgccaccaacctgagcgtgatcggcttcagaatcctgctgctgaaagtggccggctttaacctgctgatgaccctgcggctgtggtccagc

SEQ ID NO: 5261 - DNA, 1881 bp, synthetic construct
  source 1..1881: mol_type = other DNA
atggccttaccagtgaccgccttgctcctgccgctggccttgctgctccacgccgccaggccggacgtggtcatgacacagaccccactgagcctgcctgtgtctctgggagatcaggccagcatctcctgtagaagcagccagagcctggtgcacagcaacggcaacacctacctgcggtggtatctccagaagcctggacagagccccaaggtgctgatctacaaggtgtccaacagagtgtccggcgtgcccgatagattttctggcagcggctctggcaccgacttcaccctgaagatcaatagagtggaagccgaggacctgggcgtgtacttctgtagccagagcacccatgtgccttggacctttggcggaggcaccaagctggaaatcaagctcgagatccagaaccctgatcctgccgtgtaccagctgcgggatagcaagagcagcgacaagagcgtgtgtctgttcaccgacttcgacagccagaccaacgtgtcccagagcaaggactccgacgtgtacatcaccgataagtgcgtgctggacatgcggagcatggacttcaagagcaactccgccgtggcctggtccaacaagtccgatttcgcctgcgccaacgccttcaacaacagcattatccccgaggacacattcttcccaagccccgagagcagctgcgacgtgaagctggtggaaaagagcttcgagacagacaccaacctgaacttccagatcctgtacgagatcctgctgggcaaggccaccctgtacgccgtgctggtgtctgccctggtgctgatggctatggtcaagcggaaggacagccggggacgcgccaagagaagcggatctggcgtgaagcagaccctgaatttcgacctgctgaagctggctggcgacgtggaatccaacccaggccctactagtatggactggatttggcgcatccttttccttgtcggcgctgctaccggcgcgcattccttcgaaggcgtgaagctggacgagacaggcggaggacttgttcaacctggcggagccatgaagctgagctgtgtgaccagcggctttaccttcggccactactggatgaactgggtccgacagtcccctgagaaaggactggaatgggtcgcccagttcagaaacaagccctacaactacgaaacctactacagcgacagcgtgaagggcagattcaccatcagccgggacgacagcaagtccagcgtgtacctccagatgaacaacctgcgcgtggaagataccggcatctactactgtaccggggccagctacggcatggaatatctcggccagggcaccagcgtgaccgtgtctacaacgcgtgaggacctgaagaacgtgttcccacctgaggtggccgtgttcgagcctagcgaggccgagatcagccacacccagaaagccaccctcgtgtgcctggctaccggcttctaccccgaccatgtggaactgtcttggtgggtcaacggcaaagaggtgcacagcggcgtgtgtaccgacccccagccactgaaagaacagcccgccctgaacgacagccggtactgcctgagcagcagactgagagtgtccgccaccttctggcagaacccccggaaccacttcagatgccaggtgcagttctacggcctgagcgagaacgacgagtggacccaggacagagccaagcccgtgacccagatcgtgtctgccgaagcctggggcagagccgattgcggctttaccagcgagagctaccagcagggcgtgctgagcgccaccaacctgagcgtgatcggcttcagaatcctgctgctgaaagtggccggctttaacctgctgatgaccctgcggctgtggtccagc

SEQ ID NO: 5262 - DNA, 1899 bp, synthetic construct
  source 1..1899: mol_type = other DNA
atggccttaccagtgaccgccttgctcctgccgctggccttgctgctccacgccgccaggccgcaggtgcaactggtggaatctggcggcaatctggttcagcctggcggctctctgagactgtcttgtgccgccagcggcttcaccttcggcagcttttctatgagctgggtccgacaagctcctggcggaggacttgaatgggtggcaggactgtctgccagaagcagcctgacacactacgccgactctgtgaagggcagattcaccatcagccgggacaacgccaagaacagcgtgtacctccagatgaacagcctgagagtggaagataccgccgtgtactactgcgccagaagaagctacgacagcagcggctactggggccacttctacagctacatggatgtgtggggccagggcaccctggttacagtttctctcgagatccagaaccctgatcctgccgtgtaccagctgcgggatagcaagagcagcgacaagagcgtgtgtctgttcaccgacttcgacagccagaccaacgtgtcccagagcaaggactccgacgtgtacatcaccgataagtgcgtgctggacatgcggagcatggacttcaagagcaactccgccgtggcctggtccaacaagtccgatttcgcctgcgccaacgccttcaacaacagcattatccccgaggacacattcttcccaagccccgagagcagctgcgacgtgaagctggtggaaaagagcttcgagacagacaccaacctgaacttccagatcctgtacgagatcctgctgggcaaggccaccctgtacgccgtgctggtgtctgccctggtgctgatggctatggtcaagcggaaggacagccggggacgcgccaagagaagcggatctggcgtgaagcagaccctgaatttcgacctgctgaagctggctggcgacgtggaatccaacccaggccctactagtatggactggatttggcgcatccttttccttgtcggcgctgctaccggcgcgcattccttcgaatctgtgctgacccagcctagctccgtgtctgctgctcctggacagaaagtgaccatctcctgtagcggcagcaccagcaacatcggcaacaactacgtgtcctggtatcagcagcaccccggcaaggcccctaagctgatgatctacgacgtgtccaagaggcccagcggcgtgccagatagattttccggcagcaagagcggcaacagcgccagcctggatattagcggactccagtctgaggacgaggccgactactattgcgccgcctgggatgatagcctgagcgagtttctgtttggcaccggcaccaagctgacagtgcttggaacgcgtgaggacctgaagaacgtgttcccacctgaggtggccgtgttcgagcctagcgaggccgagatcagccacacccagaaagccaccctcgtgtgcctggctaccggcttctaccccgaccatgtggaactgtcttggtgggtcaacggcaaagaggtgcacagcggcgtgtgtaccgacccccagccactgaaagaacagcccgccctgaacgacagccggtactgcctgagcagcagactgagagtgtccgccaccttctggcagaacccccggaaccacttcagatgccaggtgcagttctacggcctgagcgagaacgacgagtggacccaggacagagccaagcccgtgacccagatcgtgtctgccgaagcctggggcagagccgattgcggctttaccagcgagagctaccagcagggcgtgctgagcgccaccaacctgagcgtgatcggcttcagaatcctgctgctgaaagtggccggctttaacctgctgatgaccctgcggctgtggtccagc

SEQ ID NO: 5263 - DNA, 1884 bp, synthetic construct
  source 1..1884: mol_type = other DNA
atggccttaccagtgaccgccttgctcctgccgctggccttgctgctccacgccgccaggccggacgtggtcatgacacagagcccttctagcctgtctgccagcgtgggcgacagagtgacaatcacctgtcagagcagcctggacatcagccactacctgaactggtatcagcagaagcccggcaaggcccctaagctgctgatctacgacgccagcaatctggaaaccggcgtgcccagcagattttctggcagcggaagcggcacccacttcaccttcacaatatccagcctccagcctgaggacttcgccacctactactgccagcagtacgacaacctgcctctgacctttggcggaggcaccaagctggaaatcaagagactcgagatccagaaccctgatcctgccgtgtaccagctgcgggatagcaagagcagcgacaagagcgtgtgtctgttcaccgacttcgacagccagaccaacgtgtcccagagcaaggactccgacgtgtacatcaccgataagtgcgtgctggacatgcggagcatggacttcaagagcaactccgccgtggcctggtccaacaagtccgatttcgcctgcgccaacgccttcaacaacagcattatccccgaggacacattcttcccaagccccgagagcagctgcgacgtgaagctggtggaaaagagcttcgagacagacaccaacctgaacttccagatcctgtacgagatcctgctgggcaaggccaccctgtacgccgtgctggtgtctgccctggtgctgatggctatggtcaagcggaaggacagccggggacgcgccaagagaagcggatctggcgtgaagcagaccctgaatttcgacctgctgaagctggctggcgacgtggaatccaacccaggccctactagtatggactggatttggcgcatccttttccttgtcggcgctgctaccggcgcgcattccttcgaacaagttcaactggttcaatcaggcggaggcgtggtgcaacctggtggctctctgagagtgtcttgtgctgcctctggcgtgaccctgagcgactatggaatgcactgggtccgacaggcccctggcaaaggacttgagtgggtcgccttcatcagaaacgacggcagcgacaagtattacgccgacagcgtgaagggcagattcaccatcagccgggacaacagcgagaaaaccgtgtctctccagatgtctagcctgagagccgaggacaccgccgtgtactactgtgccaagaatggcgagagcggccctctggactactggtatctggatctgtggggcagaggcaccctggtcacagtctcttctacgcgtgaggacctgaagaacgtgttcccacctgaggtggccgtgttcgagcctagcgaggccgagatcagccacacccagaaagccaccctcgtgtgcctggctaccggcttctaccccgaccatgtggaactgtcttggtgggtcaacggcaaagaggtgcacagcggcgtgtgtaccgacccccagccactgaaagaacagcccgccctgaacgacagccggtactgcctgagcagcagactgagagtgtccgccaccttctggcagaacccccggaaccacttcagatgccaggtgcagttctacggcctgagcgagaacgacgagtggacccaggacagagccaagcccgtgacccagatcgtgtctgccgaagcctggggcagagccgattgcggctttaccagcgagagctaccagcagggcgtgctgagcgccaccaacctgagcgtgatcggcttcagaatcctgctgctgaaagtggccggctttaacctgctgatgaccctgcggctgtggtccagc

SEQ ID NO: 5264 - DNA, 1896 bp, synthetic construct
  source 1..1896: mol_type = other DNA
atggccttaccagtgaccgccttgctcctgccgctggccttgctgctccacgccgccaggccgagctacgagctgacacagcctccatccgtgtctggcacacctggacagagagtggctatctcctgtagcggcagcagcagcaacatcggcaccagaatggtcacctggtatcagcacgtgccaggcacagcccctaagctgctgatcttcaacaacaaccagcggcctagcggcgtgcccgatagattttctgccagcaagagcggcacaagcgccagcctggctatcatcggactccagtctgacgacgaggccgactactactgtgccacctgggacgacaacgtgaagtcctacgtgttcggcaccggcaccaaagtgacagtgcttggaagtagactcgagatccagaaccctgatcctgccgtgtaccagctgcgggatagcaagagcagcgacaagagcgtgtgtctgttcaccgacttcgacagccagaccaacgtgtcccagagcaaggactccgacgtgtacatcaccgataagtgcgtgctggacatgcggagcatggacttcaagagcaactccgccgtggcctggtccaacaagtccgatttcgcctgcgccaacgccttcaacaacagcattatccccgaggacacattcttcccaagccccgagagcagctgcgacgtgaagctggtggaaaagagcttcgagacagacaccaacctgaacttccagatcctgtacgagatcctgctgggcaaggccaccctgtacgccgtgctggtgtctgccctggtgctgatggctatggtcaagcggaaggacagccggggacgcgccaagagaagcggatctggcgtgaagcagaccctgaatttcgacctgctgaagctggctggcgacgtggaatccaacccaggccctactagtatggactggatttggcgcatccttttccttgtcggcgctgctaccggcgcgcattccttcgaacttgaaatggcccaggttcagctccagcagtggggagctggactgctgaagcctagcgagacactgagcctgacctgtgctgtgtacggcggcagcttcagcggctactactggtcctggatcagacagcctcctggcaaaggactggaatggatcggcgagatcaaccacagcggctccaccaactacaaccccagcctgaagtccagagtgaccatcagcgtggacaccagcaagaaccagttctccctgaagctgagcagcgtgacagccgctgataccgccgtgtactattgcgctagagcccctcagtcttggtacgtgggagatgtgtggggccagggcacactggttacagtgtcatctacgcgtgaggacctgaagaacgtgttcccacctgaggtggccgtgttcgagcctagcgaggccgagatcagccacacccagaaagccaccctcgtgtgcctggctaccggcttctaccccgaccatgtggaactgtcttggtgggtcaacggcaaagaggtgcacagcggcgtgtgtaccgacccccagccactgaaagaacagcccgccctgaacgacagccggtactgcctgagcagcagactgagagtgtccgccaccttctggcagaacccccggaaccacttcagatgccaggtgcagttctacggcctgagcgagaacgacgagtggacccaggacagagccaagcccgtgacccagatcgtgtctgccgaagcctggggcagagccgattgcggctttaccagcgagagctaccagcagggcgtgctgagcgccaccaacctgagcgtgatcggcttcagaatcctgctgctgaaagtggccggctttaacctgctgatgaccctgcggctgtggtccagc

SEQ ID NO: 5265 - DNA, 1887 bp, synthetic construct
  source 1..1887: mol_type = other DNA
atggccttaccagtgaccgccttgctcctgccgctggccttgctgctccacgccgccaggccgcagtctgtgctgacacagcctcctagcctgtctgtggcccctggaaagacagccagcatcacatgcggcggcaacaacatcggcatgaagtccgtgcactggtatcagcagaggccaggacaggctcctgtgctggtcatctactacgacagcgacagaccctctggcatccccggcagattttccggcagcaactctggcaataccgccacactgaccatctccagagtggaagctggcgacgaggccgactactactgccaagtgtgggataccaccggcgatcaccctggctatgtgtttggcaccggcaccaaagtgacagtgcttctcgagatccagaaccctgatcctgccgtgtaccagctgcgggatagcaagagcagcgacaagagcgtgtgtctgttcaccgacttcgacagccagaccaacgtgtcccagagcaaggactccgacgtgtacatcaccgataagtgcgtgctggacatgcggagcatggacttcaagagcaactccgccgtggcctggtccaacaagtccgatttcgcctgcgccaacgccttcaacaacagcattatccccgaggacacattcttcccaagccccgagagcagctgcgacgtgaagctggtggaaaagagcttcgagacagacaccaacctgaacttccagatcctgtacgagatcctgctgggcaaggccaccctgtacgccgtgctggtgtctgccctggtgctgatggctatggtcaagcggaaggacagccggggacgcgccaagagaagcggatctggcgtgaagcagaccctgaatttcgacctgctgaagctggctggcgacgtggaatccaacccaggccctactagtatggactggatttggcgcatccttttccttgtcggcgctgctaccggcgcgcattccttcgaacaagttcaactggttcagagcggagccgaagtgaagaaacctggcagcagcgtgaaggtgtcctgcaaagcaagcggcggcacctttagcagctacgccatctcttgggtccgacaggcacctggacaaggactggaatggatgggcggcatcatccccatcttcggcacagccaattacgcccagaaattccagggcagagtgaccatcaccgccgacgagtctacaagcaccgcctacatggaactgagcagcctgagaagcgaggacaccgccgtgtactattgtgccagaggcgtgtacggctacagcggctctgccccttatgatgagtggggccagggaaccctggtcaccgtttcttctacgcgtgaggacctgaagaacgtgttcccacctgaggtggccgtgttcgagcctagcgaggccgagatcagccacacccagaaagccaccctcgtgtgcctggctaccggcttctaccccgaccatgtggaactgtcttggtgggtcaacggcaaagaggtgcacagcggcgtgtgtaccgacccccagccactgaaagaacagcccgccctgaacgacagccggtactgcctgagcagcagactgagagtgtccgccaccttctggcagaacccccggaaccacttcagatgccaggtgcagttctacggcctgagcgagaacgacgagtggacccaggacagagccaagcccgtgacccagatcgtgtctgccgaagcctggggcagagccgattgcggctttaccagcgagagctaccagcagggcgtgctgagcgccaccaacctgagcgtgatcggcttcagaatcctgctgctgaaagtggccggctttaacctgctgatgaccctgcggctgtggtccagc

SEQ ID NO: 5266 - DNA, 1881 bp, synthetic construct
  source 1..1881: mol_type = other DNA
atggccttaccagtgaccgccttgctcctgccgctggccttgctgctccacgccgccaggccggaggtgcaactggttgagtctggcggaggactggtgcagcctggaagaagcctgagactgtcttgtgccgccagcggcttcaccttcgacgattatgccatgcactgggtccgacaggcccctggcaaaggacttgaatgggtgtccggcatctcctggaacagcggctctatcggctacgccgattccgtgaagggcagattcaccatcagccgggacaacgccaagaacagcctgtacctccagatgaactccctgagagccgaggacacagccctgtactactgcgccaaagacaaaggcggaggctactacgacttttggagcggcagcgattattggggccagggcacactggtcacagtgtctagcctcgagatccagaaccctgatcctgccgtgtaccagctgcgggatagcaagagcagcgacaagagcgtgtgtctgttcaccgacttcgacagccagaccaacgtgtcccagagcaaggactccgacgtgtacatcaccgataagtgcgtgctggacatgcggagcatggacttcaagagcaactccgccgtggcctggtccaacaagtccgatttcgcctgcgccaacgccttcaacaacagcattatccccgaggacacattcttcccaagccccgagagcagctgcgacgtgaagctggtggaaaagagcttcgagacagacaccaacctgaacttccagatcctgtacgagatcctgctgggcaaggccaccctgtacgccgtgctggtgtctgccctggtgctgatggctatggtcaagcggaaggacagccggggacgcgccaagagaagcggatctggcgtgaagcagaccctgaatttcgacctgctgaagctggctggcgacgtggaatccaacccaggccctactagtatggactggatttggcgcatccttttccttgtcggcgctgctaccggcgcgcattccttcgaatcttctgagctgacacaggaccctgccgtgtctgttgctctgggccagacagtgcggattacctgtcagggcgatagcctgagaagctactacgcctcctggtatcagcagaagccaggccaggctcctgtgctggtcatctacggcaagaacaacagacccagcggcatccccgatagattcagcggaagcagctctggcaataccgccagcctgacaattactggcgctcaggccgaggacgaggccgactactactgcaacagcagagatagcagcggctgggttttcggcggaggcacaaaactgacagtgctgacgcgtgaggacctgaagaacgtgttcccacctgaggtggccgtgttcgagcctagcgaggccgagatcagccacacccagaaagccaccctcgtgtgcctggctaccggcttctaccccgaccatgtggaactgtcttggtgggtcaacggcaaagaggtgcacagcggcgtgtgtaccgacccccagccactgaaagaacagcccgccctgaacgacagccggtactgcctgagcagcagactgagagtgtccgccaccttctggcagaacccccggaaccacttcagatgccaggtgcagttctacggcctgagcgagaacgacgagtggacccaggacagagccaagcccgtgacccagatcgtgtctgccgaagcctggggcagagccgattgcggctttaccagcgagagctaccagcagggcgtgctgagcgccaccaacctgagcgtgatcggcttcagaatcctgctgctgaaagtggccggctttaacctgctgatgaccctgcggctgtggtccagc

SEQ ID NO: 5267 - DNA, 1908 bp, synthetic construct
  source 1..1908: mol_type = other DNA
atggccttaccagtgaccgccttgctcctgccgctggccttgctgctccacgccgccaggccggaagtgcagctccagcagtctggacctggcctggttaagcctagccagacactgagcctgacctgtgccatcagcggcgatagcgtgctgagcaacagcgacacctggaactggatcagacagagccctagcagaggactggaatggctgggcagaacctaccacagaagcacttggtacgacgactacgccagctctgtgcggggcagagtgtccatcaatgtggacaccagcaagaaccagtacagcctgcaactgaacgccgtgacacctgaggataccggcgtgtactactgcgccagagacagactccaggacggcaactcttggagcgacgcctttgatgtgtggggccagggcacaatggtcaccgtttctagcctcgagatccagaaccctgatcctgccgtgtaccagctgcgggatagcaagagcagcgacaagagcgtgtgtctgttcaccgacttcgacagccagaccaacgtgtcccagagcaaggactccgacgtgtacatcaccgataagtgcgtgctggacatgcggagcatggacttcaagagcaactccgccgtggcctggtccaacaagtccgatttcgcctgcgccaacgccttcaacaacagcattatccccgaggacacattcttcccaagccccgagagcagctgcgacgtgaagctggtggaaaagagcttcgagacagacaccaacctgaacttccagatcctgtacgagatcctgctgggcaaggccaccctgtacgccgtgctggtgtctgccctggtgctgatggctatggtcaagcggaaggacagccggggacgcgccaagagaagcggatctggcgtgaagcagaccctgaatttcgacctgctgaagctggctggcgacgtggaatccaacccaggccctactagtatggactggatttggcgcatccttttccttgtcggcgctgctaccggcgcgcattccttcgaacaatctgctctgacacagcctgccagcgtgtcaggatctcctggacagagcatcaccatctcttgcaccggcaccagctctgatgtcggcggctacaattacgtgtcctggtatcagcagcaccccggcaaggcccctaagctgatgatctacgacgtgtccaacagacccagcggcgtgtccaatagattctccggcagcaagagcggcaacaccgccagcctgacaatttctggactgcaagccgaggacgaggccgactactactgtagcagctacaccagcagcagcacactggtgtacgtgttcggcacaggcaccaaagtgaccgtgcttacgcgtgaggacctgaagaacgtgttcccacctgaggtggccgtgttcgagcctagcgaggccgagatcagccacacccagaaagccaccctcgtgtgcctggctaccggcttctaccccgaccatgtggaactgtcttggtgggtcaacggcaaagaggtgcacagcggcgtgtgtaccgacccccagccactgaaagaacagcccgccctgaacgacagccggtactgcctgagcagcagactgagagtgtccgccaccttctggcagaacccccggaaccacttcagatgccaggtgcagttctacggcctgagcgagaacgacgagtggacccaggacagagccaagcccgtgacccagatcgtgtctgccgaagcctggggcagagccgattgcggctttaccagcgagagctaccagcagggcgtgctgagcgccaccaacctgagcgtgatcggcttcagaatcctgctgctgaaagtggccggctttaacctgctgatgaccctgcggctgtggtccagc

SEQ ID NO: 5268 - DNA, 1842 bp, synthetic construct
  source 1..1842: mol_type = other DNA
atggccttaccagtgaccgccttgctcctgccgctggccttgctgctccacgccgccaggccgcaggtgcaactggttcagtctggggccgaagtgaagaaacctggggcctctgtgaaggtgtcctgcaaggcttccggctacacctttaccagctacgacatcaactgggtccgacaggccacaggccaaggactggaatggatgggctggatgaaccccaacagcggcaataccggctacgcccagaaattccagggcagagtgaccatgaccagaaacaccagcatcagcaccgcctacatggaactgagcagcctgagaagcgaggacaccgccgtgtactattgcgccagaggcgacagcaccaaggtggaaatcaaactcgagatccagaaccctgatcctgccgtgtaccagctgcgggatagcaagagcagcgacaagagcgtgtgtctgttcaccgacttcgacagccagaccaacgtgtcccagagcaaggactccgacgtgtacatcaccgataagtgcgtgctggacatgcggagcatggacttcaagagcaactccgccgtggcctggtccaacaagtccgatttcgcctgcgccaacgccttcaacaacagcattatccccgaggacacattcttcccaagccccgagagcagctgcgacgtgaagctggtggaaaagagcttcgagacagacaccaacctgaacttccagatcctgtacgagatcctgctgggcaaggccaccctgtacgccgtgctggtgtctgccctggtgctgatggctatggtcaagcggaaggacagccggggacgcgccaagagaagcggatctggcgtgaagcagaccctgaatttcgacctgctgaagctggctggcgacgtggaatccaacccaggccctactagtatggactggatttggcgcatccttttccttgtcggcgctgctaccggcgcgcattccttcgaacaatctgtgctgacccagcctagatccgtgtctggctctcctggacagagcgtgaccatctcttgtaccggcaccagctctgatgtcggcggctacaattacgtgtcctggtatcagcagcaccccggcgaagcccctaagctgattatctacgacgccgacaagcggcccagcggcatcagcaatagattcagctctggcaagagcggcaacaccgccagcctgacaatcagcggactccaggtggaagatgaggccgactactactgctgctcctatgccggcggaagcacctgggttttcggaggcggtacaaaagtgaccgtgctgacgcgtgaggacctgaagaacgtgttcccacctgaggtggccgtgttcgagcctagcgaggccgagatcagccacacccagaaagccaccctcgtgtgcctggctaccggcttctaccccgaccatgtggaactgtcttggtgggtcaacggcaaagaggtgcacagcggcgtgtgtaccgacccccagccactgaaagaacagcccgccctgaacgacagccggtactgcctgagcagcagactgagagtgtccgccaccttctggcagaacccccggaaccacttcagatgccaggtgcagttctacggcctgagcgagaacgacgagtggacccaggacagagccaagcccgtgacccagatcgtgtctgccgaagcctggggcagagccgattgcggctttaccagcgagagctaccagcagggcgtgctgagcgccaccaacctgagcgtgatcggcttcagaatcctgctgctgaaagtggccggctttaacctgctgatgaccctgcggctgtggtccagc

SEQ ID NO: 5269 - DNA, 1908 bp, synthetic construct
  source 1..1908: mol_type = other DNA
atggccttaccagtgaccgccttgctcctgccgctggccttgctgctccacgccgccaggccggaagtgcagctccagcagtctggacctggcctggttaagcctagccagacactgagcctgacctgtgccatcagcggcgatagcgtgtcctctaatagcgccgcctggaactggatcagacagagccctagcagaggactggaatggctgggcagaacctactaccgcagcaagtggtacagcgactacgccgtgtccgtgaagtcccggatcaccatcaatcccgacaccagcaagaaccagttcagcctgcaactgaacagcgtgacccctgaggataccgccgtgtactactgcgccagagatccctacgacttttggagcggctaccccgacgcctttgacatctggggacagggcacaatggtcaccgtttctagcctcgagatccagaaccctgatcctgccgtgtaccagctgcgggatagcaagagcagcgacaagagcgtgtgtctgttcaccgacttcgacagccagaccaacgtgtcccagagcaaggactccgacgtgtacatcaccgataagtgcgtgctggacatgcggagcatggacttcaagagcaactccgccgtggcctggtccaacaagtccgatttcgcctgcgccaacgccttcaacaacagcattatccccgaggacacattcttcccaagccccgagagcagctgcgacgtgaagctggtggaaaagagcttcgagacagacaccaacctgaacttccagatcctgtacgagatcctgctgggcaaggccaccctgtacgccgtgctggtgtctgccctggtgctgatggctatggtcaagcggaaggacagccggggacgcgccaagagaagcggatctggcgtgaagcagaccctgaatttcgacctgctgaagctggctggcgacgtggaatccaacccaggccctactagtatggactggatttggcgcatccttttccttgtcggcgctgctaccggcgcgcattccttcgaacaatctgctctgacacagcctgccagcgtgtcaggatctcctggacagagcatcaccatctcttgcaccggcaccagctctgatgtcggcggctacaattacgtgtcctggtatcagcagcaccccggcaaggcccctaaagtgattatcagcgaagtgaacaacagacccagcggcgtgtcccacagattcagcggctctaagtctggcaacaccgccagcctgacaatctctggactgcaagccgaggacgaggccgactacttctgtagcagctacaccagcggcagaaccctgtacgtgttcggcacaggcagcaaagtgacagtgctgggaacgcgtgaggacctgaagaacgtgttcccacctgaggtggccgtgttcgagcctagcgaggccgagatcagccacacccagaaagccaccctcgtgtgcctggctaccggcttctaccccgaccatgtggaactgtcttggtgggtcaacggcaaagaggtgcacagcggcgtgtgtaccgacccccagccactgaaagaacagcccgccctgaacgacagccggtactgcctgagcagcagactgagagtgtccgccaccttctggcagaacccccggaaccacttcagatgccaggtgcagttctacggcctgagcgagaacgacgagtggacccaggacagagccaagcccgtgacccagatcgtgtctgccgaagcctggggcagagccgattgcggctttaccagcgagagctaccagcagggcgtgctgagcgccaccaacctgagcgtgatcggcttcagaatcctgctgctgaaagtggccggctttaacctgctgatgaccctgcggctgtggtccagc

SEQ ID NO: 5270 - DNA, 1905 bp, synthetic construct
  source 1..1905: mol_type = other DNA
atggccttaccagtgaccgccttgctcctgccgctggccttgctgctccacgccgccaggccgcaatctgctctgacacagcctgccagcgcctctggatctcctggacagagcgtgaccatctcctgtaccggcacctcttctgatgtcggcggctacaactacgtgtcctggtatcagcagcaccccggcaaggcccctaagctgatgatctacgacgtgtccaacagacccagcggcgtgtccaatagattctccggcagcaagagcggcaacaccgccagcctgacaatttctggactgcaagccgaggacgaggccgactactactgtagcagctacaccagcagcagcacactgtacgtgttcggcacaggcacccagctcacagttcttctcgagatccagaaccctgatcctgccgtgtaccagctgcgggatagcaagagcagcgacaagagcgtgtgtctgttcaccgacttcgacagccagaccaacgtgtcccagagcaaggactccgacgtgtacatcaccgataagtgcgtgctggacatgcggagcatggacttcaagagcaactccgccgtggcctggtccaacaagtccgatttcgcctgcgccaacgccttcaacaacagcattatccccgaggacacattcttcccaagccccgagagcagctgcgacgtgaagctggtggaaaagagcttcgagacagacaccaacctgaacttccagatcctgtacgagatcctgctgggcaaggccaccctgtacgccgtgctggtgtctgccctggtgctgatggctatggtcaagcggaaggacagccggggacgcgccaagagaagcggatctggcgtgaagcagaccctgaatttcgacctgctgaagctggctggcgacgtggaatccaacccaggccctactagtatggactggatttggcgcatccttttccttgtcggcgctgctaccggcgcgcattccttcgaagaagtgcagctccagcagtctggacctggcctggttaagcctagccagacactgagcctgacctgtgccatcagcggcgattccatgctgagcaacagcgacacctggaactggatcagacagagccccagcagaggcctggaatggctgggcagaacataccacagaagcacttggtacgacgactacgccagctctgtgcggggcagagtgtccatcaatgtggacaccagcaagaaccagtacagcctgcaactgaacgccgtgacacctgaggataccggcgtgtactactgtgccagagtgcggctccaggacggcaattcttggagcgacgcctttgatgtgtggggccagggcacaatggtcaccgtttctagcacgcgtgaggacctgaagaacgtgttcccacctgaggtggccgtgttcgagcctagcgaggccgagatcagccacacccagaaagccaccctcgtgtgcctggctaccggcttctaccccgaccatgtggaactgtcttggtgggtcaacggcaaagaggtgcacagcggcgtgtgtaccgacccccagccactgaaagaacagcccgccctgaacgacagccggtactgcctgagcagcagactgagagtgtccgccaccttctggcagaacccccggaaccacttcagatgccaggtgcagttctacggcctgagcgagaacgacgagtggacccaggacagagccaagcccgtgacccagatcgtgtctgccgaagcctggggcagagccgattgcggctttaccagcgagagctaccagcagggcgtgctgagcgccaccaacctgagcgtgatcggcttcagaatcctgctgctgaaagtggccggctttaacctgctgatgaccctgcggctgtggtccagc

SEQ ID NO: 5271 - DNA, 1905 bp, synthetic construct
  source 1..1905: mol_type = other DNA
atggccttaccagtgaccgccttgctcctgccgctggccttgctgctccacgccgccaggccggacgtgatgctgacccagacaccactgagcctgcctgtgtctctgggcgatcaggccagcatctcctgtagaagcagccagagcatcctgcacagcaccggcgatacctacctggaatggtatctccagaagcctggacagagccccaagctgctgattaacaaggtgtccaaccggctgagcggcgtgcccgatagattttctggcagcggctctggcaccgacttcaccctgaagatcagcagagtggaagccgaggacctgggcgtgtactactgcttccaaggcagccatgttccttggacctttggcggaggcaccaagctggaaatcaagagagctgacgccgctcctaccgtgtccatctttcctctcgagatccagaaccctgatcctgccgtgtaccagctgcgggatagcaagagcagcgacaagagcgtgtgtctgttcaccgacttcgacagccagaccaacgtgtcccagagcaaggactccgacgtgtacatcaccgataagtgcgtgctggacatgcggagcatggacttcaagagcaactccgccgtggcctggtccaacaagtccgatttcgcctgcgccaacgccttcaacaacagcattatccccgaggacacattcttcccaagccccgagagcagctgcgacgtgaagctggtggaaaagagcttcgagacagacaccaacctgaacttccagatcctgtacgagatcctgctgggcaaggccaccctgtacgccgtgctggtgtctgccctggtgctgatggctatggtcaagcggaaggacagccggggacgcgccaagagaagcggatctggcgtgaagcagaccctgaatttcgacctgctgaagctggctggcgacgtggaatccaacccaggccctactagtatggactggatttggcgcatccttttccttgtcggcgctgctaccggcgcgcattccttcgaacaagtgaagctccagcagagcggccctagccttgtgaaacctggcgcttccgtgaagatgagctgcaaggccagcggctacaccttcaccgatttctacatgaaatgggtcaagcagagccacggcaagtctctggaatggatcggcgacatcaaccccaacatcggagacaccttctacaaccagaagttcaagggcaaagccacactgaccgtggacaagagcagcagcaccgcctacatgcagctcaacagcctgaccagcgaggacagcgccgtgtacttttgttccgtgggctacttcgacgtgtggggagccggaacaaccgtgacagtctcttctacgcgtgaggacctgaagaacgtgttcccacctgaggtggccgtgttcgagcctagcgaggccgagatcagccacacccagaaagccaccctcgtgtgcctggctaccggcttctaccccgaccatgtggaactgtcttggtgggtcaacggcaaagaggtgcacagcggcgtgtgtaccgacccccagccactgaaagaacagcccgccctgaacgacagccggtactgcctgagcagcagactgagagtgtccgccaccttctggcagaacccccggaaccacttcagatgccaggtgcagttctacggcctgagcgagaacgacgagtggacccaggacagagccaagcccgtgacccagatcgtgtctgccgaagcctggggcagagccgattgcggctttaccagcgagagctaccagcagggcgtgctgagcgccaccaacctgagcgtgatcggcttcagaatcctgctgctgaaagtggccggctttaacctgctgatgaccctgcggctgtggtccagc

SEQ ID NO: 5272 - DNA, 1893 bp, synthetic construct
  source 1..1893: mol_type = other DNA
atggccttaccagtgaccgccttgctcctgccgctggccttgctgctccacgccgccaggccggagatcgtgctgacacagtctcccgccacactgtcactgtctccaggcgaaagagccacactgagctgtagagccagccagagcgtgtccatctacctggcctggtatcagcagaagcctggacaggctccccggctgctgatctacgatgccagcaatagagccacaggcatccccgccagattttctggctctggcagcggcaccgatttcaccctgaccataagcagcctggaacctgaggacttcgccgtgtactactgccagcagagaagcaactggcctcctttcacattcggccctggcaccaaggtggacatcaaactcgagatccagaaccctgatcctgccgtgtaccagctgcgggatagcaagagcagcgacaagagcgtgtgtctgttcaccgacttcgacagccagaccaacgtgtcccagagcaaggactccgacgtgtacatcaccgataagtgcgtgctggacatgcggagcatggacttcaagagcaactccgccgtggcctggtccaacaagtccgatttcgcctgcgccaacgccttcaacaacagcattatccccgaggacacattcttcccaagccccgagagcagctgcgacgtgaagctggtggaaaagagcttcgagacagacaccaacctgaacttccagatcctgtacgagatcctgctgggcaaggccaccctgtacgccgtgctggtgtctgccctggtgctgatggctatggtcaagcggaaggacagccggggacgcgccaagagaagcggatctggcgtgaagcagaccctgaatttcgacctgctgaagctggctggcgacgtggaatccaacccaggccctactagtatggactggatttggcgcatccttttccttgtcggcgctgctaccggcgcgcattccttcgaacaggtgcagcttgttgaaagcggaggcggagttgtgcagcctggcagaagtctgagactgtcttgtgccgccagcggcttcaccttcagcagctatggaatgcactgggtccgacaggcccctggcaaaggacttgaatgggttgccgtgatctgggacgacggcagcaacaagtattacgtggacagcgtgaagggcagattcaccatcagccgggacaacagcaagaacaccctgtacctccagatgaacagcctgagagccgaggacacagccgtgtattattgcgccagagatgactactacggcagcggctccttcaacagctactatggcacagacgtgtggggccagggcacaacagttaccgttagctctacgcgtgaggacctgaagaacgtgttcccacctgaggtggccgtgttcgagcctagcgaggccgagatcagccacacccagaaagccaccctcgtgtgcctggctaccggcttctaccccgaccatgtggaactgtcttggtgggtcaacggcaaagaggtgcacagcggcgtgtgtaccgacccccagccactgaaagaacagcccgccctgaacgacagccggtactgcctgagcagcagactgagagtgtccgccaccttctggcagaacccccggaaccacttcagatgccaggtgcagttctacggcctgagcgagaacgacgagtggacccaggacagagccaagcccgtgacccagatcgtgtctgccgaagcctggggcagagccgattgcggctttaccagcgagagctaccagcagggcgtgctgagcgccaccaacctgagcgtgatcggcttcagaatcctgctgctgaaagtggccggctttaacctgctgatgaccctgcggctgtggtccagc

SEQ ID NO: 5273 - DNA, 1848 bp, synthetic construct
  source 1..1848: mol_type = other DNA
atggccttaccagtgaccgccttgctcctgccgctggccttgctgctccacgccgccaggccggacatccagatgacacagagccctagcagcctgtctgccagcgtgggagacagagtgaccatcacctgtagagccagccagggcatctcttcttggctggcctggtatcagcagaagcccgagaaggcccctaagagcctgatctatgccgccagctctctccagagcggagtgcctagcagattttctggcagcggctccggcaccgatttcaccctgacaatatccagcctccagcctgaggacttcgccacctactactgccagcagtacaacagctacccctacaccttcggccagggcaccaagctggaaatcaaactcgagatccagaaccctgatcctgccgtgtaccagctgcgggatagcaagagcagcgacaagagcgtgtgtctgttcaccgacttcgacagccagaccaacgtgtcccagagcaaggactccgacgtgtacatcaccgataagtgcgtgctggacatgcggagcatggacttcaagagcaactccgccgtggcctggtccaacaagtccgatttcgcctgcgccaacgccttcaacaacagcattatccccgaggacacattcttcccaagccccgagagcagctgcgacgtgaagctggtggaaaagagcttcgagacagacaccaacctgaacttccagatcctgtacgagatcctgctgggcaaggccaccctgtacgccgtgctggtgtctgccctggtgctgatggctatggtcaagcggaaggacagccggggacgcgccaagagaagcggatctggcgtgaagcagaccctgaatttcgacctgctgaagctggctggcgacgtggaatccaacccaggccctactagtatggactggatttggcgcatccttttccttgtcggcgctgctaccggcgcgcattccttcgaagaagtgcaactggttcaatctggcggcggactggttcatccaggcggttctctgagactgagctgtgccggctctggcttcaccttcagcacctacctgatgtactgggtccgacaggcccctggcaagacactggaatgggtgtccgctattggcagcggaggcgatacctactacgccgactctgtgaagggcagattcaccatcagccgggacaacgccaagaacagcctgtacctccagatgaactccctgagagccgaggacatggccgtgtactactgtgccagaggactcggctattggggccagggaacactggtcacagtgtcctctacgcgtgaggacctgaagaacgtgttcccacctgaggtggccgtgttcgagcctagcgaggccgagatcagccacacccagaaagccaccctcgtgtgcctggctaccggcttctaccccgaccatgtggaactgtcttggtgggtcaacggcaaagaggtgcacagcggcgtgtgtaccgacccccagccactgaaagaacagcccgccctgaacgacagccggtactgcctgagcagcagactgagagtgtccgccaccttctggcagaacccccggaaccacttcagatgccaggtgcagttctacggcctgagcgagaacgacgagtggacccaggacagagccaagcccgtgacccagatcgtgtctgccgaagcctggggcagagccgattgcggctttaccagcgagagctaccagcagggcgtgctgagcgccaccaacctgagcgtgatcggcttcagaatcctgctgctgaaagtggccggctttaacctgctgatgaccctgcggctgtggtccagc

SEQ ID NO: 5274 - DNA, 1905 bp, synthetic construct
  source 1..1905: mol_type = other DNA
atggccttaccagtgaccgccttgctcctgccgctggccttgctgctccacgccgccaggccgctgcctgttctgacacagcctccatccgtgtctgtggcccctggaaagaccgccagaatcacatgcggcggcaacaacatcggcagcaagagcgtgcactggtatcagcagaagcctggacaggctcctgtgctggtggtgtacgacgacagcgatagacctagcggcatccccgagagattcagcggcagcaattccggcaataccgccacactgaccatcagcagagtggaagctggcgacgaggccgactactactgccaagtgtgggacagcagcagcgactacgtggtgtttggcggcggaacaaagctgacagtgcttctcgagatccagaaccctgatcctgccgtgtaccagctgcgggatagcaagagcagcgacaagagcgtgtgtctgttcaccgacttcgacagccagaccaacgtgtcccagagcaaggactccgacgtgtacatcaccgataagtgcgtgctggacatgcggagcatggacttcaagagcaactccgccgtggcctggtccaacaagtccgatttcgcctgcgccaacgccttcaacaacagcattatccccgaggacacattcttcccaagccccgagagcagctgcgacgtgaagctggtggaaaagagcttcgagacagacaccaacctgaacttccagatcctgtacgagatcctgctgggcaaggccaccctgtacgccgtgctggtgtctgccctggtgctgatggctatggtcaagcggaaggacagccggggacgcgccaagagaagcggatctggcgtgaagcagaccctgaatttcgacctgctgaagctggctggcgacgtggaatccaacccaggccctactagtatggactggatttggcgcatccttttccttgtcggcgctgctaccggcgcgcattccttcgaagaagttcaactggtgcagagcggagccgaagtgaagaagccaggcgagagcctgaagattagctgcaaaggcagcggctacagcttcaccagctactggatcggctgggtccgacagatgcctggcaaaggactggaatggatgggcatcatctaccccggcgacagcgacaccagatacagccctagctttcagggccaagtgaccatctccgccgacaagagcatcagcacagcctacctccagtggtcctctctgaaggccagcgataccgccatgtactactgcgccagacaagtctggggatggcaaggcggcatgtaccccaggtctaactggtggtacaacctggactcttggggccagggcacactggtcacagtctcttctacgcgtgaggacctgaagaacgtgttcccacctgaggtggccgtgttcgagcctagcgaggccgagatcagccacacccagaaagccaccctcgtgtgcctggctaccggcttctaccccgaccatgtggaactgtcttggtgggtcaacggcaaagaggtgcacagcggcgtgtgtaccgacccccagccactgaaagaacagcccgccctgaacgacagccggtactgcctgagcagcagactgagagtgtccgccaccttctggcagaacccccggaaccacttcagatgccaggtgcagttctacggcctgagcgagaacgacgagtggacccaggacagagccaagcccgtgacccagatcgtgtctgccgaagcctggggcagagccgattgcggctttaccagcgagagctaccagcagggcgtgctgagcgccaccaacctgagcgtgatcggcttcagaatcctgctgctgaaagtggccggctttaacctgctgatgaccctgcggctgtggtccagc

SEQ ID NO: 5275 - DNA, 1884 bp, synthetic construct
  source 1..1884: mol_type = other DNA
atggccttaccagtgaccgccttgctcctgccgctggccttgctgctccacgccgccaggccggagctggtcatgacacagagccctgcttctctggccgtgtcactgggacagagagccaccatctcttgcagagccagcgagagcgtggacagctacggcaagagcttcatgcactggtatcagctcaagcccggccagcctcctaagctgctgatctacagagcctccaacctggaaagcggcgtgccagccagattttctggcagcggcagcagaaccgacttcaccctgaccattgatcccgtggaagccgatgatgccgccacctactactgccagcagaacaacgaggacccctggacatttggcggaggcaccaagctggaaatcaaactcgagatccagaaccctgatcctgccgtgtaccagctgcgggatagcaagagcagcgacaagagcgtgtgtctgttcaccgacttcgacagccagaccaacgtgtcccagagcaaggactccgacgtgtacatcaccgataagtgcgtgctggacatgcggagcatggacttcaagagcaactccgccgtggcctggtccaacaagtccgatttcgcctgcgccaacgccttcaacaacagcattatccccgaggacacattcttcccaagccccgagagcagctgcgacgtgaagctggtggaaaagagcttcgagacagacaccaacctgaacttccagatcctgtacgagatcctgctgggcaaggccaccctgtacgccgtgctggtgtctgccctggtgctgatggctatggtcaagcggaaggacagccggggacgcgccaagagaagcggatctggcgtgaagcagaccctgaatttcgacctgctgaagctggctggcgacgtggaatccaacccaggccctactagtatggactggatttggcgcatccttttccttgtcggcgctgctaccggcgcgcattccttcgaagaagtgcagctcgaacagtctggccccgagcttgtgaaacctggcgcttccgtgaagatgagctgcaaggccagcggctacaccttcaccaactactacatgaaatgggtcaagcagagccacggcaagtccctggaatggatcggcgatctgaaccccaacaacggcgacaccttctacaaccagaagttcaagggcaaagccacactgaccgtggacaagagcagcaacaccgcctacatgcagctcaactccctgaccagcgaggacagcgccgtgtactactgtgccagaaccggcagatacgaagagaacgctatggactactggggccagggcacaagcgtgacagtctcttctacgcgtgaggacctgaagaacgtgttcccacctgaggtggccgtgttcgagcctagcgaggccgagatcagccacacccagaaagccaccctcgtgtgcctggctaccggcttctaccccgaccatgtggaactgtcttggtgggtcaacggcaaagaggtgcacagcggcgtgtgtaccgacccccagccactgaaagaacagcccgccctgaacgacagccggtactgcctgagcagcagactgagagtgtccgccaccttctggcagaacccccggaaccacttcagatgccaggtgcagttctacggcctgagcgagaacgacgagtggacccaggacagagccaagcccgtgacccagatcgtgtctgccgaagcctggggcagagccgattgcggctttaccagcgagagctaccagcagggcgtgctgagcgccaccaacctgagcgtgatcggcttcagaatcctgctgctgaaagtggccggctttaacctgctgatgaccctgcggctgtggtccagc

SEQ ID NO: 5276 - DNA, 1866 bp, synthetic construct
  source 1..1866: mol_type = other DNA
atggccttaccagtgaccgccttgctcctgccgctggccttgctgctccacgccgccaggccggacgtggtcatgacacagagcccttctagcctgtctgccagcgtgggcgacagagtgaccatcacctgtatggcctccgaggacatctacatccggctggcctggtatcagcagaagcctggaaacgcccctaagctgctgatctacgccgccacctctctggaaacaggcgtgccaagcagattttccggcagcggctctggcaccgatttcaccctgacaatatccagcctccagcctgaggacttcgccacctactactgccagcagtattggagcagcccctggacatttggcggaggcaccaaggtggaaatcaaactcgagatccagaaccctgatcctgccgtgtaccagctgcgggatagcaagagcagcgacaagagcgtgtgtctgttcaccgacttcgacagccagaccaacgtgtcccagagcaaggactccgacgtgtacatcaccgataagtgcgtgctggacatgcggagcatggacttcaagagcaactccgccgtggcctggtccaacaagtccgatttcgcctgcgccaacgccttcaacaacagcattatccccgaggacacattcttcccaagccccgagagcagctgcgacgtgaagctggtggaaaagagcttcgagacagacaccaacctgaacttccagatcctgtacgagatcctgctgggcaaggccaccctgtacgccgtgctggtgtctgccctggtgctgatggctatggtcaagcggaaggacagccggggacgcgccaagagaagcggatctggcgtgaagcagaccctgaatttcgacctgctgaagctggctggcgacgtggaatccaacccaggccctactagtatggactggatttggcgcatccttttccttgtcggcgctgctaccggcgcgcattccttcgaacaggttcagctgcaagagtctggccccggactggtcaagcctagccaaacactgagcctgacctgtaccgtgtccggctacagcatcaccagcgactacacctggaactggatcagacagcctcctggcaacggactggaatggatcggctacatcacctacagcggcagcaccagctacaaccccagcctgaaaagccgggtgctgatctccgtggacaccagcaagaatcaggtgtccctgaagctgagcagcgtgacagccgctgataccgccgtgtactactgtgccagactggggagaagatacacaatggactactggggccagggcaccaccgtgacagtttcttctacgcgtgaggacctgaagaacgtgttcccacctgaggtggccgtgttcgagcctagcgaggccgagatcagccacacccagaaagccaccctcgtgtgcctggctaccggcttctaccccgaccatgtggaactgtcttggtgggtcaacggcaaagaggtgcacagcggcgtgtgtaccgacccccagccactgaaagaacagcccgccctgaacgacagccggtactgcctgagcagcagactgagagtgtccgccaccttctggcagaacccccggaaccacttcagatgccaggtgcagttctacggcctgagcgagaacgacgagtggacccaggacagagccaagcccgtgacccagatcgtgtctgccgaagcctggggcagagccgattgcggctttaccagcgagagctaccagcagggcgtgctgagcgccaccaacctgagcgtgatcggcttcagaatcctgctgctgaaagtggccggctttaacctgctgatgaccctgcggctgtggtccagc

SEQ ID NO: 5277 - DNA, 1878 bp, synthetic construct
  source 1..1878: mol_type = other DNA
atggccttaccagtgaccgccttgctcctgccgctggccttgctgctccacgccgccaggccggatattgtgctgactcagagccctgccactctgagccttagtccaggcgacagagctaccatctcctgtagggcctctgaatccgtgaccattctgggctctcatctcatatattggtatcaacaaaagccgggccagcctccacggctgctcattcaactggcctctaacgtgcagaccggcgtgccagctagattttctggctctggctcccggaccgactttacactgacaatcagctccgtggaacccgaagattttgccgtctattattgcctccagtccaggaccattcctcggacattcggccagggaacaaaactcgaaatcaagcggctcgagatccagaaccctgatcctgccgtgtaccagctgcgggatagcaagagcagcgacaagagcgtgtgtctgttcaccgacttcgacagccagaccaacgtgtcccagagcaaggactccgacgtgtacatcaccgataagtgcgtgctggacatgcggagcatggacttcaagagcaactccgccgtggcctggtccaacaagtccgatttcgcctgcgccaacgccttcaacaacagcattatccccgaggacacattcttcccaagccccgagagcagctgcgacgtgaagctggtggaaaagagcttcgagacagacaccaacctgaacttccagatcctgtacgagatcctgctgggcaaggccaccctgtacgccgtgctggtgtctgccctggtgctgatggctatggtcaagcggaaggacagccggggacgcgccaagagaagcggatctggcgtgaagcagaccctgaatttcgacctgctgaagctggctggcgacgtggaatccaacccaggccctactagtatggactggatttggcgcatccttttccttgtcggcgctgctaccggcgcgcattccttcgaacaggtgcagctcgttcagagtggccccgaagtgaaaaagccaggcgagtccgtgaagatttcctgcaaagcctccggctacacattccggcactactctatgaattgggtcaagcaggccccaggccagggccttaagtggatgggacgcatcaataccgagtccggcgtgccaatctacgccgatgacttcaaaggccggttcagcttcaccgtggatacctctgcctccaccgcctacctggaaatcagcagcctgaccagcgaggatacagctgtgtacttctgtagcaacgattacctctacagcctggatttctggggacagggaaccacactgaccgtgtctagcacgcgtgaggacctgaagaacgtgttcccacctgaggtggccgtgttcgagcctagcgaggccgagatcagccacacccagaaagccaccctcgtgtgcctggctaccggcttctaccccgaccatgtggaactgtcttggtgggtcaacggcaaagaggtgcacagcggcgtgtgtaccgacccccagccactgaaagaacagcccgccctgaacgacagccggtactgcctgagcagcagactgagagtgtccgccaccttctggcagaacccccggaaccacttcagatgccaggtgcagttctacggcctgagcgagaacgacgagtggacccaggacagagccaagcccgtgacccagatcgtgtctgccgaagcctggggcagagccgattgcggctttaccagcgagagctaccagcagggcgtgctgagcgccaccaacctgagcgtgatcggcttcagaatcctgctgctgaaagtggccggctttaacctgctgatgaccctgcggctgtggtccagc

SEQ ID NO: 5278 - DNA, 1878 bp, synthetic construct
  source 1..1878: mol_type = other DNA
atggccttaccagtgaccgccttgctcctgccgctggccttgctgctccacgccgccaggccggacatcgtgctgacacagtctcccgccacactgtcactgagccctggcgatagagccacactgagctgtagagccagcgagagcgtgacaatcctgggcagccacctgatctactggtatcagcagaagcccggacaggcccctagactgctgattcagctcgccagcaatgtgcagacaggcatccctgccagattttccggcagcggcagcagaaccgatttcaccctgaccataagcagcctggaacctgaggacttcgccgtgtactactgcctccagagccggacaatccccagaacctttggacagggcaccaagctggaaatcaagagactcgagatccagaaccctgatcctgccgtgtaccagctgcgggatagcaagagcagcgacaagagcgtgtgtctgttcaccgacttcgacagccagaccaacgtgtcccagagcaaggactccgacgtgtacatcaccgataagtgcgtgctggacatgcggagcatggacttcaagagcaactccgccgtggcctggtccaacaagtccgatttcgcctgcgccaacgccttcaacaacagcattatccccgaggacacattcttcccaagccccgagagcagctgcgacgtgaagctggtggaaaagagcttcgagacagacaccaacctgaacttccagatcctgtacgagatcctgctgggcaaggccaccctgtacgccgtgctggtgtctgccctggtgctgatggctatggtcaagcggaaggacagccggggacgcgccaagagaagcggatctggcgtgaagcagaccctgaatttcgacctgctgaagctggctggcgacgtggaatccaacccaggccctactagtatggactggatttggcgcatccttttccttgtcggcgctgctaccggcgcgcattccttcgaacaggttcagctggtgcagtctggcagcgagctgaagaaacctggcgagagcgtgaagatcagctgcaaggccagcggctacaccttcacacactacagcatgaactgggtccgacaggcccctggacaaggactggaatggatgggcagaatcaacaccgagacaggcgagcccctgtacgccgacgatttcaagggcagattcgtgttcagcctggacaccagcgccagcacagcctatctccagatcagctctctgaaggccgaggacaccgccgtgtactactgctccaacgactacctgtactccctggactattggggccagggcacactggtcacagtgtctagtacgcgtgaggacctgaagaacgtgttcccacctgaggtggccgtgttcgagcctagcgaggccgagatcagccacacccagaaagccaccctcgtgtgcctggctaccggcttctaccccgaccatgtggaactgtcttggtgggtcaacggcaaagaggtgcacagcggcgtgtgtaccgacccccagccactgaaagaacagcccgccctgaacgacagccggtactgcctgagcagcagactgagagtgtccgccaccttctggcagaacccccggaaccacttcagatgccaggtgcagttctacggcctgagcgagaacgacgagtggacccaggacagagccaagcccgtgacccagatcgtgtctgccgaagcctggggcagagccgattgcggctttaccagcgagagctaccagcagggcgtgctgagcgccaccaacctgagcgtgatcggcttcagaatcctgctgctgaaagtggccggctttaacctgctgatgaccctgcggctgtggtccagc

SEQ ID NO: 5279 - DNA, 1881 bp, synthetic construct
  source 1..1881: mol_type = other DNA
atggccttaccagtgaccgccttgctcctgccgctggccttgctgctccacgccgccaggccggacatccagctgactcagagccctagctttctgagcgccagcgtgggcgacagagtgaccattacatgtagagccagccagggcatcagcaccgacctgaactggtatcagcagaagcctggcaaggcccctaagctgctgatctacgccgccagcaatctggaaagcggcgtgccaagcagattttccggctctggcagcggcaccgagttcaccctgacaatatctagcctccagcctgaggacttcgccacctactactgccagcagagctacaactggccctacacctttggcggaggcaccaaggtggaaatcaagagactcgagatccagaaccctgatcctgccgtgtaccagctgcgggatagcaagagcagcgacaagagcgtgtgtctgttcaccgacttcgacagccagaccaacgtgtcccagagcaaggactccgacgtgtacatcaccgataagtgcgtgctggacatgcggagcatggacttcaagagcaactccgccgtggcctggtccaacaagtccgatttcgcctgcgccaacgccttcaacaacagcattatccccgaggacacattcttcccaagccccgagagcagctgcgacgtgaagctggtggaaaagagcttcgagacagacaccaacctgaacttccagatcctgtacgagatcctgctgggcaaggccaccctgtacgccgtgctggtgtctgccctggtgctgatggctatggtcaagcggaaggacagccggggacgcgccaagagaagcggatctggcgtgaagcagaccctgaatttcgacctgctgaagctggctggcgacgtggaatccaacccaggccctactagtatggactggatttggcgcatccttttccttgtcggcgctgctaccggcgcgcattccttcgaagaagttcagctggttgaatcaggcggaggactcgtgaaacctggcggctctctgagactgtcttgtgccgccagcggcttcaccttcagcaacttcgagatgaactgggtccgacaggccccaggcaaaggactggaatgggtgtccggcatcagctccaatggccggtacatcaactacgccgacagcgtgaagggcagattcaccatcagccgggacaacgccaagaacagcctgtacctccagatgaactccctgagagccgaggacaccgccgtgtactattgtgccagagtggtggacttcgaccaggactacaacggcttcgactattggggccagggcaccctggttaccgttagctctacgcgtgaggacctgaagaacgtgttcccacctgaggtggccgtgttcgagcctagcgaggccgagatcagccacacccagaaagccaccctcgtgtgcctggctaccggcttctaccccgaccatgtggaactgtcttggtgggtcaacggcaaagaggtgcacagcggcgtgtgtaccgacccccagccactgaaagaacagcccgccctgaacgacagccggtactgcctgagcagcagactgagagtgtccgccaccttctggcagaacccccggaaccacttcagatgccaggtgcagttctacggcctgagcgagaacgacgagtggacccaggacagagccaagcccgtgacccagatcgtgtctgccgaagcctggggcagagccgattgcggctttaccagcgagagctaccagcagggcgtgctgagcgccaccaacctgagcgtgatcggcttcagaatcctgctgctgaaagtggccggctttaacctgctgatgaccctgcggctgtggtccagc

SEQ ID NO: 5280 - DNA, 1875 bp, synthetic construct
  source 1..1875: mol_type = other DNA
atggccttaccagtgaccgccttgctcctgccgctggccttgctgctccacgccgccaggccggacatccaactgactcagagccccagctttctgagcgcctctgtgggcgacagagtgaccatcacatgtagtctcagcctgggcatcagcacatggcgggattggtttccgccgaggcttggcaggggccttgagccgctgacctacgccgccagcacactgcaaagcggagtgcctagcagattttccggcagcggctctggcaccgagttcaccctgacaatatccagcctccagcctgaggacttcgccacctactactgccagcagctcaacagctaccctctgacctttggcggaggcaccaaggtggaaatcaagagactcgagatccagaaccctgatcctgccgtgtaccagctgcgggatagcaagagcagcgacaagagcgtgtgtctgttcaccgacttcgacagccagaccaacgtgtcccagagcaaggactccgacgtgtacatcaccgataagtgcgtgctggacatgcggagcatggacttcaagagcaactccgccgtggcctggtccaacaagtccgatttcgcctgcgccaacgccttcaacaacagcattatccccgaggacacattcttcccaagccccgagagcagctgcgacgtgaagctggtggaaaagagcttcgagacagacaccaacctgaacttccagatcctgtacgagatcctgctgggcaaggccaccctgtacgccgtgctggtgtctgccctggtgctgatggctatggtcaagcggaaggacagccggggacgcgccaagagaagcggatctggcgtgaagcagaccctgaatttcgacctgctgaagctggctggcgacgtggaatccaacccaggccctactagtatggactggatttggcgcatccttttccttgtcggcgctgctaccggcgcgcattccttcgaagaagttcaactggttgagtctggtggcggcctggttaagcctggcggatctctgagactgagctgtgccgccagcggcttcacctttagcacatacggcatgagctgggtccgacaggcccctggaaaaggacttgagtgggtcgcctacatcaacaacggctccggctacatctactacgccgacagcgtgaagggcagattcaccatcagccgggacaacgccaagaacagcctgtacctccagatgaactccctgagagccgaggacaccgccgtgtactattgtgccagaggacagtggtggagcggcggagactttgattattggggccagggcaccctggtcaccgtttcttctacgcgtgaggacctgaagaacgtgttcccacctgaggtggccgtgttcgagcctagcgaggccgagatcagccacacccagaaagccaccctcgtgtgcctggctaccggcttctaccccgaccatgtggaactgtcttggtgggtcaacggcaaagaggtgcacagcggcgtgtgtaccgacccccagccactgaaagaacagcccgccctgaacgacagccggtactgcctgagcagcagactgagagtgtccgccaccttctggcagaacccccggaaccacttcagatgccaggtgcagttctacggcctgagcgagaacgacgagtggacccaggacagagccaagcccgtgacccagatcgtgtctgccgaagcctggggcagagccgattgcggctttaccagcgagagctaccagcagggcgtgctgagcgccaccaacctgagcgtgatcggcttcagaatcctgctgctgaaagtggccggctttaacctgctgatgaccctgcggctgtggtccagc
